United States Patent Application Publication US 2015/0376612 A1 - sequence listing, part 58

SEQ ID NO: 136646 - DNA, 7808 bp, Homo sapiens
atacgtaactccctcagtcacagtgtcagaggctaatcttaagagaattggaaaggattttgatatacaattttgcttctttgaatttttgtttagttctctgttgaggcattttaaacttactatatatatacttagacttgttgcataatccttgatattccacatccttgcagcacttattatctgagtttttattttttggtcagtctcatgggtatgaaagggtatctcattgtgattttaatttacattttaaaattattagttaagttgggcatcttttcatgtgtttattaactcttccattttcttgtctgaatagaacatagatgttctattttgttggattgtatgtctcttagtattcttaggtattcaaaagccaatccttgttttgtcatttgtgctgcagagatctctttcagtctgtggcttgtccttttactttatttgtagtctttcattatgcagaagtttctaattttaatgccagatatttaattttttcctccttacactatgtgggtttttttcccacaagaaagctttccctcctctagtgacgtagacattctcccctgttttcttctaaaagttgcaaggtttggattttcttatttaggtctttaatccttctagaaattatttttaggaatgatacaagttaggaatctaattgtacttgtttgcttccttgtagagttattgaacgttcctgtattgttcctgtattccaggggttggcagactttgacccatgggctaactcaactcaaaactgcctttttttgtaaattaagtttgattgggacacagccctacccatttgtttatggctgcatttgtgctacaacagcagagttgagtagttgccagagatactgagtgaactccaaagcctaaaatatgtcctatctggctctttacagaaaaagcttgcaaacccatggtctaaaagatagtcatgaaagagtagctcatatttccaacagtagcagatatagtcagtgaaaatagaggaaattacactaaaggttgtaagaaggaaggaaaacaatcttttggacatgtaaaaaatacaaagtttgggccgggcgcggtggctcacacctgtaatcctagcgctttgggaggctgaggcgggtggatcacctgaggtcaggagttcaagatcagcctggccaacatggtgaaaccccgtctctgctaaaaatacaaaaaattagccgggcgtggtggcaggtgcctgtaatcctagctactcaggaggctgaggcaggagaactgcttgaacccgggaggcagaggttgcactgagccgagaccgcatcactgcacaccagtctgggcaacagagtgagactccatctcaaaaaaaaaaaaaattgaaattttactgattcttagattgtcatatgagaacttccctcaacccaagtagagtaaaggggaggtctgtgaatcctctgaagttgtatgtaatattttgtgtgtctgtgcatatgtgtacttttttggaggagaggatgcatagcatttaagagactcaaaggggaccatgatgtgaaaaatgataaagaacgctggttcttatgtttcatttctggcctcttatgtaacttgaggggaaactttagccttaaaaatgtatacttttgtcacctaaaacatggcagtgcgaagaattttcttgccaaaccagacccatttaaactgtgtgggtggtaggagggatgagttctaattctgtctccagaatttttatagccaccattaagactacttttaacttcagctgacctactaacattttgattttttttaatatgagaatttcttttaaggctaatatgaaggtttaatgtattttggcagacatattttatgttaaaaaaaagcaatatcctttgttagtgatcatgaattacctatcactttcaaagttgcttacattataaaatttgaagccagataatttttaaatttcgtttctattgtcatatttcagggatgtttggattctaaattcccggcagttcttcagaactgataacacatactattcagctttattaattcacattctactcatttagaatttgtggtaattcagatggaatgagttgaaattcttcttagtacacattaatagttatttcagagcctaggttcttttcatataccattaaaaatacaggttgagtgtccctaatctaaaaatctgaaatgctccaaaatctgaaactttttttttttttttttttttgagacagagtcttgctctgttgcccaggctggagtgcagtggtgcgatctcggctcactgcaggctccacctcctgggttcacgccattctcctgcctcagcctcccgagtagctgggactacaggcgcccgccaccatgcccggctaatgttttgtattgttagtagagacggggtttcactgtgttagccgggatggtctcgagctcctgaccttgtgatctgcctgcctcagcctcccaaagtgctgggattacaggcatgagccaccgcgcccagcccaaactctgaaactttaagtgccgccatgatactcaaaggaaatgctcatggagcattttgtatttcagatttttgaattagggatgctcatccagtataatgtaaatattccaaaattccaaattcaaacactctggttccaagcatttcggatactcagcctgtactgtagaaacaactatctacatttaagtaagtggcattttatctgcagatcgtttatattgatgaacttgtactaaggaaccatctgtttgcttgtccatttgtctacattctttcaaaaattgatgaaagtaatgttggtactttcaaataaaggtgaaaaaaggaagctgtaatttggaaacaccccatggaagcccagtccagattataacttagactttcagtaatttgagagaaatgcgatgataaaaattcaagtatatagaataatttatgcttatatatgcttgcattataataaacaatatatacttatatgaaaaatatatggtaagcatataatatatatgttatatataatctattataacagtgttgcatttatagagattaaataagtgggttacacttaggcttgattttaattactctatatgcttgaaaatactgagtatttctttcaaaatggctaagatgttagacttgagacaaattcagaataaccttattcttctttcttaatagttggaaactagcatatctctaagatgcatggatattggcctctgtgtgccttttaggtttttggacattgaaaggtacaggtttaggaggacacaagccagttgatgtaagagacagctgggaagagaaagactaggtcaaatcttgcctggggtctgtgagtgtaagagaagaaagctacatcaaggaggccatttagccatcttttgtttatcccctttgcatttgctgaagttttttgttttttgtttttttgtttttttgtttttgagacggagtctcgcactgtctcgctggagtgcagcatcgtgatcttggctcactgcaagctccgcctcccgggttcacaccattcttctgcctcagcctcccgagtagctgggactacaggcacccgccaccgtgcccggctaatttttttgtatttttagtagagatgaagtttcactatgttagccaggatggtctcgatctccttggcctcccaaagtgctgggattacaggcatgagccactgtgcctggcctgcatttgctgaagtttttgagtggtcaccacatcttagttttacctgtgctttaaggaatccaggtgtgggcacccgcacccctctcctacacatacattatactactaagtgtcaaaggtaataagatatggtcctggggttgtgagttggcctttccagtcttgctgaatcttcagtcaatactaatctttaaaattccagggcttctttcatcaaggaagatggaatttccttattctcaatccaaatttgtgcctttttccacccatatattggatttcttattactagatttttcacatgggtctgcataaactagtatcaatacttaaaaattttgtattaacacaaaacaaaagtctgcagcctcaaattatttctgtattctccaacctctacttcagtttgtcagggagtgcatttcagatgtttttttgttctacctagcccctaagccctgtgctctacatagtggatgtttgtttgccttacctctgggatcacactcacttggtagtttctgtagttatagatgggtagatagggaagtggtatattttttaaagaaggtcttgatatttaagcctattttgaatttataagaatggccaggatactcaaacaagaaaaaggataattcgtacatttgtagtgggaacctaggaacttttatctgaaaagatagggacagagtatttttgccttgtaattttgcctttttaattactgaaaccattgggaatgtggctaaggatgagaagataaatgctattaagactgaccttgtgtcagcaccactgatctctgctgagatagattaagtttcattactttgactagaatcacataaattgagtcctggaaatctttttcttccccacccctcaccagaatgagtgactttgttaacccaaattcattccatttttctccatatgtgaaaattttaaataaacctattttggtatctatttctttttcacaagccatgtgttatttgacaggtgttttgaagcccttgctttggcagtgaaccaagatgacagagcagtaatgatttggaaagtgccattccctccttgttaagcgataaaaagaaaagtgtgaagttattaaccactattcaccagtggcatagaaatcggtataaggtttaattgtctggttctacagttggtctaggtaggcaatttcctggatagtgcttctcttaaggaaagggaagaataatcatataacttcacttttttctcccatataatttttttttcttcttttcacaaattgcagatagatggattggagagaaaggatcactagaaaaccaaaatattgacctcacaggctttccctttcctcatctgcccaggtatacatttatgggtgacatggcagcactcagcaacattgcaaatttcccaccccccaaatgaatcacatgctcaagtgtttgaatctgatggtgtacaggatgttaccacactgtctccttatgttagccatgctgagtctatttattgctaattggaaaaacctacttttggcagcctcggctgcctggtggctttagcatacccgtcacaacagtatggtcagacccattaaagacacatccctgtcaaatttagaaaacaaaacaagctcattgggcttgttatggctcaggaccagctgactgagggaagactaatagaattagtaccttctgtttgtgtgttatcattgcagtgggcagcatgagcctgtgtcaatttgccagatcataaatactgtgttaaattacaatgaactgagattggtaagttgtgggagttttggaaggcggggagaagaatagttttatgtatgtgtgaagaagccgtttgattttcagccagggattcctgagccctgtggtcatggttttagagatcttagacttactttgaaatttagtaccagagtcaggttgtgcagctgtccttgtttcctttttattgttaattttgtggttgaattggcttgtatcccttttaaacttgaatgtatgagtctcaacattaaaattttttctttgaaaattctgttttaaaaagcaatatgaaatagaatgtagctgaaaagtgaatttttactcacatttttaaaagagcaacaaagcatgagtgatttccagaaatggtttctgtgtcatctttggaattcttctaattactaattcttctttataggcttgggtttgattttgtattacctgtttttattggctttgttgttttacatttgacaaaagatttgctgttttgaggctagtgatgagattgatttatttatttttttatttattttgccttaggactaagagttgagcggagatgggagtggaacaaagatattaggtttcttttatgatttggagtgtcagacatttggctatatttgtttcatgggtttttcatcgctgctgacttaaccacagacgacattttcagccctgtgcaggagggtggtgtgccttctgcaggcagggaggaggagggttggggtgtggtggcttagagaaaggaatcagctcatgggctattaataatgtaaattgttcttgaggccacatgtaacatttctgagccctgaccaacagggtagggtgcgtgttctatttacattggactgcatggcacgatgtgatggatagctgataatcacaggaaaaatccgggtatttcttctttaatgatgtcctgatagggcagaaaaaaataatttgtcttcagaagattggcttagagtggctgaatatatttaattcaattactggttcttgcctcatagccaggaattcttcaagtgatatttgctgagtgtgtacatggagggaaatggagacaaatgacattgcttgtgacccactgccttgagaggaaagccttcggtaatgattccagtaaaactagagctagagcttgggaagctaaacttgtgattacttactagtaaacaagagaaaggacctgttgtaggtgcaaaaatcttactgaaatgcctgagtatgcactggagaaagccctggactgcacaccaggggtgctcacccacttgtttactttttgtggctttgagcaagtcatccattctgcctttggtttttcacttgtcagaggggtgctagatgatgataattactgctcagtgggcttcagttacaaagcaccttaacatagagtagctatctactgttgtttctcagaacaacccaggggaagcattcgtgcaaggctccgagtacctagcaagtgtcaggcatgccacgtggtgctgctgttagggagacagtggtaaacttaagcattcaaggaccttgtcttcatggagtgttcagtccattaggtgagagctgttaatcaaatggtcaatgaataattatgtcattctgaaagaaaataagtgctaagaaaaggcacatgaatttctgagtcttgatagcaaaggcccttgacctggactgaaaagtcaaaattttcctgatcctttggtacttgagctgagatctagaaagtgtgggctggagttaactaggtaaagagttggaagaataagcattctagagtgagggctagcatgtgtagaggtcctgtggtggttggaagcattatgtggccagggcactgagaaggctgaggtagctgaagtatagaaaggaaggggagagtgataggaggcaaggctggaggggtaatcaaggtcacaccatatgggctttgcaggccacgttgaccaagaggcagatgttaatagttttttgggtttttttttttgaggcagagtctcgctctgtcgcccaggctggagtacagtggcatgatcttggctcactacaatctctgcctcccgggttcaagtgactttcctgcctcagcctcccaagtagctgggactacaggtgtgcgccaccactcttggctaatttttgtatttttagtagagttggggtttcaccatgttggccaggctggtctagaactcctaacctcaaatgatccacccacctcagcctcc

SEQ ID NO: 136647 - DNA, 9002 bp, Homo sapiens
tttatatgttgggggagattggctcacatttccattttgagaagatcactttgcctcagtgagttggaggggccagagtggatgaggggaaactgattagcaggctattattagaatagaattccaggcaagtgatggtggtagcttgactagtgtgatggcagtcagtggagggaggaggacccagatatgagagagatttaagagaaaaagtatcagtaaaactgggtggtatattggatgtggggcttaggatggggaaggtatcaaggtcaactcttggctgacttgtgtaggaagatggagtacctttcactgagatgaagagcactggaagatgaccaggtttggggcaggaggagggaaagatgaacagtttgatcgtagacatgttaattttgaggttgcagaatataaactggggagtcattggtttatagtcattgttaaatgaagccatggacatggatgagattactttgggagagaggagagagtggaaagagaagtgggtgtaggactcagtcttaaggaaccccagcatttaatgacttggtagaggaggacaggctttaaaaagtagaccgtgaaagagcagccagagaatgagaagaggtgggaaaacatggtgttgtgaaaccagtgaagagcatttcagggaagtagtaggcaactgtcaggaagagacactgatgatagttttgaaaaatttccattgaattttgggatatggaggtgatcttttactttagttggtgctgtttgagtgcagtaatggtggtcagactgatttgctataggaagataatgtaattatccatagtttatagatcaagaatctgaggcacaaggaagttacttgtaaaacagctcacctaagtgtcagaactggaatccaggctccctgttctgtatacctgctacctacagcttactgctttactaggtgagtgtgtggactgaagaggcaaacacagctgtgtccctgttttgcttctccctgagttgggatctattaactagttacttaacctcattgaccctctgcttcctcatttttaataatggtaaatgcccggtgaggttgttgggaaaattaaatgagataatgtgtgttaatgccttgaaatgcgtttgatacataataagtactcagttaatgctagctaaaaaataaacaaccttctaccgttctgtctgccctctcctcagagcctcttacctccaattacatttttctcttgtttaatgcttagcagtcttctctaaaaaggccagtttgtatgctatttgcccagttatttttcaagtttgtgtttttactttgccatttctcctgcttttagtgcctttgtccacctacaccactaatttctgtgtagtgtaatttctgtcagtcttcctcaaaactcactttttatgactgatttaaaactgattttcttcactctgcaacttaatgagctcagcttatgtttacatttgtttcttcttaggagcttgatattcatgagtttgcgaagtttgttcactcagttttactaaatagattcaggggccaggcatgttttttcatgtccttcagcaacatgtagtagaatgctttaaagtagtgggtacaaaatggcaaacagtatttttatgctatttaagaaatagctctttcctgtcactttcttctcattacagtcgtaaggtgcagttattactaagtcctgccagtgttacttccaaaatattcggattaatccatttctctccattgacactgccactgctctgattagtttagaccaccatcatctctggccaggatcactgcatcagcctccctgtggtgtctcccttctactcttgtcccccccaatctattctcaaccctatatttttaaggtgtaattgcatcatatcattctgctttgattcctcattgacttcctatttcagtttaccttggactccaaggtcctacgtggatcacttcacctctccttttacctcatttttgtgcctcctacctgctgctccctcacctgcacccctgctttagtccagccacatgggctaccctgttctttcagttcttcacacacatgaattctgtccctccatagggaccttgtgcatctggtttcctctgcctggaatgctccttcccaggcttggtgcagggttgtatttttctctcttcaggtctcagcttatatgtcaccttcttgtgtgtgcgtggtgttttttttgtttttttttttgtttttttttttgagacagagtcttgctctattgcccaggctgaagtgcagtggtgctcttggctcactgcaacctccacctcctgggttcaagcatttcttgtgcctcagcctcctgagtagctgggattacaggcacgcaccaccacacccagctaatttttgtattttttgtagagacagggtttcgccgtggttggccgtgctggtcttgaactcctgacctcaggttatctacctgccttggcctcccaaagtgctggaattacaggcgtgagccactgcgcctggccttatgccaccttcttgatgagacctttcctgactactctttctaaatagatccatccagcacaccgccatctctcatttttaaataaaaaattttttctcactaattttatagggtgaaatatacccatgtgccaattttccagaattaatacatgttaagattttgtcataattatttcagattttaagtaaaagagagcattacagatagttgaggttggtaatgtgtgcccttccccagtttcctcctttcctctccagaggcaactgttatgaagctgatatgtatctttcctttttccatgtttttgttacctatgaatgtgctcacttaatttatgtggatggtatcttatcatttttcagtttgcaacttttttcactcaacattatatttttgagtgatatccatgttgatgtatacatatctgatcacttatttgaactgctgtatagtattccatcatacaaatattctacagtgtatttttccctttctcaagtgatggtcatttagattgtcgtcagtgttttactgttatgaaaagtaagcattcctctacttgtctatttgtacacaggtgcaagagtttctctgtcatgatcttttctagctcaacaccctgtttcattcccattttggcactcatcattttgtaatcactgacttatgtgtttgcttgtttatatacatcttccttattcagctgtgagctccattggggtaggcagtgtgtttaactcactcctgcaaacacagcccctagcatagaccttgacacatagtaggtgcttcgttggtatttgttgaattaagtcagctacctgctttccatctgttttgtgtagttcattcctttggtttttgagctttggttttcagatttctgaagaaaggtgaagactgatgaggtgagttgccaaattctatggatagtgattataggtgattaggtaaacctggcatgggaaggagctgaggaaaaaaagctataaataatttgttttggtttaaacaaaccaaaatctcaaaatttggagatgatggttggcaaggaactatgtgtactagttttggttattgaaggagctgggtttatcagctgtgggctccttccacatctgtatcattgccttattattataggattttggagaggggtgggaggattttgtgtttattttctaaaattattctatgtgaaaattagaaaattagaattatggtaggtgtaggagatatggatcgtagattaaaaagcatgagaagaaattgggctgttgatcttaaagcaagattgtttaaatcaattagttttttaaaattctcctttttattagagttcactgaatcagtgcatgtgttctgtgttttctgtttgcttttgaagctgttcagtgttttccttaccatcatagacttcagatttaactacttgatgttcacctactgaattcacatgtagagaggaaagacgaattcacgggaacaaacggatttcttaaaatggagattgctgctataatcacactttggacctctattctagtacaggacatctcattttatccactagtagcctgtgtaagccatttgctgataaattgaatcactgtaattatatttgaagttagctattggaggaaaaaatgtagctatagttaaatactatggtaatgcctcctaatttattctttttcattttggagtatactgtttctcccctcctccactcagtttagtgtggcacatttgactgcccgccccccttaggttgggtatcagttatgaacttccagagagaattaggatctggtctcactgtctcctttgcatgtaaatagtaaataattagacatgcagttaaattggagacaataatagctgagatatattaagcatatgatcctgttagacactgttctaagcactttatatgaatagtaaacatataagcacagtccaaaaaatttttttctaactgtataaaatgtaggagtcatgttattttgaggtttatgagaaattgtaatcttcaatttctagttagtggaggtgggcgtggaggagaaaatgtttgcatttattacatgtgtagaaatgtactgaactgagaaaatctaaatggttacaggctagtcatttcttagtatcctgcctattactcatccactcccttggtaaaagctttaccctgttcctataagtgggagctgggtggaggatgggaagcaatcctcaattgagttagatctgactttgcttgattgtgtggcaagttagtatggggttttatgtcattattttatttcccttttatagttgagagaactgaagtacagaaagtataagtaacttgctcaagatcacagagctagtgaataaatggagccataattcaaatctaggcagtccaagcattcttaactgccacagtacattgcctgtgtttttgagtatttgcctgtgcaacaggcattaggagatgggagaaaatagtgttgtatcttcacagtacttggagccatttttgtttgaaaggatgtgtactgtattagtgtgtgtcatcctgggttggttagcatttgctgccactttatagattttctgagagcttcaattttccttttatatttcctcagtcttttgacagcagtcataatggaatttgaatggtcatagttaatgtggcctttggaacagaattcttaaggaagaggattgggtgatgaagcaagggtggtaagatggggaatgaggaggaattctttctgtcgtatgtattttgtggaataaaatagtgatgccatgcaccacagctcaaacttggcatggttctggaagatgtctttgtgtagcctgtctgtaccactcaccatctgttataatggtgaaggtcataggttgtttgccttaagcagaataaacaaatagatacagaaaatgtattcagtaatctttgcttgatgagcagaagctagcagttgtttaaaacaagtgaaggggataaaaactcccctaacttttatttaccaatcacatcgcaaagcaaaaatagcctatttttaggctgaggctccaattatgttaagccttgaagataatgaaacagtctgacacaaaagagtgtggtgacgcaagtttgtgtggtgaaattccaagacactcactgactttttaggattctgcacggtgaatattaagctcctaaagtgtttgttgcccggaaacagcgctttattcttttacatgcagtgtaatgaagtgaacctgtgttgtaatttgtttcttgcaaggaaaagggagaattaacacacattatctatctttgtgtcctgtctttggcctcttgtgtgtcccttttatgtgctgaagccaccaagtcatgctattgctaatactgcatattaccttctgttttagccactctaatttttcttaatgctttacacagtaggggtttccagtttttcaactaattttgtattgtagatttcaccgaatttggagggtttttcttttctgtcactttttcctcattctatgtaagaattactcttagcttttggacccgttcataatcatgtcaggtgatgtttttccttggaactaattagtttcgggggtttgaaatatgtgctggcacggggtttcattggctggattaatggaagttggccatttgtgctctcccggtctcatgttgccctttctatttacaggttggtaatgggcttctgggtttttattctgctgcctgtagtcttcttgaaaatgaacctgaggtgctgaattctcatgtgatgggaagtgtaatgcttccttccagggcagcctgtcttcttaattcctgaatcttgctatagcctaggtcccaaggaatcagattcctagagtcaggaggttggtcatcttccatttggtctcagaattttcctttccaaagagtagtcataagaactaaatgtgggaaggcagaaggaaagacctatcaacatcaaggtgccaaagttacaagcctctggcattggtggttcatggcaggatttgatgaagttggggagggaaggggacttgaaggggataaatgaactcctcattagattcagattgaagtgcactgatgtgacctgtggaagagctgaaaacataaaatagcactcaggtgattgataaagacagcctggttggatgaagtggaagctaggaaatctctggctgggtgcctgctatccacgtacagtacttactctatttcatttaatctcctgcagccctgcgggtgggggctcttatttctttttacaaatgaggaaaaagtcttgaagggattaagtaaattgccaaggcctctttatttgtaagtggctaaaatgaatatggcttctcacatttgtgccactcttctgaaatacaggaaacacagacatcaacagtatttatctttgtatgcttactaaggaaaatactgtgtggtacaaccactgaaaaggctataatagcttttttgttattgcactttaacagagagctctttcttaaaattacagatttttaggaccaaattcagttcagtcgtctggcctactatgtgccaggtacagtattgaatcctggggatatgaaggtgagacagaccatggtccctggtccctgattatagtctgagttgggagtagaggtggagggaaaggaaagaaattgccctgtgaacaaattccatgccatatgactaaggtaaatttaaagaaaaaaggaaaggtaaacattgcctagagattacagaatgatgcccatgcccacagaatatctcttactgtgagatccattgattctttggtcattgccaggatttgtccagagaggtacgggatgtcgtctttacagggtgaagcccaagaggaaccatattatgttacaaacttgggggcttttcttttctagctagaggtctaaactcaggagggtaaccaagttttttgttttgttttgtttttggtacacaaagaatcttctgtttctacatccagtaaactttttgttttcttaattttaaattgtcctcaggctgtacctttccttacccccatctctgaccaagaagggtggcagggaaggggggttctaattccaactcagctactaatttaggaggtgaccgataacctctacagttccatctgtcatagtgcctttcacataactggtactcaataataagtgtttgccatgggacaacagaacttgaaatcttctgtgattaatttgtattgatttttggggggcaggaactggaagggggttagttttttttaggatgaaaagttgctgcctcacattccataacagtaacacaaattatggataaatcattaagtataaatcacaactcaagataagtgaaaaaaattttcaaatattgaagagttcttttataaattccatctcctagtgagatgcattacatctcagcccagaatgctgaaggttcttgtgattcctagcacagtgcctcatctttggtgtatgatcagtgaagaataatacaattatgaaatgactactagtaatctctgaggacttctgaggataacaggtgttctgaagtttgccaaacttggagaccaccttcccttcctagaacagatttctaggaaaagtcttcaggtctttttgatcacaatacgataggaattgtagggaggacatgaagaaacaaaagatcagtcagaatgtttcacacactctcaattctctaataaacacagtactaagcagtacctagacattgctctttgcctgaaggtgggattctttagtacctcatacagtaaaagatggtgaacctttcagtgctttttttcagggcaaaaacagcagggtcatcgagtcataactcttgtaatctgggatgcaagttatgtaaccatgtcaggattttcttgagggtttctgtccagaagatggaagacaaggagtgttggttgttttctaaacagtgaactctagaaatttgtagatgaatgaactatacaatacaattctagagaaaactgctaagcaatttttcagcactttatggcagtcaccaaggatcattattggctcacccagaacaggtactgttggtattttttttcttttagtcttaatattaggcttaaattagcacatgaaagtgctagttttaaaagttaaaagcagttgaatatcaacagtttcatgtgattcatcctaatggtttttattatttttttctggttataaaattaatacatgttcattgtagcacacttagaaaaatagaggaaaataaaattacagtctaacaatctattttatgcacttccatctttccatgcatatacatatgcacacgtataaatctgttcaccagaatattttcaaaaaacttactgtggattatagttcatttttagagactatctggctgt

SEQ ID NO: 136648 - DNA, 1943 bp, Homo sapiens
gtaaattagttcaaccgttgtggaagagagtgtggtgcttcctcaaagacctaaaaacaactactatttgacccagcagtcccattactggatatataccaaaaggaatataaattgtgatattataaagacatgcatgtgtctgttcattgcagcactattcacaatagcaaagacatagaatcaacctaaatgcccatcagtggtagactggataaagaaaatgggggtacgtacatgatagatatactcatttctgcttttactagcaatgtgtgaaagaacctccctgataaaacatcgccacagttagctgttacttctaagaccaagagaaaaaacaggattgaccaattttgtttttccacctttgataagtttactaaacaaagatatataatttggttttatcgaaggacctgacgaagtttttcatgatatctttgttgtccaatcaaacaatgtgaactgaatgcagatagaatcagggatctcttgtttgcagaacaactatactctggaaaggttttattagtgggttattgtcaactgggagggacaccttgtgtggtgaggcttagtgaccctgtcctgaacaatgttatttacagtgattttgatgaaaacagaacatgagcttaacaggtttccaggtatgccacaaagtgagaaggatggctataagttcttctgtaccatactgtgggctccctgagcaagggagctggagtgctgagagcattccttctggagtcaaactgctacctattagctgtgtggctttgggcagagttacctaacctttctgtgtcttagtttcctcatctataataaaacaggaatcaacagaatatttacctcatgacgtttgttgggaagattaaataagttattaaatgtgaagcactgagagtagtttctggtccttagtaagtgatcaataaagatgagctgctattgttaatctttctctcagatggtagataacacttcttaaatgaatgcctgagtcagtgtcataaatgctttgtatgctggtgggatgggtccatattgcaaatgaaatgtgatgtgtaagttttgcatttatgttttataatattagaaccgtcatgtaaagatagggctgagagttatactgtgtagctccagaaggtagagatacggtttattgataggaattagtgataagatactttctaccaattagctctactcaatagtggagttgccctttcaggtagtggaagaattcaggtacaagcttccagaccattacaagtacataattgaaaagagagggcttctttggctagaggtgagactagatgacctctaaagtcccttccaactctaggctgattctgtgattttgagtggcatatgtaggattatcacatatcatgcaataaggccccacgagtacatctttggaagggttgatgctgctaatccttgcccactctgccctctctgcttcagtttctttcacctgttgtgtgtcagcctgacagtggcccattcctcagcttgattcagttttacagcccagcttagtgtcccaggctgctccctcctcagcagcaatgcctagaggatgagtatatgaaccaagggcacatttttcataagcatacaagaaaatagaagattgttgcctgcaaagtgtatctcagaattgtattttaaaaaaacaagcaacagttttgaccatgccagatgtactcttgtcgctttattcggggccaagggtggactttaccttttttgctcagcagctctgggcactgggtttctctgcttgtctggtttcttgcctaagttcagcatcaatattctaatcccctgggaaggagcagttgagcccacactgttgtatatactatgtgggcttgtatacctttggctgagattatttttctgtcatgaactctgattccttg

SEQ ID NO: 136649 - DNA, 2962 bp, Homo sapiens
atttgttagatgactagtgggattttaaacagatataatcacaccatgtcttttttttaaatgtgatgttacgtacatatgaacttttactgctcaaattttaaattatgtgtttttttttcttttttgtgtttataaaatccattattagcaaatacctcaggaaaactttagagtgaaagtcctgaaaaaattttccactccatgttttttaatgttgtggtttgtccttagttttgccatctggtaatgaatggttgaagtgataaactcctggcaccaccgcattttgctgttgatactagtgtgtgtctatagcttgtggtacagaagcactaagtgaggtccatgctgtacagtgagaagccgaaagagttgctgctctgtgtgccaggtgggttaatatgttttagagaaagcatctgtggaattttacagtggatgttcttttgtagccgtattaattttactccttttgagtagtatcattttaccagccagaatctagagcacgcacatgcattatcagagtgatttgaaacagtggtgtacacacgagcactgtggggatggttctgatgctttcaaggcctagagtctcactgcatatattctgagccagagtgttaatcctactgccttaagaagcctttgcttctccttttagtctttagagtttatgaaaccaacagctttgtagtcttcaataggaggattgtacatagagctctaaagattcttggaacatagaaaccataaagaggaacgtgtctgtgtttactcttgtgttgtgttatatgcacagtgtagaactttttaaaattgaaacaacagaggtagatgatattttaaaagattactaaacattagatttttagactcatctcatttaggctgaaaggaaccttctagtccagccccctcattttacagatgaaaaaatataagtccataaggtcccactgagcctgaatcagggttgatgtaaaacctagaggtcttccttcccaagccagatctggttggatctcaccgctcttgtaactgctatagaacaccactgtagcatttagaaagtactgaatcattatgtaagaaaatgactctctcagtaaaacagtgtagttgttgagtccatagtccaagcaggttttatcgtttgtattaagtaacttcagctgttccatagtcttcagaaagtctgagctgactatatttattttatccaccttttacccagttaacagaatgcttactctcttattgccacttaaaagtcatctggaagactcatgctgataatgtaatgcatggtgaaggaagggggtaaagtaggaaaacataattattgcatgcacggtctttttaaaggctcttttctcctctttttcccagtttagttgggtagatctgatttatatagcattttccccccttttcctaaattggataagagctggaagactattcaggaaaagctataagctatagcaaagcgtgtgaaaagacagtagtttgtgcctttctcaaccttgttatagatctgtggatagtttggagtttacaaaactgtacttaaatattttctttaatataggttagggacagatttctatttgctattgatgactgtcaaaacaacttccctagaatgattgtcacagagcatggggcctcattttctgatggagaaactgctttggtttattctcactgtttttacatgattatttcttattttctcaagtgcttatgacatttaaaaaatctgtggttgagaattgtggcagccagtattatgagaaagagaaactaggtgcctgtaaactatttaaatacaaacaaatgatagcaaaacttaaccaggaagaacatgagtttgaaattgttgatgaacgtgatctaggcctaagacaagctgaaactgtatttctcattcattctttcttaaccagaattgctttaccttcaaactcaagcaaatcttttgtttaatccttgagaattgatacttcagaggatttctttatttcagttattgatggacattattcttaggattcagtactgggtcaagatgtgtgttttttcagcaatgtttgactgaatcccaagctttctcaaggcatatttaaaaaccagtactggtaataggcagacttacatacagttttatcagtttatctctgcttttttgagggagagggagtttcagctaagttgggtttgtgctcgtgaaatacaatacaaaaagatttgaccaaataactttctaatcatccttgctgtatgtatattttggtaaaatcctgctcacagggaaaatgtcttgttaatttttggttacactaaagacattctgagcaactaactttggtgtgtagggctaaaattacttgaaatgctgagattgtattgttttgggaagaacttaagtagcattctatttgtgttaaatgttcttgttaaggcaatggaaaagatattagttgaatatattttttcaaattaacttttttgtctttgtgtttttattttaaaaagcttattgtattgtcttgtattaaaaaaacacataatggaaaatttaccatcttaaccatttttaagtgtgcaggtgcacacaacacaggtgcactacgcaattcactgccagttacagtagagtaagaagtagatatttgcctttggggatcttgggaagaagactgctatctatctctaatcctcatggaatccttaagtggtaggtgccaagggctaaggtgaggggggagaggtggagggagttgtttaatgggtacagagttgagctcctttctctataaagcatttaagcttttttgttgccattaattgcttctatgggctaaagaaactgaaagtgtgggcaggtaatcacttggctactaatataaagaggaagtgaaacaaaggactggcttaatggttcagggtggaa

SEQ ID NO: 136650 - DNA, 2240 bp, Homo sapiens
gagattttttttgttttgttctgttttattttttagtttgttaatatggtgatttataatgattgcttttcaggtgttaagtcaaccttgcatttctgggctaaaccccacttggtcatgtctatgaatactttatttttggatttttatttactaaaacgtttagaatttttacatgtatgtttatgaggaatattggtctgaaattttcttttcttgtaatatctttgtcagtcttggtcagactagggtaatgctgccctcacaatgtgttgagaaatattccttcctcttccattttctgggagagtttgtgtagaactggtattatttcatctttaaatgtttggagtaattcaccacagaaactatctgggcctggacttttatttgtttaaaaatttttaactacaaattcaatttgtttgacagacagtcaagttgtctgtttcttcttgagtgagctttagtataatagtttgtgtctttcaagaaatttgtcagatttattggcacgaagtttttaaataacattccctttttatccttttaatatctagaattggtaatggtgtcatctcttattgctgatgttggtaatttgtgtcttttctttttttccagcgatggtagtcaccctgaactctgtcttctggctcttcaagccagaagaaatgggcatcttgcctggtgcctttcctttttaccaattgtagacatccctccatttttggcaagtttttcgttgtgctccagtgccttcaggtagtggctttttacattgtccagaggttatcaacggtaagaggctatttttgcccagtgctgaagatggcatctctgggttttggttttgtaacattctagcaaagccagacatgctttgctgcagtgaaagtgtggaactggataattgagcagcactgtttattcattgttgcctttattggatctcatatggaataaccccactggatattagagtaaattacagagttaggaaaaggtgaaaaagagaaatgtcgggttagctcttttcaaaatattttcagtgggagaaattgttgtcactttaaaaagtgagctttttaaaaaacgaacattttgagtactgaatatgttaagcttctgaatgattttgagtgcttttgcttgtcatggggaagtttttcaagagaagatgaccttttaggcctaaaaacaaagcatttctaattgcttaatgtgtattgtatcaagtaaattatcattaggtcatattaatgctatgatacttaaatattttatttgtagtggaatccattttctgatcattttatactgagcatttatgccaattttagtatatattgtaattcaaattaaaaaatgctagaagtcatcttaggtctctggatctcagcctggtatttactgagtagctgtcaggagccatgcactgttctaggcacaggaggttcagtggtgaatgaggagcttatattcttagaagctcagaaatctaaccctgttagcacactgtagatggtcagactcacatgtacttgccctaatgccaatttgttcatctgaaatgagaagtacagctgttaattagactggtgaggtcgaactgagagattagtgcattttctctttatagacaacccacatgggaagccaaattacaatcacaaggttgcttggtgagaatggaatcaaaacaaagggacttggatagataatccatgattaggacacacctgccacagagactatttgggttttccctaagtagtgctgagcagtaaagcttgccagtgtctgggtcttcagacttatttttatgctgaccattttcctttgttcacaccatctttttcaaaccaagctgcaatacagttcactaaatgacaagcacattccaggcctgcttcctaagattaaacttagatcacctttggaaacatgtagaggcttccaaattctgagcttaggtacacacctgtagagagtctcttgtttgatttcaacagagtgctaccttagccattgtgcaagtgcgtttttaccctcagagggtatcatttttttcccccttacatccatggtgtgggggaagtgtttgagtcccttatagtggtccccatgtactgccaataataccgttttattctgttcaagtggtaatggaagatttgacttctgtttttttatatgatttactgatgccaaacccttattaaatcagtccccacttc

SEQ ID NO: 136651 - DNA, 1098 bp, Homo sapiens
acttcgtctctactaaaatacaaaaaatgagccaggtgtggtggcgtgcacctgtagtcccagccactcaggaggctgaggcagaagaatcacttgaatccaggaggcagaggctgcagtgagccaagattgcaccaccacactctagcctgggcaacagaacaaaactctgtctcaaaaaaataaataaaaataaaacattatataaaccttttattttcttagcgcctcctaagttataggtctcacaggtaagcagcaatgggaattgaagtagacactaatgtaataataaaaacgtcccagcttctttacccttcagtggatatttgctgaagtgcaacagaaaagataggtgcaggtacactgttctgcactaaacagaaaacacgtagccatcatataaggagaagcgaccgactgacagtaatcttaagatgattcacataattaagatttcatgatgcaaaaattcaggtcagtcatactctcagataaaatattagttaggggatttagcttgaaaaggcacttggcagttggagaatctctcaaatgtatagctgatattaaaaatgtgttatcacttgttaggttcttaagtgttacaaattaattcagtacgataataaatttgctttttctctttctgcttatatattcacattgtacagaatgaaaggaaaaatccagactaacatccaaagactgtatttttgccatgagtgattcagggaacttgaggttttaaggatgtagtatcctataatatattcagtttaactgggacaaaacatccagagaaacccctttgatccttgcctgtgtaagaatggtctcatgagtggctgaatataatggagaggcatatttattgggggtgaccagtactattccatggtgaaggacagaattggagctttgtaggacagaggtatatctggatacatactaaattctagataggtgaagaaaattgtgtgaatttcgaaaaagtgattgccttttacaaaaaacaagagcaaagtaccacaaatactggcagttgttacattagtgtgattctgtatgattgaatgtatgtttaatccctttttc

SEQ ID NO: 136652 - DNA, 1052 bp, Homo sapiens
gggctggacacggcttcaaatactgccacatctgcttgtgatggcacatacccctcgatgtagctcttgtccgccaggtaatcgttgagcacctggaggccggcggggcttttcaggtctctgaaacccatggtgtcggctgtatccgagagctggggagcagcagaaagagcccacttttactacttctgttctacatagtagtggaagtcctaggcagagcaattaggcaagagaaaaaagtaaaaggcatgcaaatcagaaaggaagaagttaaactgtttgcagatgacatcatcttatatatagaaaaccctaaccctaaggattccaccaaagaactgttagaactaataagtgaattctgtaaattcggaggatacaaaatcaacatacaaaaatcagttgtttctatgcactaacaataaactatccgaaaaaagatattaagagaaaaatctcattggcaatagcataaaaaagaataaaatacttaggagtaaattaagccaaggaggtagaaggcctatacattataaactataaaacattgatgaaagaaagtgaagacacaaataacatggaaagggcctgtgttcatggatttttttttttaaggcctttccgttaggtcgggtgatatgtgtaatgttcacagagaaagcaagtagtccccttttttctatatgcattttagatcttctttgctgaagtaacagcttgttataagcatgagtatggaaaagagatttttattcgtatttaaagaacatcagtaataaaaacatttccctagctatgacaaagaacagcctttgtttaagggttaggtatgtctaaagaagtgactcttgttaagaactaaggaataaaatataattcatcttatcttgtgtagggaaaactgtcccaacttgaaagccgctgagtgcctaatttacatttaaagctgaagtaatgaagcctttatttttttgccagaaactcccatttctctcccaaatacattctctatcaggaaaaaaagctcattattttgcatggtaatgtgt

SEQ ID NO: 136653 - DNA, 1932 bp, Homo sapiens
agcgattctcctgcctcagcctcccgagtagctgggattacaggtgtaggccaccacacccagctaatttttgtatttttagtagagatggagtttcatcatgttggccaggatggtcttgaactcctaacctcatgatccacctgcctcggcctcccaaagtgctgggattacaggcgtgagccaccacgcccggcctattgtattgttttttaaaatttatccctggaattggtttgtgtttttattttttaggaatgattatatacattgaccttgtgccacatgcttcagattttataagaagtaagctgggatgttccaagttccgtgttgcatagagttcttatccatgaaaaaatgtccaaaaagatgatttagcaaatttaggattatttcatcctaatttggtattctctatagtgggagttttagagtgtttcttgtgataatcattatagttaagatttattgaatgtttactcaaaaaagttgaatttttctactggttttgggactacttgggtgagatatgtgaaatagattcaaatattgaaatattgaggtactcttataacagaaaatatcaaagctactgccatagtttattagaaatcaggagaaagacttttttttattgttggcctgaatgagctgaagttcagagtaagactgtggtcattattcattacctcttttttttcaaacactaaaactcttgggtttctgtggacaaggctgctttttaatggcatgttctccaaacagctgttaagcacccccctccccaataccacagaccacatctgttcccactgttgattagctagagggtggagaaaagagaggctgtagcatgtgtaattaccagtaattaattcttgttgagcctcctcatttccttctattctaactacacctactcttcttcctgcctctgttgtaaattctgtttcatgttagctacttgtggaaaataatcttgatggttatacagctgttttcctaaaattttatattcacctaacagtgaggcttttatttttcttctggtggcagaatcatttaataaggcatgccaaataagaaaataccaaagtaaccaagcatatctcttggggctagctttcctgcttatgttcttttactgttgatactatttccaactgtcaagaaattatttttcagatatatcctctgttaaaggaactattgcaaggcatgatttagtgtgaggaaaacaaacgtaagacacggtcctggtcctcagtgttaatgtgcagtgtatggaaatataactatgtaaattaacatatattaataatatagtaatttccaaaattgtcaagatcataaggtggaggtagtcttctactatttttcattctctttgggataaagttgggctgacggaaattcaactttgagcgttattaatatgtcatggtcaaagagagatatcaaaggcttgctctttaaagaaaattcacagcatatcttcttatttacaagtcttaaaagcctagattttctgtaatcccagcactttgggaggccgaggtgggtggatcacctgagatcaggagttcaagaccagcctggccaatatggtgaaaccccatctctacgaaaaatacaaaaattagccgggtgtggtggcaggtgcctataatcccagctacttgggaggctgaggcaggagaatggcttgaacccaggaggtggaggttgcattgagccaagatcgcgccattgcactccagcctgaatgagaagagatagactccctctcaaaaaaaaaaaaaaaaaaaaaaaaaaaaaggcctagattttcaaaaggtgttgctttgtgtgagtctactttcaggaggatgaggtttcaagaagacatttcaaaactgctttttttgtttgtttgttttaaaatttatt

SEQ ID NO: 136654 - DNA, 1042 bp, Homo sapiens
gactataggtgtgtgccaccacacctggctaatttttgtatttttttagtagagatggtgtttcaccatgttggccaggttggtctcaaattcctgacctcaagtgattcgcccaccttggcgtcccaaagtgctgggattacaggcgtgaaccatcacacccggccttccctgtttaattcttcttagcatctccactaaacacaaaccaagaaaggtgatttttctctttgttagaacttcttaggaaaacttcactattctcttattccatctgttttggggttgaggagagctgttatataagaagttattgttagggtttcttgtattcctgttgtaatattctcaagctgacatatttgtgatagatcaacaaagcagtaggtattttgtaccgctacctaagcaataaaagcaagtatgtaatgctgtagtaccagagttgtggtttttcccctgcacaatatattaactaagcagaaaatttaaaagaacaaagacaataaaagtaatgtttgttagtggtagtttgagatatttcaggagagatgagatgtgaagaaaagcaatggccatatttagaaagctgcctcaaacccaagagtatctattgaagtaaacttgatgacagacttttttcctcttcatgaatcattgtattcctataaaagcgaaaattcctcttcatctaaacaaatggcttcaacatctgttttcttagtttctcaaaagggtgtcttcggcttgcatttttttttttaaaagtgtttatctgtttaaaatgaaatatcgtcaaaagcagtttgtacatcaaaatccaagttggtcttcagcttgtaagaattagttgagaattatctggtggtgttgatagtggtataggggaaaaaagaaattacattttgtattctgcataggtaagttcttcttcctaaccatattctttaaatttttttgacttacatttaattttacatgctcttagctttggaggaccgattgactaggaaacttgatcgttgagagcgcattccaacgt

SEQ ID NO: 136655 - DNA, 2160 bp, Homo sapiens
ccagtggaatttctgggccatgatagaggtgtttgtctttccgaaaaggttgcataggctcctcccacccccatccaccccacagctgtctgttgtgtctgaacagtggcttgctctgaggttaaaggtccatgaaaactgtgagacatttgatgttataaaatctaattagtgacaaaagcaattaatataatcacttatgacttagtttctctggaagggtatacttatctttattgaataagtataaatggtaactgctagcaaatggcaccaaacttaacataaaatagaactacccccacctctctcctcctctccagtgcagaagagaggcagtgaaaagggtggttatggttatgtaggtgtagagggctctaggaggctcttgtgacttgattggtgttcagtctccctgttgagcccatcaacatggcctcaaggaggggagctattgcaaaggttttgcctgctgtttgttaagccacagcttgtagttttggttgcacatgacaaagcaaggtgctctccttttttgaccttgttcagaggcttaatacaattatttgtattaagcactagccacctgttaggatcattctcattaaaggtcactgtgtggtgcctgactgtctgactatggcagcctgcatcagatttgctagtggcccctggtttgtgtgacacctgccaatagtaacagaaagaatggagatctgatagctcaaagggaacagaaggtactagaggaggaatgaggaatcaggagaaccatggagcacctgccactctagcaccattaccatggtttttggtgctaacttgcctagtctcccttttctctggctaccccttcagtgagctgtgccaggcatttcgaagagttctgttattgtctgcatgctgatattgctttggtttattgatattaatatattgcatccctgttaagcgttgaatttcttgtacctgaaattccttacatcccctctgctgaatgtcttagcttctgtctgcttctctgtgatctccattgaggtgttccacaggcatatcctattcagttccaaaactgcccttgcagttctggttgccagcctgtttcccttccctgattcccggtctcagtgaatgatgacactgtttacccagttgttaagccaggaacatgggtatcattcttgactcctatctcttcctaatgcctcaaatccagcccagtgccaagtcttgtagattgcacttgctaaatgtctgtgattctctgtctccagtgtcactgcaattatgctgttcaggcctcattacatctccctggacactgcccccctcaagtattctccagatgttttatagccagagagaactctttaaactgccaatctgcttatgccactccccagtttaaagtccttaatgtgacttacaaggcccttcacatttgggcctctctcccaccctctctccatttcccctgaacattctagcctcaaccatacattttattttctttgcctttgtaaaaaaaaaaaatttgtttttttaaaacttaattttttttttactcaccattcagcatttccctgtgttctttgcatcttcacaaacactgttcttccatcctccttttcctgttattccctatactcaccttccccttatacattatctgtttttatggacttttctctaactcctgccccaggagcccctgttatgtacatgtgtgtgtatgtagtatgtgtgtattttccaattgcctatttggttctctgctctactgggggttatgccctataagagggaagggatcatgtctgaatcattcacagttgtgttccctatgacctacgtctagcacatgagaagagtttagtaaatactgttggtgtttgaatgaatgagttccttcttgaggttctaaatgacaagagaatatagtgcttcctataattcatatcaaattcttgagccttggccaaattagagagtggaaatgcacaggctgggtgcagtgacttacacctgtaatcccagcactttggggggctgaggtgggaggattgcttgagtccaggagtttgagaccagggtaggcaacatagtgagaccctgtctttaaaaaaaaaaaaaaaattagccaggcttggtggggtgcgc

SEQ ID NO: 136656 - DNA, 1717 bp, Homo sapiens
ctgagttaaagggtgagggaaggcggggtgggggagaaagttacatgtaaatcatttagccattaacctaatgggtgggtttataaatcctattactataagcccttttcatttccactgaggcctggtgcatgcttgatcccactaatgtaaaattcattccgtctaagtgattactgaagtaagacactttgagtcaattttaatcaggttgtgtgaaacttgcttgagtgctgatattcactaaagcatggacatagtttggccgtgtcttaattagcccccctggatgagttatatgaggagtcagtcaggaagccaaatctctgagccttttcacatatacatgtttctgtgagcaaaataaactgtaggtaggggctgaaaacacccacctcaaaagcaaggggcaaggacctttgggtgagtgtgtttctagtcttaatgaaaattgtgaatgttaagaaatctgaaagttctattcttacggtgaattggagcatcctcaatggtacttatatttaaacaaatcagaatttcaagtttgattaaatatgtggatcttctttctagaaaaatgcacgtaagcacacattcaaatctttgctgacagtttcaggggattttcagatttcttgaccttaggttaatacctactgctccagttttaattttagtatcttaggtttttgttttttttttaactggggatgtaatatttaggattgtataggctcatattgagctcttgtgtcagtgagtagatttggttcaagtgtgctttaaggccagctctacaagctgtccactgtcctgtgtcagatataacccgaagaatggcagcaatacttgtaaattcaagtgaaacatataggacatgaacttctaaactggaggttggagtggaagaggaatggagaataagaatgttgtgaaaggaaggtttctttaaaggtgaaaactgagttcttaaaagtcagcatgtgaagtgggtttttaagaatccacaggatgaataaatagtcatgctggggacaagaaattataagacacgttataagacagggaagaaattcacttttcctttcacacattcaaaggcatagtttgtagtattttaagttttgggatcaaaataatagccctgtcaaactgtagggcaataatggagagatactcataaatcgtattaaatttgtctttttgggaggagaagcctttcagaaattgttgtttattcagtgttttatattcttcatacatgagctaccagaaggtctaggttgtaaattaaggatttaaaacaaaatcagtttatctggaaactatagttgtatgggagaggtacacttatagtcaagtttataattaatgggcctttgtcattggaatagaaattcttttctcttgagtgaatatttgtttatataacatgcattgtgtttgaaggtgggatcaaaactgattcactcttcatttcttgcatggaaaaagccagcatttaaatgtgtactgtgtgtgggcttaattgctgctttttgtaaccaactttagggtcctgttgttgtggagatgcacttactgatcgataatggtttgctcttcttaagctggaccactaggagttttcctccttttactagagcctaaaaaataaatatttattgaattattactttgtgccaggcatttcgttaggtttaatgcccatgatatg

SEQ ID NO: 136657 - DNA, 1118 bp, Homo sapiens
aggccggcagcccagggaatagttgatgtttcagctacagttcgaaagcagtctgcagcagaattcgttctcccttgagagacctcagtcttttccttttagggccatcaactgatttgatggggcccgctcacactgtggtggatatactgctgtactcaaagtcaactgatttaaatgttaatctcattttaaaaaaatacctttacagtgacatctagactggtgtttgaccaaatatctgggtaccgtgacttagccaagttgacacataaaattaaccatcacacagcctaacttctcaactcacatttttaaccacttggggaaagagcatgtaaaaacacagaagcaagaagaaaagcatagcctgtttaatgaacctaaaatattttgagagggctggtttgaaggtgcatgtaggaagtgttagaagatgagataggcctcaactagatgagtctcaaggacaggctcaggggtttgaattttatttcaagaagtacattttattatagaaagaacactggcaaagtgtgaagattggcttgggaggtagtgatgctagagacaagtaggccaagagagtgatgggtgtctgaaggaaggacatgggaatgcagaaaaggtgccacattggaaagatgcagtatagttagtgtagcatatgtgggctcattggattagaaaggaaaccatttggggccaggcgtggtggctcatgcctgtaatcccagcactttgggaagccgaggaaggtggctcacctgaggtcgggagttccaggccaacctggccaacatggtgaaaccccgtctctattaaaaatacaaaaattagctgggcgtggtggcgcctgcctgtaataccagctactcgggaggctgaggcaggagaattgcttgaacctggaaggtagagtttgcagtgagccgagatcgtgccactgcactcccagcctgggcgacagagcaagactccatctcaaaaaaaaataacaataataaaataaaagatagaaaggaaaccagtccttggttctggttgaaggtttctggaggggccagttatcatgtttggagctggttaagggtttggaggagatgggtgggatttag

SEQ ID NO: 136658 - DNA, 2896 bp, Homo sapiens
gttggattctagatttttagacctgtgaggaatctcaacctcttcattttataaatgaggatattgagacctagaaaaggaaaccaacttggtcccaaatcacttagctggtaattggcagattaaacaagtgctctgatttcagaccctagacttaaaaaaaaaaaaaaaaaaaaaaaaaaaaaaagcacgaatatttgtataacattttatctttgcaaagcactttttaagcctgtggttctttttattcttacctagctcagggaacaaggtggtaatatcaccccaatattagagaaaataaaactaaggtttaaaggcagtaagtagcccagtatcacagaagtgttaagtagtgaagacagaaagtaccatgcttattaaatccatagcccatatttcttgaacatttttagaggaagacacaaatctaagaataacagagaataggaaaaagacaatctaatagaataaggaggaaataaatgttcatcaagtgagagaactgagtagcactgagtcctgcttggcagttgctgaaatttggaatgtggaatgcttaggtaatggttggattatcaaatatcataatatttatattaatatttcacctgcctttctctttcctagccttcaaaaccatttatattttactacccctgttatgctaatgtattgtttaatttccagtttatttctaattttatatcatcggtaatggaagaatcctaaagccattgagatttcagttgtcattctctttttgcattatttgtttagaatttcaccttactcaacattttcttaacttgtaggattttctttgtgtttaatatctgcatcatacaccaaagtgggtttcttgttaataagtaatactatagtagacatgttttcggaataggaccttgaaactttttttttaagctgtggaaagctggtgttttctctctattgtttagtattaataaatactcttttagtctgtaatagcatctaaaaacatttcataacctttggatgcattgtgatacaacagtattctattttaacaagatacaaagactcaggtgttatcctgaacttattaggagaacctacaaatacacatcttagtagtagttggtcttaggttgttgctgttgttaaccttggcacacacaaaaaacatctttctgcttagtaaaccatatcgtgggtatattcatgaacacattattttctttagaaaacaatttttgatacacatctaaatttcctttctagttcccactacccttttccagctttcagaagctcagactggggttaaaattccttttcgtattattttaattattgctctccccacctccacccctttcctgtttccccctcctcttttcccctaacggcactgttctgcaaagcctgcaatgattgatatgatggcagtgctgtcattctttttaaccaaaaaaaagtcatttttgttctagttattttaatagagtcccattaaagatgtattgctgactgaaatatcggcgtgaagggctctcactgagctgagcccaggaattaagaagtcaggaaatcggctgctgcattgcaagagagccttgtgtgacaccgagtctcctgattggggagatcattactgctattatgactcgacttgcgtaggaattttaaattccatctgaatgtcagtaataaccctcttagcaaattatcctgaataaaatcacgaaggcattttatataataggtgttgaattactggatagatttgctaattaaatactctttgttctgctgcagttgacattacagggtaagatcttgaacaattattctcaacagctgtactttgttaagggaaaaattaaccacaaagtttatttttttatacttgaagttggcagatttttgaaatgtgcttgaaaaaattccatcatccaattggtaatgagtagataaatatgcaggtgttgctgtgaaatcagataactgcagactgccttattaatgaatttagcaagcctttatagccctgttttctagccgttagcacttacaaaatgattttctgtcagaatgggcagctttaatattacacttgtcacttcaaagtgaacttatgaatggtcatcttgtaatcattgtaccttgtgtctagtagacctttctgggtacttgtggctatttttaaaatgtgtttcttcaatggggaaaatacctgtaatgtataagtgtttgattgttgacttctagaacatttatgtggtatgaggttttttttttttttttttttttttttttttttttttttttttttttttttttttttgagaaggtagtgagacataatgaaaagaaagtgaaacataaagtccagcttctggatcaagcttttgggcaaaatctcagagcctaattttcctcatttgtcagttgggatttataatactgtgtaccccttaggattattcacttagcattctataaatatttattaacagctcccatgtaccaggccctctggtagatagtaagaatttggtagctccctgagtagataacatctgagccctccccagtgagcagtttgaattgagggctggacttgagggcagctttggagtgtttctgctcattagcacttggataagcattggactagagaggtcactgtgatacccaccatctagaactgcttagtgaagaaacatgagaggttaggggtcagactggttgtgggttgtcttgtatagaatgggctgaagagttgacaaactgtggtgaggaccttgaacctgagatggaacattatcatcagctgctagtgaggcccactgaaaagatggtgaggtccacagaaatcggtacaacctctatagagagctattgg

SEQ ID NO: 136659 - DNA, 3055 bp, Homo sapiens
tctatagtttaccatttctgcaaaaaaagacatccaccaaaagatttctgccaccaaagagaaaattgttttggtagcagtcctcaggttatgcatggcaatggttgtgagttggtggcaggatggagtaggggtggatgatggatctgaaaggtgaaggttgccagttcacattgaaggtacactcagggatgacatagtagatttggttcatgttgtgaaacaagagtagaagaaattggttattgaatatgtggagttgtagtaaaaggttgacaaactgctcctcaggtattttattgaggtaacagttacgttatggtgttgtccattgtgatgaagaaagctaagcctagctaactgtaagaggcagagggtaaagaggactcttgataagtaattctgtcctcactgtgattaatttgccttgggttggtctcattattgccctttccctaaaggaattgtcaaatattctcccacaatgcatttccctataatttaaatgttaaaaaatgaagatgaagttggggagagtgactgttttttatgttagctgaattttagtgtctagtggaaaagtaattgggattactacaggacctatcagtcacctggcaaacagttttttgagttcctattacagtgaagtctgcacttaggcacaaacatgtggtctgacctccaggagcttgtagtctagtttggggtgggtaggtgggagctaataacgtaaagcatcattcaagtactagtaaaataattcaaacacagatgagaggagagagacaggtatgggctgggccagtcagctcatgcaggaaggatttgagccgagggttgtaaaattcaatgataggaaaaggactggggaaggaattccgggtaggagacacactgcatgagtgaaggcatgaaaagatgagtctgtacacagttaactgttggaagactgggagatttattctgtccagcaagaggatctatgtaaaagaataacaggccatacaagtggaacagtggtttaggtgcagttgcagaatttgttcttgaccttgtaggcatcggagaggcattgaaaacattcaggagattggtaatgatattcagggtgagttgatgagacctaaagccagtagagacgcgagttggttcatcctcagtgacaacctcattgctatggagtcaggcgctttccaccttgcagccggccctgctcagcatgttagcttgcaccctaggcatggcccttcatggccaccgtgatggttgccactgctccaagcagccctcagtctaaaaaggtagtcccccaccgcctgccccctcaaatcaggaaggaaaacctttcagagaagcatcctacaggaattctccttacgtttaattggccaggattctgttcacatgctcacgcctaaactgatcatagtttccagaatggaattgccatgattatcttaggccaatggtccttaagccagcttgcaatgtaagaaaatgtaagaaaactgttggggccagatattgtttgtttttttttttttaagatccccaggtgattccactgtacagtcagtattaaaaccactggcttagcctcatcagaattcaccaccattcaccaccccccaggtaggagaaagggcttccttgtctaagaacataatattaatacaacgaacatctgaacaaaactgggagatagtaataaaggggagagggcaataaaaaatggaaagtaatgggtagatataaaagatactctaaagacaggatttacaaagctctgtaatagggaagacgagaaagaaatgacaccatgaagcttgagcttagttgacaaggaggactattgaagtaggagaaagaaatataaatgaagtaaatctttatttggtctattggaaaggtgacctcagctttaggctgatgctttgaaagatgggtgatagcagagaggcaatagcatggagtgactaagaccccatactcgagtcagaatgcttgggttcatatccttgttttgtcattctaggacactaatttctctttgtcttttggcatctaacaagagaggatattaatagtagctaccccttggagatctaggggaatgaaatgagaaaatgcacaaggtgttccttgcacagcatctagcacatgtattttaaacgccccccccgacacacacactttctctctgagtcctaattatgtcatattactattttttaagaggctgtttgttaaatatgtgttacttctgatctggctcaaaataatttatatcagtttttatttctatccacgttgtaacctaaatatctctgatctgtagctatatgggcctggggacagacttatcaacagatatccacgttcgtcttaattcactgaatgtttcttgagccccacctttttactgggtactggggtagctccaggcaatatagtgaaaatccatctactctctttcttcaatgaatttagtctagagaagaattttaaatgtagtgtgcttttttttgctttttaagatcctgaataccatgaataagaattgccagatttgaaatgctttgttaagctttttttaggcatgcagttctatttaagtattagtaatgagaatagtttgcttttttgccatgttatagagatattttattgtgtgtgtgttaaacatatatatgtatatatatgcatgcatatctctggctcagaatcagcatagaggcaaacttagattatattgatgttactgttattttaagggctgttgttagaaaaccttcaagagctttagaaatacatggaaatggcaaatcattgaaagttacctatctctatgtgcttctatttatgtctttataattgtgtaacttattaatcttgacttttgtttcatttagattttgatgcatacgaaagagatggtacaaaaggtaatgttgagcattttcattgtgtaaaacttaaatatcataactggtaacgtttttgtattcaaggaaaattgtaacccaaacagactggaaattgcttcttaggt

SEQ ID NO: 136660 - DNA, 1009 bp, Homo sapiens
gtactctgtgctaatgtaatgcttgtcatttttgcacatttctgtactgttgaaaacatttttatattgcagcaattacagtgttatttagaaatatattttcatttaacataaacattttcccacatttttatattaccttaaaaatcaaattaatcagtgtattaaaaagatgtatctgtttcactgatacatctttatttaaatttgttgattatttaatgttttctattataaataactctattgaacatctttgtttatttatctttttgcatttggatgaattactttcttattttaggttccttgaaggaaaatatttgagtcaaaagatgtgaatatctgtatggcttttgccaaattgctttgtaaaaggatgataccaattgataatagcaaaatatgccagtttcaccacagttttgcatgtagtggtgatgatatttaaataaaactttgctaccataatgaatatgaaactgtatttcacagttgcattgaatttgcatttctttgattcctagaagggatgaatattttcttacagtttatgtttattcttaggtaagttgtttcctgtaccttgactatggcatccttaatgtcatgaaagaagacatttgtttatacattagaaggggacaatgtttcttgtcactggctctccactttaagtgatgaagtgtacacatattggcatggaatcactgtgtcatctagaaagtagattccttttagattttgttttctttctcaaaaatttatatgagtaagagttacgacttaagacttcttttggtcagtttttgcatcaattctgcatattgtatccctgatcctgtctaccttcctagaaacttgggtttctatcacaagggcttccagggatgagtttgggagtgtcagtcctagcatgactgcataattggcaaaataacactgaacacatctcctttagggtagtgggcccacactgtaaccccctcatatgaatgatgacacaata

SEQ ID NO: 136661 - DNA, 1084 bp, Homo sapiens
ggcgcggtggcttgtgcctgtaatcccagcactttgggaggctgaggcgggtggatcacgaggtcaggagttcaagaccagcctgaccaacatggtgaaaccctgtgtctactaaaaaataaaaaattagctgggtgaggtggtaggcgcctgtaatcccagctactcaagaggccgaggcaggagaatcgcttgaacccaggaaacggagattgcagtgagctgagatggcgccaccgcactccagcatgggcgacagagcaagattccatctcaaaaaaaaaaaaaaaaaaagaaaagaaaaatgtatttactgtcccattattcttaactttcatttaatagagaagaatttctgcagtgttgatgcaagtacagtaaattctgatgaaagggctatctttattgtagttctgtatctatttacagtaagctattcatttgttaaaggtgatatatcctgaacatctttaacatttgtctaaatgcttgcactatttaaaacttgtgagctattcagtttctacattttactgcttcgaaaggagagtggaatggaagagtctatgtatgtgactggttgtggatggtctcatgacaatatttttttttttttttttttttttaggtgatgctggtagggcttgaaaatgacaggttaaattagggtggagacatgcatgaagtgatgggatttacctttagagattttagcccgtgttgccaaaagcaactgaaaaacagcatgtgtgattttgctgaactactgcaatcttagcttaaatatatttcacaaagtaacacaaaatactttgcagctgatttttatagctctggctaacttgagcctaaaccaccaggaagcatttttttttttttaaatgaagccttctaaaactagcttgtaaagtccccaaatagcctacatctaataattggaaagtatgtcagctgaaatttagaatttcttaacattgcactgaagaataatccattgaagaagataatggatttcttaagtactgttatatcagttaagatttttatattgtattgcttgtccaagacaatcaaaacttcacgt

SEQ ID NO: 136662 - DNA, 1041 bp, Homo sapiens
tccccaggattaccctgataaaaaaagcctacctcatgtacatgttgccctctggataaattctcaaggaggcagaaaggtgaaagctggagatactgtgtcatatgtcatctgtcaggtaaactattgacattcgtaagactctgacacctcttaagaactgaaagtaaaatccaaattaccacagtgtcttatttagcattctccccaataattgatgttgtaaagtctggttagtttcatagcatttaaaaaacattagaggtgtggcatatgtcattaggattttcataaaacatttatgacagatttgtaacagtagctactcttttaaccctaaattaactttaatgcaaatgtaagtttcgccatatgttcagcagtagtcctcatttatctctttccttttgcagcagttcccattataaatatcagtggaataataaaagaataaatgccattttttccctagcaaatgtccaaataattatgtgaaaaaatatgaactacatgattatacggagaagttgagagatcctatgaacataccctatgaggaaaccacacaattcaaccagtttttttttttttcttccttcaagtggagagggcccacctccttacccttccttctccgtttcacaaggtacctctaggccttctggaacacagttttaagccactaccagttcttttgataatagcatgcctataatgggtgaggagagagagtaagagagaagagcagttttttgactttcgaagcccttaactattttaacaaaggagaggtctcatcccttctatctgtaaagataagtcagggtcatagcatttatccaaattctttcaaattacaatggtatagactacttaccataaggtataatttatctgaataaaacttttttaaagaaattaagttttatcctaattgttattgcattgtgttgttacagtaaaaaaatgttttacataaacctaaaaagtaattgcaatatgattgatatttgtcaaaccacaatcaatgtgtttttaaat

SEQ ID NO: 136663 - DNA, 2069 bp, Homo sapiens
acatatcccaagaaaacctataggactttaatttgcctttgtaccctacccatgggacatgctccctttcaacctgtttgctagccaaatctgcctaaattttttgcttttaagcactcaaattattctgtttcataatgcagccatatttttagaatatgcttttgaaaatgtatcatgacacttttttttttttttttgagatggagtctcgctctgttgcccaggctggagtgccgtggcaccatctcagctcactgcaacctccacctcctgggttcaagcgattctcctgcctcagccttctgagtagctgggattacaggcacgcgccaccatgcccagctaatttttttgtatttttagtagaaatgggatttcaccatgttgaccaatctggtctcaaactcctgacctcacgtgatcctcctgcctcagtctcccaaagtgctgggattacaggcgtgagccactgctcctggcccatcatgacacatttttaagaggactgtttgctgccttaagcaagggtgtcctccaagaatagcctatatcctaaacaggttttgttttgttttgtttaaaatttacgtttaggaaatagtaccctactgataacttattcagatgggttcagagagtaatgtttttggtatgtaatttatattgtaggttgttagcgcattaaacctatgtgaattatttgctcagatcttaaatcaacttccatttgttggctaggttttaaatccataactatttaactttcattagacataatttccataaggcatgcctttaacataattattttaaggggcccacttgtctccagtttaaaatattttcccattagtttcctactaacgatgactacctagttttgtatgaatcgactgcacctggttgtctctctgaagtatgtactttgtgaagttcacaaattactacatgggcacttgaagaagaccagcgttgcttcttaatctgttcttaaagatgtatgccacgtattcttgcacataccatggggccctgctcaggtttgagaatgaaatctttgaaggttattattatttttttttaattttgagacagggtctcgctctgtcactcaggcaagagtgcagtggcatgaccacagctaactgcagcctttatctcccaggctcaaatgatcctcccactttagcctcctgagtagctgggaccacagatgcatgcctccatgcctggctaacttttttttttttttttttttggtcaaaaaaaaaaatgggggtctcactgtgtcacccaagctggtgttgaactcctgggctcaagtgatccttctggctcagcctctccaagtactgggattacaggcatgagccactgtgtccagccgaaggatgtatcttaggtcatagcctaaatgtttttccaatacgacatagcaaaacctgtcatctaaccaagtcttttgaatttagccatgttcgagcttagatttttaaaataccctaagaaatatgtttgtgtcactttttgttaaaactagtcttttgtgtgaatatttagaataaaaacgttttaaactgaaagcatgctcagaaagttttcaactgcttttttgaaaaccatgctttactatgagaactactgaaatattagaaagtaactctaatatttttaaaggcaggtgcctttaaaaaatattttacatgtataaattctattttaattcaccattaaaaattgttaaactcaacattgctgtaatcttaagggtagaccaatttttcataattccgtaaattgttcagattttatgtgtttggtaaaaggcagtctaaatacaattgagttgtgtgaaaagacactgccggaggattttttcacgtggtttttatcattggttgtcaccttattatcatcttaacaattcaagcttctgaaagagcaagaattaaacttgattaattatgcctaattccttttactatgttgtaaactcctgacaaataataataagtcttttaatctgagtttgcttcctttttaggtatttcattttgtcttagaac

SEQ ID NO: 136664 - DNA, 1050 bp, Homo sapiens
tggcataatttcatttaggaaaattattaagctcatgattttttatttttaagactcttttgtggagagcaagtatatttttcaactacttttttctttctctattgcttttatactactttccttgaaatgaaaggcaagcatcaagtgttggtttatcctatggcttcactttggaaattctctatttctccccatcaagatacctcctgaagtctgtctggtggcatgttgcatggccaggtgttccgtatggggagaccattttagtgaaagggagagaggatagcctattaaatgagtgaatgaataaggctcttgaattgaaagagaataatttgttctaataactaatggtcctcattatcccacagtaaaatatgtatcatttttctgaaacccatgcaagattattgctattgggcttaaataaagcaaaattttactcttttccatctgtgaataggaaaaaatatagtattactcttcttatacaatagccctatgggaaacatggccactaaaacttgaaactcttagcttttgttctctagactatagatttttctctctctcattctattgaaagctctcccgtattctgtggatgaaatattcacagtatgctcaaacatccaaatagtcttccatacctagctgactaggccagtgatgagaatagtctaaagttcatttttgaatttcatctttgaataaatttatgttttatgtataacggtacttagaattatatgtaatatctctcctccaatgagcaatgatttgtacagtagttataaagaacctttcttcggggtcagtgataaaatttcaggcatttggctatctgggcagttttctcattggtcctgagaaattattgaggtttgaagaacatgagaatttagaatttaatctctgaaaatactgcttaaaagaagacagaacacacttaacccagtgtgttctgagttaaattggaaagcaaaaatttccttttaaaaaaatgatgcataccactcatatcacagaggttagtttttgtcagta

SEQ ID NO: 136665 - DNA, 1020 bp, Homo sapiens
tccagcacagagttaccatcttttctcaggtttaaaaacaggaaaggaaggccaggtaccgtgcgtggctcacgcctgtaatcccaacactttgggaggcaggaggatggcttgagtctaggagttcaagaccagcctgggcaacatagcaagaccccatctctacaaaaaataccaaaattagctgggtatggtggtgcatgcctgtagtcccagctactcagctgactgaggtgggaggatcacttaagccagggaggtcgaggctgcagtgagctaggtcaaggctgcagtgagctgtgatcgttccattgcactccagcctgggtgacagagcaagaccctgtctcagaaagaaaaaaaaaaaaaaaaaaaggaagaagacacttgaaaagcttcctgccaagaaatacacatctcgttaagttaaaatttatatttgtgtctattgtcaagggcattaaaaccagttgattgaagtcatgagaatgctgctcatcaggctttttattctgtcaagattttgagaattatcttctccaggaaaataaaaatcttgggtattcatttaaaccaaaggctcggctattatttcttctaaaatactcagaaattttccatttatattatgaagaggtgtattgttggtgtgaaagacagttttggttgtctgacacttatacagtaaattgtttatctttaaattggatctgtagtattttaaaaacttgttgggctgggcatggtggctcacgcctgtaatcctagcactatgggaggccaaggcgggtggattacttgagatcaggagttcgagacaagcctggccaacagaacagggtgaaaccccatttctactaaaaatacaaaagaattagccaggcgtggtggcgggcacctgtaattcagctgctcaggaggctgaggcaggagaatctcttgaacctgggaggcgaggttgcagtgagccgagattgcgccagtgtcctccagcctgggcaacagagcgagactccgcct

SEQ ID NO: 136666 - DNA, 1067 bp, Homo sapiens
ggaatttttcactcgtggtatcatgttggcactcaaaacgtttcaaattttggaggatttcagatttttggattagggatgttcaacctacacaaacatcttttcctatttggcatgctttttaagagtataattcacataatttaccataaaatgctaaaatcttgagtattatacaatcagttatctaggcacagacacagaacattttcatcactccagaatgttccctcgtgcctcttcccagtcagcacctctgttatagtagcaatcgctcatctgaaatctatcagtataagttagttttgcctattcaagattttcgtataaatggtttcctacagtatatactctttttgtgtgcaacttctttcacttagcatggtatttttgagattcatctgtcttgttgcatgtagcagtattcactctttcattgctgagtagtattagctgagtagtattatggtagattataccagttaatccattcacttgttgatggacatctagagtgtttccatttttggctattatgaataaagctgctatgagcattctgtggatatagcattcaccatttgaaaattatttttttctttaatcatactaaattttcagttcgcatattgtcctctaagatgtccagatatatgaaagcctggactcatgcaaaagataaatggtttacttcctctaagaaatttttacaaaaaaatttcactcaatgggattctgttaattagcttccctcatagattaaatgatccatattacaaacaactgcttgtaaataccagttactccctttactcatttggaatttcatttatgtggattttccctcttccccacttgcatgaacatatgtaagggttttactgtagttatttgctgttgcactaatagagaccttgtcttttgaaggaaggaaagtatttgattaaatgtatcagcctctctaataacaatatgtctcaagttatgaacagtttaaaaactccttgggagtgggggcaggtgaacattctaaaaacaggcataatttacaatggttagaaagtgca

SEQ ID NO: 136667 - DNA, 1158 bp, Homo sapiens
caacaattaaaaatggaattatatgtagctgctgttttgcacattttaaaattcagaatctctacctgtaggtggcagcaccagatacttgtttcttgtttcactccagacttaatgagtttagggtataagcagtaaaactttaaagtctactgaaacttcgaaataagctgctgttaccagttttgtgagaatttggaaaaactaatgtatgtgttgactaagtttggggcttatttaaccctggattttcaccttttcaaaaaagattccagcagcaatgatccttacttttttaacatgacattgtatgttttcttaaaatgatttaatttagccctctgtggtttgcctgttgaacttataactgctctcccaagaaaataactttttaatggcattttggtatttaagtaacttgtacaaggatcattatatacctaatattttaagctcattacagtctcttctccctttatatttttacattttagcattgaactatgaccaagagactattgagattgaagctccttcccctggggaaaaaaaaaatcaccttgggaataaatctgaagtaattagctgagccagttgactttgttactgccatgggaagattgagtgatttgtagaaatggatatttagggtagacatttagagtagacatttcacagggcctggtatttttcgcaagttgcagccagtcgtttgggtgtttctccatgagtaagtaacaagatggcccacacccacttttagcttactctgcaggcaggctgtcccgggtcagtgcttgcaggttcatgcactcaggtgcaccaagtgagccatggctggtggggaggggtagagagtagctcctcttggttccttttcgtagcctggccaattttgtatatgtgcaaaccagcattgttttgttcctttatttttggactgtgaaagaaacttgccttttagaaaaatcttgcttattttctttttccttatcttttgattagtgttggcctgggaaattgattaatagtcatagggtcagagaaaaagtgaagctgctttctcataattgcaaataaatcaaaacattatgtgaatacttggattcacaactagagtttgaattagcgacagttacccctcactacagagatgaa

SEQ ID NO: 136668 - DNA, 1929 bp, Homo sapiens
gatgctacctccgtttcgcaggtgagaaaagtgagactctgtgtctcagttgtcttattctttgtttggcccctttcaactgtgaagagtcagcctccagtattttataattactagatgtcgcttgacagctgaccaaataggatttaggattctgtcactgaattctgaatgcatctgttagatttatctacctatgtagctgttgataaattttaaacaatttttagatatttttggtatttgtgagcttttggcttagtgactgttttatattacttatttacctttatactaaaataagatagttttctcttagatttccaaaagcttttccttagatttccaaaagatagaaatattgtctcttataatcttttcttgaaagcatcccttagcaatccctaaaattctaagaaacagtgtagaataattatttttaagtataaattcaaatagtaaattttggcacacatgttttgaccaagggtaaattaaattggttggcctaaaaatgtttcttttctttaattagtttgtggaaacaaaatagcataaacatgcattgattgatttcttatgttgttttgaatgaaatatggaaggtatatttggtttcaggattctcagggacattttggcctgtagaatctgtagacccattgtttttgcacatattttaaatttctgaatttcgaacatcaagaaaaccatgttgcattttgtctcagatgctgctactgaattttaaccactgaattagattgcaacctacatgctgttaactactgagccaagatgaaatcgactactgcattgaaatcagggttagctgtgtctgcacttgaaggagttgtaatggcagtgaacctgttttctttaatgggatttttattccctgattttattctcagttttaattgtgactttgattttaagagaatttcttagtacacatttatttgaggttttcattgtaactttaagagaataataaaaaacatcctatcgaagtaggtgcttccaaacccatatgttcagtggcatatttctgtgttgtgttgttgcagttacttgttttatttataaagtatctcttgtaaaaagagaagtcatttgtccatgtgcttttgagttcaaatggttgtgtgtatgtgcatgaatttaaaataattttttgtgggagttttcttctttggggtatttttggaatacttttctgaatttgtttttttcttttacattaataggacttgaccccacccaatttagagttcatcattatcataaagatgaagagaatgatgctctacttggtggcccagcacagctcactgatgaagagaaatacagggactgtgaaagattcaaatgtccatgccctacatgtggaactgagaatatttatgataatgtctttgatggttcggttagttgtttctgtctttcattttgtgagtgaacttgtataaaggccttacccccttcccccactatggggtatataaaaagggcgaaataaacacacacatgttgctttcatgtgtttaaagaattttagcatcatgtgaaatctaccttcacagcttgcttttatttctgtttgaaaactcttacttgaatgtgcttgaatattgttttggcttcctagagtgcttgaccttggtttttaagtggaatcccttaaaaattctaaattatcttaaagtatttttattataatttcttaattagtaacctgtattgtcccactgtcaacccccatctattaagacttagaccaatatttttccttatcttaaatcaagttactgggaactaagtgttttgggaaagtttgtgtttgtctttacacatcccacttacctccattttgcaaaggtactcttatcttttctgctgtctttgcatattagacatttaaaaagt

SEQ ID NO: 136669 - DNA, 1117 bp, Homo sapiens
agacagtaagtgatactgtttttgtggtactacacttttaacttttagactttatttttaaaattaacttgacaagatgaaaacaaactaatgtgataaaggctcttgtttttcttcaagtttgtaatgaataaatacaaatttaaagtttttaatcagtatctctgagaaagaggtttatttccagtaacatgacttcactggtatttacagagggaaaattattttatccatagagtccctcgtatagtgaatgtaaaatagtgatttcagggttttccctttgactttgcactccattatgatgatggcaaggaatggaaggtatgtatgactaaagcggtctttgggaggaaaataattgagaagatagggttaacaactcaccaataaaacgaattaagaatattcaacactaggacagcatgtaagtttttaagcacaaaaacccttttatagcctcacagtaattttttgtatacttctcctgacttatgtagggaacagatatggagcccagcttgtatcgttgcagtaacatcgattgtaaggcttcacctctgacctttacagtacaactgagcaacaaattgatcatggacattagacgtttcattaaaaagtactatgatgtaagtatccataatgatattcttacatacacaacttattgaggtttggtacttgtttattggttttcatgaaactaaaattttgaaaagacttttgggaaaaattcctagtgaaatactattaatacaaatatgataaagtatgtaattttggcatattagcatgacaaattatttgataatttctctcaggcattacatctctttcatttacgagcagtattttaaataatgaaatttttacttcttttagaaaaagccagaatataattaagaaatgttttagtttattgttacctaaataagactaattaaatgattgcttagatctttggataaaggaagaaaaaaatcactattggctattgtcagcaagtagagccataagatcgtgtgtagtgatcttagtggactgcccacacaaaactaatactttgtgtttatgtagcactctaaacgactccataccctagttttttgaggaa

SEQ ID NO: 136670 - DNA, 3504 bp, Homo sapiens
acttaaaaaatactacccactggacataaaagttgtttgtgaaatgaaggcaagaatctcaatattgttttgattttagtcttagaagcactgcaggagaagtcaacctgcactgagaaaggaaggtatcttcatgagaaagggactccaggaagatgaatggaatatggtacttgaccaaacactataacctgcgaagaagcatagttctagatgactaagaaattagattgtcaagaaaaaagggacaaaagtttggggtaacaaagtatacttctaaatcactttaattttggaaaagtacatcacattctgttaccttctgtcatgaattaacaggactgactaaatatgatataacaaatatttgtttaagtttatctgagaagcaaactgtatcacatcataatattttaataaatattggctcctttatgggagaggagaggctttttgctcctcatctgtagcaatgattgtattccctgaattctagtttcctataacatttaaactttgatatacatagaaatacagaaagcactgagccaggatattttaagtaatatattaatttctttaggaagaagataactctgtgctttgtcttgagatttgatgaagtgttgaaagacttcgaggtagcacagaaagccttatttctaagttgatttcatgccctggtccttgttggttcctttgtataaagttaaaattgaactggtattttttgaaaatcataaaaaggcagcttaaagacaataactctaagcttttagggttgtttttgaaagattccgttttacagtgaaaaattgatatgtgttccccctccccttaaattctgctccagaagagcaaatagacatacacacacaaaagggagagaaacactagctaatctaaattgggaaatgaagagggctttttttaagcatgaaaatttcatcatcttgtcagctggcagaatgcctgctgtgtggattcacaaaggctaagaattacactttcatgaaattttcctcactaactgccctggttaatttgaaagataacccactgttctaattcattcctcaattgggcggtgcaggttttatctttgatctgacaaagcatttgtgttaatcgttttggccctccactagacactcttgggattgtgcttttacaataaatgtgtctgtgatagctctttagtctattatacttacaatagatccatagaactggtaattaattctccactgctttggaaatgggaagaataggtgtagctctgtcaagtgctgctgggaagtttgtttagctggttcatttttgaagtgttcccctcagccatccaagaagcagccacagaagagagtctgagattgagaagctggcctatcctgatgacttgctgataaatgggaaatgtgacccctcttggtacctgggaggaggatattgggtcatttacattcatctcaagtactgttctttttaaagtatattaaactctcattttaatacttaaagagccatttgcctctaacggtggagcctctagaagatgcaatcgtaatagtcaactcaaatacgttcctaaattttcactgatggcttatgcaggttttagagtattctgattgggtaaagtgtgttccccaccagccttctagtgtttctagccacttgtacattatatgagtactttactatgatttttaaacattgcgatattgctggccctagatggggctggccctccatctcaaagaacacatgaacagcttgttggtaccatgcatatgataacctctgatagttgctagggccagaaattggtggtctcactccatagaaagttgttgtaggctttataatctcaggattttcctgaattaagctttttgaggacaggggctgtgctttcttttctgttttatgtgtgatctctgccacagcccttgctctcagaagtacgtgtatcttgatgtttagtagccaaggaactgacaagtaaaggttatattttgctgttttttccttaaatttttttacattgctgtcagattggcggaagacttattagtggcctacaggattcttgggttaacacaaaattctacaatattttaaggtcatgaaagccatgacaaataaagctctttgttacttttctattttttacggcactgacaactctgcatttcagtatatgcctgtccccaactcaatagctttaatttgttttttccccaaaccaaataccaggcaaagaggcattaaccagaaatatcatcatgatgcacaatagcacctagcctaaatgtactttcattgtccagatagaagaatctatctctatataacgtggcaaagaaagtggatgcctagctttgttactctctttctgttctctccttgtatttttctcttttacttcttagtatattgtgtcataagccacattttaaaatctcttttggacccacatttatgaggaatttaaaaaataatgtgcagtgtatgtcgccttatgatgcaaaaacttccttatgcacacgtttaagcacttagggaagaagagagcatttgaccaatgatgctgagccttagcatggtagctgtgagttcttttggacgaggccacacaccaggaagtagagtaggatgttttgtagtgtatgaagattccatattaagcttgtttttcatctttgcaagttaaacaaaaaaactttaaaattttaaagtggatatgcattccttgaagacaaaattaataacaacccccaagcataatgttgttaagccagggattgaattagagctgccttttatcaaaagtgcaatgagggcagggtaaaatattggttaaaatatttgctccacaaaaatacccatttagcatcacaagtaagcacaattcatggctcccaacaatacttgaaaaagggtaattttgttaggaatgcacaaaactaaataaataaatctgataaattagagatgaagcagcctcccactctatccctcctgcccacacccatgtaaatcactaacagggcttctcatttccattgtctttcacttctcaacagagctatcttgtgcaggtggacctgtgagttttagagccatgcagtggcattcagtaactctactgtagtttcattgcaaatatgcagtgttcaataaccctcaaaatttctcatttcttacctgtggtgatgtggtttgatagtttttaggttataggttgcaatatgcagtagaatcacaggtatattagttcaaaaagtttaagcacttttggaattattgtttatttccttgcttctgcatttatatttagaacatttaaatagaataaatttggtttcttttttgtagactctaacagcataattataagtggtacaaaggcatacaaagaagcaatagatatccatcccacccattcaacatcacaggcagcccaatccatgctgcccagcagcgcttgaagaaggataa

SEQ ID NO: 136671 - DNA, 1026 bp, Homo sapiens
caagctctgcctcctgggttctcgccattctcctgcctcagcctcccgagtagctgggactacaggcacctgctaccaagcctggctaattttttgtatttttagtagagacggggtttcaccgtgttagccaggatggtctcaatctcctgacctcgtgattcgcctgcctcggcctcccaaagtgctgggattacagacgtgagccaccacacccggccagctaattttttattttaagttttgtatagacagggtctcactatgttgcccaggctggtcttgaacccctggcctccagcaatcctccctccttggcctcccaaagtgttgagattacaggcgtgagccaccatgcctggccttaaatgtggtattctaacaccagtgtccattcatggagggttggtatgtttttattcatgaatggctgatttttgttgttattgtcgttgttgtcaagcaagctcattttgagtcaggtataacattttgctgctatgccatggcatgttctcacagaaaaattaagaaacaagggactggtggtgattggaatagaatctcattgtaagtaatttatccttgtacaaatctaagtgaataacagatcaaatccaattccctaaaacatgccagctatgtattctatacaagcagcttatcatggtatatagtattaattgttgtaaaggagttctaataagcaaataagttcagatgcagccatttatgccacttgacttttatccttcgtagaataactaacatttacctgtattttctacatttatcagaagacccctttctcttttatttcatttaatcataatcttatgacatgaacccggtttggggaggctcagatctagagcatgattttgggggactaacatggaaccatcaccaaattctgaggtgctgaaactgcagagaatattgttgcctattgaggactaacccccagagccactgacgagatctgagcttgggccgtagtctctcccttacccatatcatttccca

SEQ ID NO: 136672 - DNA, 1049 bp, Homo sapiens
gggacctctgtatactcttaaagtactgaggaaaatgaagagttttagtttatgtggatattctttttttgtcactacaccaaatctggtaatgatatggtttcttaaaggttatttacaatgtggaatctgaaatcatatcggtaaactttttgtgctctggtatattaaaatccattgctctgtcttgcactttgagcagatcatttacccatgcatgattttgtaacatcatgccttggtcacttagaaaatactggttcactgacatgaagaatttccaattcattatatagttttttgaaatcgcatttgttcatatcatcaccagtctcatcagaaaagtctaaatattgggaagctgttgagctcatcgtggtggatacaaatgttccagtgaaaactaattgaaagctagaaatttgtcgttggttacaaatactgtcagttggtttttcttgaggttacaggatcagttggttaatttttgagaagatgtctgccagatacccaggtctggataaccatagttatctatccgttattctttcaagtaaagatggtattatttgaacagagtggttagttcagcttgcagctcagacagttacacaggtgcttttcctggaaacaaatactgtacttcaacacatgataataaaaggatatatatttaaaggttgcaatttaataaaattttactttcattgaggactttctttagtgaaactggcttaattttctatttgttagatcctgagcatgtgatgatgagaaatacaatgatgaatagtacagtttggggccactatgttgttgttgttgttttgagacggagtctcactctgtcccccaggctggagtgcagtggcgcgatcttggctcactgcaacctctgcctcctgggttcaagtgattctcctgcctcagcctcctgagtacctgggattataggtgcccaccaccacgctcggctaatttttgtatttttagtagagacagggtttcaccatgttggccaggctggtcttgaactcctgacccaggtg

SEQ ID NO: 136673 - DNA, 1286 bp, Homo sapiens
tttcttttattgattgtgcttttgatctcatgactaagaactcaaatattatctatgtctatgatccattttgaattaatttttataaagttagggcagagttcaatttttttctttggtctgtgtgtgtccagttgttccaacaccatttgctgaaaagtctgtccttcttccactgaattgcttttgcacccgtgttaaaaaccatttgagcatatttgtgtgggtctatttctggactctttgatctcttccattgatctctctgtttattcttttgccaataccacacaccttgattactgtagctttatagtaagtcttgtatagtgcaattcttccattttatttttttcaaaaatgtcttaattctagtttgtttgcctttccatataaattttagagtcagcttgtccttattaacaaaatttttattggaattgtgttaaatccgtatcaattggggaacaattgacatctttattatgtcaagtcttccaatatatgaacactttatgtctcatttatttggatcttctttgttttcttccattaacattttatagttttcagcttatgggtcctgtacatgttttgttagatttatatacctaaggagtaccttttggttctcaaaagagtactgaggatccatgaaatgttaaaaatattctacataaatgcattgttaatatgtagcctttaaattttattttgtaaacctttattgattagttcaaatattcagccacataatactgccaagtttttaaaataccagcttttgtattgtaattttacttttgtaaaattcttagatttacataaatatctgtatgtgtatatacgcctagagagatttctaaaaggatttttaagggtttgaaaaccctttaaaaatacatgttaatgaattctaatgtaccactgaatagttaacatgtaattaccatgtgctatatatgagaatatgaaagtaaaaggtatatatactttcacgcctgtatcaagttgattgtgtacttataaataagaagggagttaaatttctaaaacacaaaaatgagttctcatgtgacccaaaataatttttggaaagcaaaaataaccattgtatcttcttcgtatttatacatttttagtgggaatttaccatgcttcttaagtcttcagatttattgctgactcttgacaaatagtggatcattagcattgctcaacctcgcctcttctctgttgtgaatatgattgtataaacctaggtgaggagtagtgtgcatagaaat

SEQ ID NO: 136674 - DNA, 1883 bp, Homo sapiens
ggtgttgtattatattccacttacattgccttttcttccattctcactgctttaattcaattcctggtcatctcgttcttagcttgctaatcgatctcccttgtctttgtatcagtccattctctatatcatttccaggattatttttccaaaacaggattaatgtcatcttccaggttaaaaacctcctgtggttgttcatttcttaccgattaaaattcagatttgggagcactgcattaggccccaagccagcctttccaccttctctaccctcagtatcccttgcagaccatctgcctgccgcactggagagcttggcattcctcagggatcccttatgcttgactatctccacactttcactcctgccatttcctctgcgtagtaccatagcccaccacttgtgacatcccactttgtgaaattcttctgccttcagtggtacagtctctggaaagccttcttcactcagctgtccaggcaaaatgtcttactgttttctgcatgctctcataaccttttgtacacacctctgtggcagcacctactgccaagttgattggctctttttccctcacaggccttgagctccttgtgaacacaagctgtgctgtgttgtgttgcgtttagcttcatgtcacctgagcaaagcatagtgccagggacatggctgacacaggatttgcttatttgagcaagggagtgatttttggaaccttcagaaaagctgtgggtgtagtatttatgtttgatggaatacccaattcttactttttattgttaatgacttcacagccagtggatggcattttctaaaatgtcatctttaatctcttgctgtctaaacttcaatcaccttaggaatctctaagaaattaaacttagtcttgcatcatacacatacacatattttgcaggttttcaccttaaaattattttctgtgtttctagcttgttcttgaaccacaggtgtggtattgatcttttcttttacttaatagcacctttcctgccctcacgaccatgaccaggaaactggcttcttagcaccaaggctgattttcaaattcttgttggtttaggttctcttaaaactagtcagtcatatctttttcctattaacaccataattaaatacccagagtacagttttgagaagcccttagcaccatgtgtatatacatgtgtatttgtctggttttacatgctcttttcctagccctagcatgcacaagtgcactcttgcacaagaatgacagagcctagttggcttttgcctccttttggagagctgttatatttattggtcatatgcccagtggacttccttcctgttccatacttgactggtagttatggagcacctaattgtctgacagaagaagatagttcagcagagaaggctcattatagaattgtatggccttgatttcagggaacctgtcccctttgtctaccttcagaatggctatttcccatttttggaagataacttgagtatgtggtacagaattaagtattttcagataatagtaatgcagtatttcatttctgttctggggttgctagtagaagcaactctgtaggaataagctagagcaaaggagtgaacatgagtttagatggcttttctttttgtcagaccatcactagccattgatagaagagctgtacttttgtgttactttccttttgtctttaacagatagagtgaaatataatttgcaacacttggaaccttgtaaaagacaaccaaccaaacagataacaaaccaaaaagaaatcacctaagtcacacactggataaagctttctctgagcagcctctgactccttggacagcagtccctcccctttcagaatcctaacaccctgtcccc

SEQ ID NO: 136675 - DNA, 1051 bp, Homo sapiens
tacttttatcctttctctataattgcttactaatttttttagaataaaggtaaaatgtaatacatttttgaggaccctgttgaaaatcatagtttaatatgatggtgaaagaattaaggggggtagcatactcacagaacagaatgaaatagctgctatcttttgtcttcattgaagggaagagtatgcccccccccatcttccaccctcttttcaaacctaatcgacattctacaacacaaaaccaaggtggtaataaaggaaaggaaatcaaagcaggcttttttcccctctatttaccatagtaagtcaacatttgactctgtcttgatattctataaaatgaatgttggaaaaagaataatatcaatgagtagtttcccatcgaaatgcccaagggccgaaataattgagggaatacttgccaaggtttttcttagttcagtaactcttgatcactgtgcagttgtgtagctgtgctatcattaagggctctccatgtctggaaggacacccccctctcccagctttaatccaaaagtcataaattgtagaactaacatgtcgtctacgggtcacccaggcgaaaacactgcatcttgagaaatctatctttgtgccactgtgctttgaaaatcttttgaatattttgcattaatggtgctcccgcagtctcttgctgggctctctcctcatcttcacaagctccatattgagaagtttttcctcatagttaatctaaacattcttctctctgttctaggcctcacttcttactacatacctatgttcagtgttacatgagtatacccaccttcctttatggttttttcccaagtatttttaagtagcactcatatctccctttcattttcgtttttctggaactatttatttatttatttatttatttatttatttatttatttgagatggagtctcgctctgtcacccaagctggagtgaagtggcacaatctcggctcactgcaacctctacttcccgggttcaagtgattctcctgcctcagtctcgcgagcagctgggatta

SEQ ID NO: 136676 - DNA, 1040 bp, Homo sapiens
cgtagcttaccactactccttttgccttagttttgcttctgaccgctggctattcccatcagcaagaagacctttttaattgaatgtccaaatttgaatgattcttgtcctaatatcattataatcttgatccatttcaaattagagatccctaaggttgacttctcacctcagttcaacaatcctttaacattcagagactttgaaacttcacttctgtttagaatttcatatcatgcccatcatggggggaaaagatggaaaatgtatatgctgagcctataggacctcctgcagtgcttattaatcctttgtggatcatttgaaatgtttctagtttatttaagctttgctgcttgtatcagattgttcctacgaaaaaagaaaaagtgatcatgctttgaatttttaaaaatgatctcactttcaagcaaaagcacttttatgctccattaaagttgaatttgccaaactcttatgtcgcattaacacaagctttactggatagataaatgtgttgttcaaagaccaacttgaactttaccaaactgcttattaagatttttatctttattcttcttatttcttaaattattttaaaataaactagtaaaatagactagataggcctaaaagtactactttaatgacaaagtaatttcttcatttgaggtaaaaaaaattagtatagatcgtaagctaattgtttatgaaggcaaaattaacgaaaatattttgatcacttttatatttttatatttgttttatatagtatcaatatcacaataaaacttgatttttttttaatttgcataagtgatttattgttttgacatttataatttttgttctagtctatcatgcatctttgaaaattcaatattttcttgaaatgtttagtaggtcagccaataaattgacttttttttatccttctcaatttagtgggttttttcaatatgtgtaggacatcttctgttttctatgaatgatagtgttatattctttgtttctatttattttgtgacgattttagcttg

SEQ ID NO: 136677 - DNA, 1060 bp, Homo sapiens
gtcacatcataacctgtaagtaatccatcactaggcagtggctccacagcattcggataaaaatgttttaaacattcctgaaagaagaaaagcccacaaatactgccctgtatattgctgggagagaagatatgagtgcttgtatgtgggaattattcttttgtctttttaaggcaggtctcactctgtcacccaggctggagtgcagtggtgtgaacacagctcactgcagccttgacctcctggtcaagcgaacctcccaactccgcctctcaagtagctgggactacaggcgtgtgccaccatgcccagctaatttttaaattttttatagagacagggtctcaccatgttgcccaggctggtgtcaaaactctgagctcaagcgatcctcccgccttggcctcccaaagtgctgggattacaggcatgagccactctgcctggccaggaattactcttgatcacacaagtcttttatggcagtttgggacactggtcttacatgttgctcacagtgtcatcccatgaaagaggcagggtaggtacacttgcagtatccatgggaacacacccaaaggctgatagggtgaacggcttgcccaaggcacatggctcctgaagcagtgaggtgagaagagatctttgagttggctcctgcccttccattttgccacagggcttctttatctacctcctgcaaggagggcacagtgaaggaaggttcggatgggtttttggactctcacaggcagcctagcctgagggaggctagagtgttcagccatctgaattaatctcgatatcagagagtttagttccctcagtgtaaaattaaaagaatatttcttcatctgctgcaatgcatcagacactatcctagactatagaggctcaaagttgaatgatagcatctcagagctcttgggggctgaggtggtggccttctgtctccctttcttctacctctttccttctttcctccatccacaaactttttgtcctcttatatattagcacgtttggacctcttcctgcacttaaagtcatgcctaccttc

SEQ ID NO: 136678 - DNA, 2939 bp, Homo sapiens
tgagaaggagttaatgtgtcatatatccttttgatttctactctttgagagaaatcacagtatctataatttcggaggcatattcggaagaatgttaaattgtgatttctctatgctgaatcttagagatctgtcagggagtcttcagccctgacaaaataagaatggacccattatagtatcaggtccatttgatttttcaaaagttaagggaaatatgcagatcgtttcagagacttctctttttgctcttgcttgttataagacagatgaagggaagcaaactgggctgtgtttagaatgcatctggagctgcttctctctcgagatctcggcagtataacttctgcaagccctttctgtgtgtatttttcttttctcatcctgaaatattccatcttgcatgagaaagtcagctttgataatttccaaaagctaagtattatgacagaatttgtgcctcttagaaaaaaactgctcctttactataaaatagaacctaccttttatacctgagtaaaaaattctgataaaacttttctaatcgtatttattattgaaaagattatttttgaggtggtgtttactaaaatatgttgatttttatattaatttctgaatactcagtttatatttttagattgttttgtgaattgggatctctgagtataaagtggttttcagcacattggtgatattgaacatcttcctcaaatagcaagcatatgcatttcaacagctttcgggacagtactacagttaataatttctttacaagacaaatgtatgcttttttattgttagcattattttctcatcttatgttctggcatttaaattatgaaacttcatctcggcatgtagacttaccttgtgttgccaagaggaaagaagtggcttttctgcaaagccaaatagtttttactttattgtctgctatgaaacagctgctgattccaggaaaatgccgtctcatcattgggcctggggtgtccaaaagaggcaggaaaaaaaaatgactgtagctccctgtctgccctggcactctcctcctttctctcattttcattgccatgaagagcatgagaacaatattctgcaattaaggattccattaagttgaagaaaagagcaaatgggggatgtttgttctctaagctgaaaaaatttgtctggggtcggggggggggatagtggtagtggtatggagagaggtgggtggagagacgaagtcagggctgtttgttgaatatactgttaaggactgttaccatcctaattaatcaagttagaaattacagctgtagtcggtttccccccaattcttgttatcaattttcttctcttttgagacaaagcaaatataaattttgtgttcatttgtcattcgttctttgacttcagcatctctgaaaataacaatgtagcacaaaagcccagtatttacctagttgtaatgtgggttgccatggtgttttgcaaattattgcaattatgttcaccatgcgagtcgcccttggtaactggcgaaaaaactgataatcctgttttgaacaaaaggtcaaattgctgaatagaaagtcttgattaactaaaagatgtacaaagtggaattatttcctaccattcagaaatagttcttgatcgggtttgggggagggggtgagtaagtacatctgattactgaagtacaaagcattgaaaggatgttgtcttgagcctttcatgtagtcttaatggtggcttttttgtcaaatttacccatttgcggcattgaaagaggcagctgcatttaagctggagagacggtgctttttcaagagttcagtgcatggaaagttctcagcagtatctgcagtttactagtagcccctggtctattaaaactgatgtgccgcatttgagcccattgctctcagtacttgtgaacccctctggctgatgatctaataaagtgctcttactggacaatctctgatcagctacttaaaaaggaggctggaggagggggcctgagggagaagcctcacaggcagtgagtcttggagcaggccagaagagtaaagacaagtggctaaactgaaaggtttgtcaccatgatgatttgtgctaaggcgtttgccacagggttttggtttttgtgccccagatctcccaactgtgatcatgctttttttctgaagagaaattttagttttaagttagataagagattagaagtgtctctctgaatgttaaaatctaccttgcaattgtttcttaaattatggccattcagaaaatatataatcctacattcatgtaaaaccaaaagtttcccatgttgcagccaaaggttagatggatttcttctcttctgaatctggcagaacatctgcagggagtgaattttggagggagggagtttttttttgtttttttttttgttttttttttagtgaccacctgaaaaatcaattctcaaaacttttgagagtgtgtgaaagtggcatgaaagcaaagcaaaccttaacaagtttgtgggtttacattctacatcacctagcaacctcctgactcagccagatctcttgtctacccttagttctgtttacagactattcaaacggcccttcgaaaccatgaaagatattcagtttcattagtaccattctcaaggagaaaataattaaagttaaatgaacaaacattgcctggtgatagtttgaactccattctgattttaagatgtcctttgaggcagtagtagctatagttcagttttaacatttgtcgttcactacccaaaggcatatcacttgaaaccataccaataaatactagtctctgagcaaacaaacaataaaaattacttttagctagacttgagcaaagaaaaactcttctggtaagaaggttttaagcatgcatgccattccaattgaattttgttttatttg

SEQ ID NO: 136679 - DNA, 1067 bp, Homo sapiens
tgggggctctttaatgtacctcaggtacatcttctgatgctcaagctctgattgcaaattaaaatagcaaggctctgtattggatttgatgtgaggcaaagcagaccaagtcgctaatttatcatgtaatatacaatcgctgaggctggaatttgtccacttgtagtgctattctgtgtgtttaaatgaggaccactgtttgcatccaacctatcataacagtttgggagtgctccattatcctttcagcaaactgatggcagagtctggtccttgtacaaatgataagatcaataagtttcaaataacttggatgaaatgacatatgactgttcatttaaagagatgtcttacttaaaaaatcaattttaataatatttaagattcttacattgaccgatgaggcactttctacttctgttttgataattttgttcaaaatattcttgtattaacttcggtgaatagttagtttatgtatttatttttcctgatttactctttcatctcctaccctagtacctttctgggacttaataatcactctttgacatgccagcatgctgcagtgtagaagatttaactttaaaagcaaaattatattcctgttaaaacttcccctggagatcttagggaaattttctcccagttttgggtacaaatgtgggtcagaaagcaatttgttttttgatatttctggaaattccaaatcacaacatgtcattcttcaaaagcagctgtgggcccatactgtgcactatctataaggagacccattttttgccactggggataattctgtggcagaaaaatgtgcctgcaagggaaccccggaacatttataaatggtttagggtgaaaagagagtctgatgttctcagagtacatctagttttggtataggggtggttaatggccattattgaaaactagtaataatctgatgaactcaaagcatgcatgctgccagaccccgtcctgtgaccctgtcactgcattcctggtgagccattacaatttaaactaaatcgtacgtcactgcagaaccatgctgtctcttgaaaatc

SEQ ID NO: 136680 - DNA, 1090 bp, Homo sapiens
tatgccaaatataatcctagacactctaaatgtgttccatcattgcaacaacggtatacggtaagtactgtggtatccattttacagagaaggaaacagcacagcaattaagtaactagccaatagtcactcagctattgggaaggttatacatgtatgtggtgcattctttggtaatggtctttactaatgaactaaaacacattggtttacattctgcctgtagtagaagtttttgttgggaagttttgatgtattggagtgaggaagggtgtttcttttaagaaaaaaaaataacatctcatgtgattttcttttttttttttttaacttaatggttttcctaacttctaagtttggggcatagatctatctaattaacatgtcaggagagagagataactagagttatgtcagaatttctgagaaaagattaaataaaatgagtctatcttgataaccaaaaaaaggtttattacttgtatttgtcgatggtgataagtctgaagttttcccttctctccagggctggttgatatgtgaagagccaacctgtcgcaatcgaactcgtcaccttccccttcaattctcccgaactgggcctctttgcccagcctgcatgaaagctacacttcaaccagaggtaacagtctcataatgctaaagaaccatgtagaagagggtagagggctgcttgctttgagaagtagatactgagtatttgccctatgaagatgccctactaccatatgcatatactaatcttatttttaaaaaatacagatttcagaaagatacatgctttctttttttcacatgtcatgagcaatactatatttatatttaaaagggaaactgactaattctcatatgagttatagatttctttggttgccactacataattacaaaagaagacatggccattccattctagaaactgctatcgtctttgggcttgatcagaatcccatttgtaagagccagaaatcctcccaattctgtaccctgaatggtttattttgtggggtttttggtcccctctgctggattaattgtttataagtagctgcatagatgagtagttctg

SEQ ID NO: 136681 - DNA, 1031 bp, Homo sapiens
tttagtagagatggagtttcaccatgttggccaggatggtcttgatctcttgaccttgtgatccgcccacctcggtctcccaaagtgctgggattacaggcatgagtcactgcacccagcctgttttgtctttttgagatggagtctagctctgtcgcccaggctggagtgcagtggcgggatctcggctcactgcaatctccgcttcccatgttcaagcgattttcctgcctcagcctcccgagtagctgggactacaggcgtatgccaccacacctggctaatttttgtatttttagtagagacagggttttaccatgttggccaggctcatctcggagtcctggcctcaggtgatctgcctgcttcagcctcccaaagtgctgggattacagacgtgagccaccgcacccggccactcaagccatttttctaccttaatatacacacctgaggtgtaagacatactatcattaatgactcccaactagaaagcatggcatctggaaacacttctctggtaattaagatgccttccctctgttgacccctttgagcatcttcgacccaaacagcattttccaaactgtagtgagaagtttgcaggttctttgagcaaagagggttttgtgatcaagtatatctagcagatgctgggctagctaaaattaaacaagtttattgcagatcttttcagaacctataatatgataatgtgcaatctgtctcactaggacaggtccataatgtgcctcactttccaaattcgtctagcctgaagatttgtaaggtttttagtgagaagaaggtgagacttgggaacctgttgtttatttacttacttcttaaatgcagaggcaggcctataatcaagttttgacttcaaattttcctgctgaaaagggttgatacacagactagttttagaaaaatatgtacacacagttttagaaatggagtcctgctatgttgtccaggctggaatgcaatggctattcacaggcgcaatcatggctcactacagccttgaa

SEQ ID NO: 136682 - DNA, 1011 bp, Homo sapiens
gctgctcaggacatgaccctatggagttactcagtttcagagcaggctggttggtgatactttccttagccattcctgacagggaccttgacagtgggactcagaacactcttatgtactcgattttgagttgctaataatgggcgaggaatttcttaattctatttgtgaggttcctgggcttttctagtaggagggaaaaatgcatttttccaaagatagttctagagaagttcaaaaaacagttgtgcaatggacagaattattgtaatcatcagagggttttccaaagtatctattctgcaggattatactcatctggttctcaagttctcagttgctctgtctcaatcataccttactttcatttaataattatttattaaacaactgcaactacatcctaggcactttgctaggtgctagaaacatgttaatgaacagaacatttctttatttataaaactattttaacattacacagattatataaaattctataaagttgatatctgtgggcaaaaataggcatttataaatgcccatttggacagaacactagacattcctagtgctagactagtgggagctttaaatatgttgttcaagtttgatggtaaagcactggcctcttactgtgccagtcttatctgcacataataaacctattctcacttagtcctgggttgcagttgacttgagtactttccagaattgacttggagtaggaaagctggctcttctgctggctcgcattgccagagttagaagaagaaagccgggacagtttttttctcagggttttacacgtgtatcttctctcttctcagatatttcattcatatatatatatatatctcacagttaagttttttaggctcatggaaattcccagtatacaagttgctgcttaagacatatattccctgagtattttttgctatataagaggtgcatttaaatacgagagtgaaaattttgatgcatgtttaagttactaagtaaatagaa

SEQ ID NO: 136683 - DNA, 1151 bp, Homo sapiens
ctcattaacgtattcattcttgatgtagagctgagaaaatgtctgtatgtgactctcacgatcatggtagaaataatctgtcgaaactgtatagtccctggggcaggagcagtatagtggagccctttattcaattatttaatcaactaaatttcttgaaggtcacttataaggaaagcagtgaaatgacttctagtcctactttgagaaaccccctagtgtttctcacattttcctcacttgtaaaattgctaaagtctattataacagaacacataatgtgtaccattgtaggacttctgtccttaaagggagaggagaaataatgaacttataatcattatatgttaccatctcaaaatggctatggctgaacaaattgttgatttgatgagtaggttagggacagtgagaatgttgccaagctacctggggaagtttcttttttcagaagaaaacatgaaaataattgtggtctcttaaggcagtaagcatgagtccgtgtaggaagagaaccttagaactatgacctaaagtcttaaacctagtcattggttattctccagtagggaatggtggtttaccatgaagggtcttttggagctctcctttgttattttgacatgcatatttgatgcaaagagattactaaattctatttacagcttctcttactgccacatgggtgctagcaacctttttcaatttacttttttttaattggggtataattgacataacataaaattaagtgttttaaagtgaaccatgcagtggcatttagtacattcacaatgctgtgtggctaccaccagtatctagttccaaaacattttcatcaccccaaagaaaattccatatctattaagcagtccctccccatttccccctccttctagcccctgttgtcactatggattgtacctactttgaatattttctgtaaatgaaattatacgatatgtaaccttttgtgtctgacatctttcacctcgcataacatttttgaagttcatctgtgttgtagcatgtattagtacttcattcttttttatggccaaataatattccattgaatagatatgccacaatgtgtttattcatccattgatggacatttggattgctttgtcagtacacttttaaagttt

SEQ ID NO: 136684 - DNA, 1453 bp, Homo sapiens
atgttcagatgcccattagggcttccttttttccagtggaaattgcagcatgttaattttcacacaaattacagcaatagcaggtatctctatttgatacattataacaggagcaatcaaggataattgagtgcctttcagatggaaacgggtgcattcacttcaattcaaagcgagtccatttatcgcctaatcggtctttaaacactaaatttctggaacaaaaattcttgtcataattttgcttaagtgtatttggaaatcacagtcctttgagcaaggataattgaaatcaaatccctttcaatggaggtgacatttctacattttcccaattgaaattaatttcaaaaattgagcatgaatatcttcaaatggcaggcaattatagctttcaatgggaagaaattatgcgcacaaaaaagtggagacatcaaataccgcttcagctaaatgtctttgtttccaactgtgtttgccttgtaaagatttacatatattgacttattatgcaaccttgagatgcagatcgccttcctttttcatctgagcccattaaaattaactaaaattggaacgttcttgttaagcttcatcaaaactgtttggaatttactgcagctgcagaaatgtgttcataatagaacttaacccttcaaagacttgaattctacccccattttttttaaatctggaattctaacttcagcgcatttcattgtttcacttttaatgattcaaaagaggagtggtgaagaactgatatgctaattgtcttctctttttgtcatctggtacccatgggatctcaggtaaatctctggagcctgtcccctttgaaaactgccctgaaggacaatactgagttcccagagggcaccaatatgccaacctttaatatttaaatgtaatcatatcaagccgatttcccactcctcacaataggaattgctcttattgttggactgtgacaaactctgtgggtttcctgctgcggaccttttcctactaagaaccttttctcccaattgttttattgccacattaatgctgctattaagatccgtgtgctataaattagataagctttatatatttttttattcatcgtgactttcttctgttttccaagggtaaaagtatattgagaactgactcttgcaagcacttacttttcgaaagtagtttagaagcaatctagccatgttttacagttatagcggcaattgtttcaacaaccccaaaaaaattgcattactgaaatatatttcatgggtgcaattggccagggacagggagggcagcaggccatttcttttattaaggtcttgcgcaaatgttatgaagagggcagtatctcaagaaacaatttcacagctggtttgctcctaagccactcaagcctaaaaatgcaccgaattcctggtggaaaaaaaagaaatagatgtcactc

SEQ ID NO: 136685 - DNA, 1099 bp, Homo sapiens
ggtggaaactgagatttccaaatcctcctaggttttagggcagcactctttaaataggatttctgagtcccaaatctttcttatatccttgataatttttatattatttcttccttcagacataaccttgatatgggctgtgtgtccttggaatgccaagcagagatcattttatgctttgaggtcatagttataaataatgttacttatcatatactccaaattcattcagaatttagtgagcacctactctggaccaacactgatacagccagtaggtatacagcaggaatctaaaattaagtccctgtcctcatggaacttacattccagtgtggggagacagataataaacaataattatatgacatggcaggtagtgacaaagtactgtggagaagaattcagctgtgtgagtaggaaagggactggcacaagtagggtttgttaatttatgtagggtatctagggaagttctccttgaaacagtaatagtaagcaaaggccagagggatgtgaaacagtgggccttgcagatatgaagaggaagggcatgtataagggatctggaacagctagtataaagggcctaagataggagggtgcttggcatatttaaaaaataggaaaagggccagtgtagcaagagaaaagggaacgatggggaaagccgaaagaggtaaggtgagagaatttgggcagagggtggagacactgtgaagagccatgtaagccattgtaagggctttagtatatatgctaggggaaatggggagctattcaggaattccatgtggaagagtgcagtatctgactaagttgactgctttgactgctgtaatttaggcaaaatatgttgatggtagcttggcccaaggaatagaagggaatctgtgagaagtggttagattcttgatgcattttaaagctaaaactgataggagttgctactccaatccttcttcccctgtgacgttatatagaaggaaatggaggagagattccttcttacaggctactgattctcaattgaattctaatgtatttaattattcacctaaaactaagatcttgcctatggaccccatatagcatagca

SEQ ID NO: 136686 - DNA, 3137 bp, Homo sapiens
gtggtatcagactatgcccttctttttggatggttatagattaaaggaaaatcttctagggcaaatcttgaaattaagaaagtattaagggtgtgctccatactctgttccttgtttgtatccttatgccttgtccttccaccagtcttccctctcctcttcctttacactcagctgtcctgtaatgcaatgtgtgtgttcctaaaaatcactaagctatggaaaatcatataatgacaaccacacagtttatggaaaaacagaaaggttagggcaacacacaaaaacttcatcagtgacacataaaaaaggatataggaacctaaacaaaaacaatgacatagttttacacatcttcagtagctaagaaatatataaatattacaataaatatggtactttaccccgaaaaagacttgaagtttgcttgtggaagtggactcagaaggattgcagctgtgagtcatgatgacgtagagaatggaaggttatctgaaattggaaggaaagttgcaacaaacaccagatgtgggtgagtgtagcacagtgaactgaggtagctggttgatgtttgaggtatttgcgtatgtgtgttttatgtattcctgtattgcttgggtgcatttcttgcattcacctaatatttcttgcagacaaaatcatgcacgagcaaacacgaaattcatgttgtgttcaaactgttccgtgatatatcaatggcactggaataaattctcatattcaaaacaagcgctgtagcagaaccaactgtatctcgttttgtcttgatgattaaccagcaccttaactgtctccctgctttattgttttctcttcattctcataatgtacaaagacactcgtatttttagaaagactgattggaacatctgtcaaccagataattaaacttattgaatattgtctatctccagcatcctggtctgggacgtgggaaacaaaaaacgttttgaaacaatgggttctgcctttatactgcttgaatatggggaactaagcgcagacctttgaagcaaaacaacagttcttaaaatatgacaacatatagaattaatacatcagtgctgaagagatagggtaaagtagttagtaaagagataggataaagtagttagtaaggtaaagcttcttagaatatataaattttgatccagattgtaaacaaagttgtgaacatggattggggaagtagtcccagaagatgaaaaccctagcatcaaattctaccagcattttggttccaggtaagatggagtaagaatagttcttattgtctccaaccgaaagcaactgtaaaacctggacagcatgggtggagcagttacatggagaccgaaaagtaaacagtagcaggtaggttaaagatgaagaccagatttcttttttttttttcttttttctttctttctttcttttttttttttaagaccggttcttactctgtcaaccaggtggagtgcagtggtatgatcaaggcaccctgcagcctcaatctcctgggctccagtgttcctcttgcctcagcctcccaagtagctgggactgcaggcacttggcaccatgactggctagtttttttattttacttttagtaaagatgaggtcttgctatgttgcctaggctggtctcaaactcctgagctcaagcacaccccgacctcccaaagtgctaggattacagacgtaagccaccgtgcctagcgatgaccagatttcaagtacctttaaactagcagtaagtttgccattttgtcccctgatattcccctgcctaaatgcagcacagcgtaaaaccaagcgtgggcaccaagctacagacagcaagttccaggagaagcaagtagtggcaaaggtaacacccagagagaatgtagaaatccccatggctttcttttgttttttttttttttcttcatgccctcatgcatcagtcttcaagtaaccttatggtggcaacagaagctgcagtgagagtcagcaggagccagaactccaaggaagggaaatctcttccctgaatcctctttctctttcttcctatccattggtcctaaatggagtacagtcacaaaaatacatgacaagttagataactaaagacacagctttctgactggaggactgaaaacaggagttacctgcagggaactagaaggtaccaggaagatgacagagaaagccttagggaaacaggccccataaggttgtttatgagtcgggtgcagtgactcatgcctgtaatcccagcactttgggaggccaaggcaggaggatcactcgaggtcaggagttcgagaccagcctggccaacatggcaaaaccctgtctctactaaaaagacaagcgttagccggcgtggtggcacacacctgtaatcccagctacttaggatgctaaggcaggagaatcgcttgaaaccaggaggcagaggttgcagtgagccgagatcgtgccactgcactccagcctgggcaacagagcaagactctgtctcaaaaaaaaaaaaaaaaaaaagttgtttatgaacttctgggcctgtggaaagaaagggtctaatcctaatcaacataccaaagacatggagaactgaaataaaaaccatcacccagaacccaggactacctagtagtgcacagaggagacagatccaaaaaactgcaaaagttttgacagctgaactgacattggcgacacagaaagtggattggagctcacagcccaaatttaatgaagtcaattgcctgctaaaatgaaaataccaacaattttcataggattgaaagaagaccctgagactcatactattcaaaatatccaggatataattctgtaagatagaaccaggaaaatcctataagaagaaccaggaaaatcacagattgctggggtgggggggtgggggtgggggaggagacggaacacgaacaaaaagatgccaatgctgagatgataataatattagaattatatgataaagactttaaggcagttattatccaaatgttccaacaagtaatggtgaaccccccccccctttttttttttttttttgagacagagtttcgctctttcacccaggctggggtgaagtggcgcaatctccacttactgcaacc

SEQ ID NO: 136687 - DNA, 1812 bp, Homo sapiens
tataattaccaaagcaaaaaacttagtgggctcaatcatagaatggagacgacaggagaaagagtaaatgagcttgaagatagatcaatagaaattatccagtgtagacgaggcatggtgcctcatacctgtaaatcccaacactttgggaggccgagccggacagttcacttgaggccaggagttcaagaccagcctggccaacatggtgaaaccccatctgtactagaaatttttttaaaaattagctgggcgtggcggtacttgcctgtaacccagctactcaggaggctgagacacgagaatcatttaaacccaggagtcggcggttgcagtgagccaagatcatgccattgcattccagcctgcgcgacagagcaagactctgtcttaaagagaataaaagaaattatccagtatacagaagacaggaaaagactgggagggggaaaaaggagccttggggacctgcggaacaataacagaaaaatctgacagtcatgtcattggaataacaaggaaagaaggaccatagggccaaaaaattatttgaagaaataatatttgaaacgtcctgagttgggcagaagacatgaatttacagatttaaaaagctcagaaccccaaacaggataaaataaatttattcccaggtaaagcataataaaattatttaaaacaaaaaattctgaaagccagggaaaaatgacatatataagaaaaaaagatttaactgatgatatatttctcatcagaaaccctggagccagaggaagtggaacattttggaagtgtttaaacaattatcagtacaaatttctatgtccagcaaaaaatactcttcaggagtaaaagtgaaagaaagacattctcagatgagtaggataattcattgccagccgaccagctctgagaattgctaaaggaagttattcagagagaggggaaatgaatgctggaggaaacttggaacatcatggatgatggaagagcaacaaaaatgggaagtataatagactatttttctcctcttgagtttgctgaaatatgttttgcaggtgaaaacaaaaatcatagcattgtctgatgaggttttcaatgtacatagacatagagacaactacagcataaagagagaaatggggtctatatgtgtttttgcattccacttgaagtggtaaaattttaattctaagtgtgtacattgacattctgaagtatagactatataaagagatgtcaaaatccaataatagctaaattataataaaatttgcaatgttcaaataaccaagaagagggcaggaaatgggaaagaggaaggaataatcagaaaataaataataaaatggtagccccaaaatgatttttttttaatgatgcaactctaagctgccttcaagaaactcactttatttttattttttattattttactttcgtgtaatttctttttttattattattttagggtacacgtgtacaacgtgcaggtttgttacatatgtatacatgtgccatgctggtgtgctgcacccattaactcatcattttacattaagtatatctcctaatggtatccctcccccctccccccaccccacaacaggccctggtgtgtgatgttccccttcctgtgtccatgtgtcctcattggtcaattcccacctatgagaacatgcggtgtttggtttttttgtccttgcgatagtttgctgagaatgatggtttccagcttcatgcatgtccctacaaaggacatgaactcttcattttttatggctgcatagtattccatggtgtatatgtgcc

SEQ ID NO: 136688 - DNA, 1011 bp, Homo sapiens
gaagttgcttatcagcttaaggagattttgggctgagacaatggggttttctagatatacaatcatgtcatctgcaaacagggacaatttgacttcctcttttcctaattgaataccctttatttatttccttctcctgtctaattgccctggccagaacttccaacactatgttgaataggagtggtgagagagggcatccctgtcttgtgccagttttcaaagggagtgcttccagtttttgtccattcagtatgatattggctgtgggtttgtcatagatagctcttattattttgagatatgtcccatcaatacctaatttattgagagtttttagcatgaagcgttgttgaattttgtcaaaggccttttctgcatctactgagataatcatgaagaaactcactttaaatagaagaatattggtccattaaaagtagaaaatggcaaaagacataccatgcaaacactaatcaaaaggaagttagagtggatatattagtaacagaaaattagacttcaggttaaagaaaatgattagagctaaagaggaatactacataatgacaaaagagctaagtcaccaagaataacaaataattctaattgtatatgcacctaacaacggaggttcagaatacctgaagcaaaaattggcagaaaggaaaggaaaaatagataatccacaattatacttcgcaagcgtgacactactctctcaacatttgatagaaatgctggacataaaatcagggatatagaagaactgacaatctgattaatatttataaaacatgctctccaacaataacaccatccacattcttttcaagtgtacatggaacattcaacaagatagaccatattctgggtcataaaaccttaatgaattttaaaaaattgaaatcacacaaattatattcttgaaccataatggaattaaattttagaaatcaataaaagagtgataacaggaaaatcttcaagtacttggaaattaaacagcac

SEQ ID NO: 136689 - DNA, 2232 bp, Homo sapiens
cacctgtaaccccaacactttaggaggttgaggctgcagtgagcagtgactgtgccactgcactctagcctgggtgacagagtaagaccctgcctcaaaaattaaaaaataaataaaaataaaactgtgaaaaagatacggctccacacctattagaatggctaaaatacaaaatactgacaataccaaaagctggcgcagatgcaaaacaacaggagccctcatatgttgctggtgggaatgtaaagtggtatcacaaccccagaaaaggttgacacttgcttataaagagtaatatacacttaacatatgatccagcagtcctgttcctgtgtatttaccctaaagaagtacaaatttatgttcatacaaatacctgaattcatatatgaatgtttatagtagctgaattcataatagcctaaaactggaaacaactgtaaagaaactgtagtactttcctaccatggaatattgctcagcaatataaaggaaggtactactgatacacccaacatcttggatgaatagcagaggcattatgctgagtggataagccaagactcaagggtacattctgtatgattccatttcttgaaaataaactataatgatgtagagaacagaagagtggttgtcatgggttagagaatggtgtgaatacaaaggggcagcatgaaggggtgtttgaagcatggtgggactattcttcagcctgattgtggtgtgttacgtgtgtttaaaaagtcgtggtaaggccaggtgtggtggctcacacctgtaatcccagcactttgggaggccgaggcgggcagatcacctgaggtcggtagttcaagaccagcctggccaacatggtgaaaccctgtctctactaaaaaacataaaaaattagctgggcatggtggtgggcacctgtaatcccagctacttgggaagctaaggcaggagaatcgcttaaacccgggagatggaggttgcagtgagctgagattgtgccattgcactccagcctgggcagcaagagcaaaactctgtctcaaaaaaaaacaaaaaaaaaacagtcatggtaagccgggcgtggtggctcacacctgttatcccagcatcttggtaggccgaggcaggcggatcacccaagatcgggagttcgagaccaacgtggccaacatagcaaaaccccatctctattaaaaatacagaaattagccaggcgtggtggcatgcgtgtgtaatccgagctacttgggaagctgaggcaggagaatcacttgaacccaggaggcggaggttgcagtgagccaagatcgtaccattgccctccagcctgggtgaaaagaatgaaactccatctcaaaaaataataataattttttaaaaaaagtcatggcatgactttttagccaggcacactagcatgtgcctttaatctcagctcctcgtgaggctgaggcgggaggatcgcttgagaccagcctgggcaacatagtgagaccctgtctcaaaaaaattttaaaaaaatcgtggaactgtaccccaccagtcagttttactatgcaataatttttaaagtaagattttttttaatagaatttctgtggcctgataagatataattctgctttaagaacttctgtgaatgtccaacattgagatcatcacaaggtaattcccaaaactgccacactgaagacaaggcacacctaaataaatgtcactgggagcccctgctaaactttttggccaggaatccataccaaggaacaagtatccaactatgacaaaggaacaaaacattcatattctctttgctaaagcacatttgtgaaagtaaaacatctccccccacccccgcaaaaaaaaaaaaaggaaagtcattcctaaaaattgatagaatagatttggacatcagagtgtcaggccactcatgcaagttctagcccttcaaataagaatgtaaagccgtaataacatgacagcattttgaataggaaaatctggatttgtgaagcagtgtgtgtttttgacaacagtagttccgcattcttttatgcaacataaacatcgatttgtttaaagttaccattcttttatttatccagcgggagcatagatagcatcatagggaaaaagagactctatcctgatttgttttctctttatttcactacagccagcattctggaacccctttcaaacatcccttcctgtgggttaagggagattatttaa

SEQ ID NO: 136690 - DNA, 1049 bp, Homo sapiens
gaaagtgtcaaattgacattaatctatcatgctgaacttcattaagcccctcctttggcatactgtgatttaatccatatatagcgtgcatatatggactttattttatcttgctcaatcctagaccagcatttcatgccaagaagtgagatgatgtttggaaataaaaatatgccgccttctcgattctagctatgaataatcattctagttttgactctaccagtttttctaagaggtttcaaacaaaccatagctaccccatttactgaccagatctagtattataaacagatgacttcaccttgatgaactttgtaaaataagggaaataatcccagtttcccctgacctcacagagttattctgaggattgaatgctttgaaaaatatcacatactatgcaagtgcaagggttgtgaattttttttattgtttagcagagtaattcatttagttattgaacaggcatattgataaaaatattgtcaggaataaaaaaatgaatatgaccatcaaagacctctcagtgtagcatcggaactaaaacacacaaataattctattagaaaatgaaaagtgatacatgccattaaaaattatagaaagacagtggttgacatgaagagaggggtatataaatggaaatatccacatttaactgtgtcacagtattggagaagatgtacccacaccatactgtaagcttctgcaatctttcagtatttttctcttgtcccctgatgtagccctagcagctagaacagtgccttcgcatgtagtagattctcagtatgttagataaatgaatagttgtctttctgatgaatacaggtggctcatgctatgagagtaggctgactttaacttaccctacgtttccatatgaagcagaacttcttcagaggtgtcacctaacccagaatgcaccttaacatccagatcaaattaaaaggttaagttttcatcctgatgttactccaatgtatttatagtagccatgtatatttattttagtcattgttgatatttgtttatcacagcaccaa

SEQ ID NO: 136691 - DNA, 1672 bp, Homo sapiens
tttgaaaaataacttcatctttacaaaaaaaggattctgaaatgaagaaattactgtgtgttttttaagcccatcgttatcaagaacttgctgtaaattgtctacttgatggacatactgaatcagatgataatgtgcaccaccattctttctaatcaaattaccaaaaagacttcttggaaaagtaaccctcacaagcggctgattaatgaagtggtggcaatgttttgtattagaactaattgaagtaatccaaataagttatttctgtagcctatggaaataatttcctttgcaaagaagtacagtggagttggcaaaccagtatttttttttcaccctctgttgttccacatttgcaaaatagctaagttaacatagatattgcaaataaaatagatagaaaactaagtaattgagtggcagggaaaacaggaaagtttatttcaaccttttcataatcaagacgaataatttacctaaagcctaaaggtgtatggaaattgagcgatactggaattcgaaggcatatctttagtaaaatgctgtagaaatagcagtttttaatgcattcatttaaaagagacactcatgttcaagagtttagacatgttccttagacaaaactttctggagaacctgtggctggcatggcattgtgtttggtgcacaaatcaaaccctccagaagcttatcgtctaattgggaaacgtataggatctatcacatatccactgtgtacttcgtagcagtcatggtgctcggtgctttttgtatggtatcttgttattttaacaacattcctgagacacgttagtcttgttttacagatggagaaattgaggtgtgaatatgttaagcagtttgtcaaaggtcacccaagcctttagtggtagaactacatttcaagccagattcagtctgaccccaaagcctatggtctttctgctattccagtcttccatggggatatacacataggacacattagaaatcaattcaaaggactagtgttgtatcattaagcaatatgcatgtggtccccgccctcagcagctcacatcctaggaggctcaaggggtgataaaaccagtgaggactacctggggtgggagctgtaggtcagagggtgtagtgagccatgtggtcacaggataggcaactatgtctgtcaggtggaaagtgaacagacagaattatggaggcacaaacggcttcccgaagatgatgatgactgtggggtctgatgaggtggataggaactgactggatctttaatcaagaccagaaggatagacctgaaaggggtggaattgcttgggtaagggtgtggaggaaggaaggatacatttcctgactgtagcaggggatggtgataagggtggcgtgggtatatggccaggctggcagttgaggggcatgtagaaaacttgtgagagtggacctgaagggttggaactttatcctgtgtgtggtgagggtgctagtagggatttttcagcaaagactatcctaagctggattttcatttctagacatgtacctcatgatctctgtcagtgctagtgaggtttagagttctgaatctgctatatggtatgatacctagatttaactgtatcttcaccatttgcaaagtaatgcagtttaatacaccttcattatattttac

SEQ ID NO: 136692 - DNA, 1048 bp, Homo sapiens
ctatcagtactttttttaaagctcttggggtgactggtttgcagccaggtaagggaccactgatataggacctcatcagaaatctcaggagagagactggataatattgataaatggattcaggactatgttttggtcataaagtactttgacttggagaaagaatgaagtttgcgttgtttctaatataatctgattacaggattcaaaaagaacacataaaaaacggtggtattaaagcattttccttttcccttcatttcttcaacaatatttgccaagtcgtcccctgtgccaggtatcaaaacagagttctttccttacccctgtgtgtatatggacctatgagtgcacccgtggcccacccttattactctggtaacactccaagtaactaacttgaatgcagagcgtgatacatacagtagctatttcagctcagtattgtccttaccaaatcacagtcggccactttggtacatgatgttctaactataaaggaagactgaaagaagcctaggcactgtgttgagtgcaattttcaaggaaagagcaagaaatcgaacattttaaaccaataagtgaaagctggagagagaaagaaatgttaaaatatcatcttattttcttgaagtattttccatccaatcttgtacagtcaaaatgagcatttaagtgtgaggaaaaaaacgctgaagatctcagataagactagagagtgtcaggtttcttgattagaagaatttatcatcaaaggcaaaagagaaaagatggtaaagattttttaaaaaacaaaaaatctccaagggatcacaaattagtggtgcaaaatcaagacaacaaaagtaggtgttattcttgttcatttaaactatagttttctctgtttcatgtgtgttttttaaaaccacttaattgtatttgacattgaaaatgtaatagggccttttgttttcaaccagtttactaattgcaaaatatgtcaggaatcaaaagggcaggaggtgttggtatatttttttaaaatatataactcctttttaatttt

SEQ ID NO: 136693 - DNA, 1038 bp, Homo sapiens
cacacaatacattatcaaaacaaactattatgaaggaggtaatttcagtgttctattcaacctgcagcatgtgtgcagtcagggagatgtgtaccagcaattactgctgaatctaaaaaactaaacaaataacttaatcgctgtcgtcctccttttttttcccccaggaagcagtaatcaggattcgctaaaaataactggtgtataatagtataatgatgatgcatattgtagaatagctaataagaaataaaataggcttctaggtgtatactttttaaagtaggttcaggtaaagaaagagagacttgtggaaggaatgcgcccacaaaaaagacaatagccctgaccgataaattgctccatgtgggtttgttcctgctaccgaatatttatagataccatttgtaatggccaaagaagtataaaatacactaaatttagtaacacattttataagggaatgagcagaaaggtgaagtgtgagctctaataactgaattttagttactcctgcaccaaattgggttggctataatttttcatcattaagacccagctaggatccttggatctaatacttggttactcaaagagattccctttgaaaatagtgctatttccatatccagttgtagatagtggttttccttaatttcttatttacatgatagtctgtgtgtgccacctggccttgctgcatggattgtacaaatgacttggctgttgtggtcattcataaattcattcattcaaccaacttggcacacagtgggtgttcagtgttggttaaattacatgtcattccaaggcagcaagggagaaactggtaacatgtttgtcatttgatcttctcatttgaaaagttctgagggcttagttgtttcaccttggtaggacccctcaaagaaaacaccaaagcttgagctcattgttccccagctcgcaagtttcccaagtgtctaaccccttgggaagatggaaagaaagtttgtaggtcagttgatttaaaatagatagaagtgcatttgaatgtga

SEQ ID NO: 136694 - DNA, 1633 bp, Homo sapiens
ggcaatggattgtcaccacaaatcataaaacggggctcatggtatagcaatatgtattaaacagttttcagaatttgtttaacttcctgctagcatggacagggcccagttaggaagcacatagcacttttcccaattaacagtgcaaattgtcatgagtgcataggaatttgcagtttgacaaaatcaggtttttgacagcaggggtaatcagtctgcagcttcgcaagtagtaatctatgatcgaagtggcaggatttattctgaattatgaaaggtgtatatgctatataagagggacaaaccattagtatgattctgcccttcttacccactttctttaaaaaatgctgcttgatttggaagttgaaagtaggggatacactctgctgagagtgatccccatcgcttccccctccccagtagtagtattcatttattttctgttatattacagtattctgacaagtccctgtacacccagctgtgcttttaccggtacatttttgatgcggagtgtgcactggagaaacttactaccgatcatgagaaaggtacgttaaaatactgtaattacctttgagtttaaagtggaaatttgcattataaaagccagacctactgtgtcaggctgttcatgcagcatcacattgctgtctcagaagcaggccgtgggggcctatgtgaacacagggatcccctgcatgaggggcggtggcataggaatccccagctttggcccccacagcctgtttcacattgtcctctattaaagcaaggctttgggggaggaacagtacaaaaaggactctttaaatgctatattttgaaaatgctattttctacagagtttagtaactgtaataaagtaagcataggcaacgtgatcattgggcctacaaaaaccagatattactgcaaaaaaatagacttggagtgtgtctctgctgttcgctaaaagcctgggttcgttttgagagagggatgaggtggagttcctttattgactccatcctaagagagtatataggcgcctcagcccgtatgatcagctgttgcatggaaccctcagcactcggcgtttccttatacaagacttgcgggcactgtgggacttaatgggtctgggaaaagctttgttacataacttaaagtatttgaaaatgtcatgacaactgcatgtttgttttttttttctcctacctgaaaatcacattgacaacttttctattacctgtgaaaaataaaaaaggcagatttatacatttttcttattagttacctacagagtgtttatgttgtttgtcagcgagtatcaattcaacgttttgttggtcggtactagggctggaaacaaccgcaatgacattaaaaacctacaactattgctagatttccccgcataagaatccccatgctgcccttgatttgttctcactgtttttaattccagtcataattgacttgtttttccatccacaagataggctagaaattattttttaaatgccttgacttatttggttttgctgtccttggagagagagcattttacaactgatggagaagctggttcagatattagtatcttatctctagatgttcaacaaggacttgagctatctccacagca

SEQ ID NO: 136695 - DNA, 1951 bp, Homo sapiens
ggtgggatataaaccaaaacttgggggcacacttaccaagagcagaggtttcctaacacatgacatctgataagccctctcctaagagtcacctggggcatattaaaaacccaaatccatagatcctatgtccacagattctaattcagaagatgttgggggtagagcttaggaagctataattttttgaaaattcccccagataattctgccgtgcagccaagtttgagaacccctctcctgggcactctaaagacatagttggatggtttctaaataaaagacaattgaatgcaaggtcatagttcatagggaacaatgggggaacaagaatattcttatagtagagaggagaacaattataggggaaaacaccataagtttaaaatagtataacaaataaaattgacttctcactttataagttggagtgaattctcttttgatttgctattcaagggagacctgctattaaaatgagtttaaaatctaagggaaccggagggcaaatatatttattcaatttggaccatggccagaacaccagtagatgttaacatcaaaagtcctgtgaaaaatgacagtcgttatacacagttatattattgagaatggagtctaagtgtcttctgtcaacaagtgccccgtaactggtgtgtgaagtatttactgtagactctcctttactgtcagtacctagcaacatttccttcactaagattgttttaccatttccatcataaagcccatattttaagggttgtaactggatggtggttttaatttttgtttgaaacttggcaatttgacttagaaaaacatgtacaaattatttgaaagaggtttatttttatggggaaaagtagctcttgtcaaagctttttctctgctttgctttcaaacgagagtttacagaccattagtccataatgtggattaaccccatttgatattttttccttcctttaaaatggtaaaggactgttattcacgttggtgaagtgtttactgcatatttgctgtaactgcattacatttttaaaatcttatttctgtgggactttggcattattattgtaactgctccagaatgtacacagatggcataatggattcaaaggcggttttacaggaacataggggcaatctatgaagtaaaaatccatttccaggatggccgcatgaaatggtcccatttggctgcctcatcccgtggtgccttggcctgagtaggggtaagtgaacagttcaggggaaacctgaatcagttcaaatctaaatctccttaaaaatgcaggaagaaaaaagtctcttagttttctcaactgaacctttgttgttgtttattcagcaacagtaaaaacaatttgtttatatatagttcctattaggtgttgagtgacattcctcatgtcagaggaacaaaggtggatggccaacactccctgccctggaggagcttagagtctgttgaggaaagacagattcagcaacaactaagtgtggtatggcctgagtgtcaccaccaatagggtgaaattattttggaagcaaagagagggagccactaactgctttttcacttcagtgtttgatctttctttagttctagaaagaaacttttttttctgtttctgttctcatttagtagatgcttctctcctcatattctgtgtcagctattaatagtaagatggtgtattcatttgctaggactgctataacaaagtaccatggatggggtggcttaactatatttcctcacatttctggaggctagaagtctaagagcaaggtgtcagcaaggttggtctctccccaactttttttttgagacggagtctcgctctgtcacccagactcgaatgcagtggtgcgatcttggctcactgcaacctctgcctcctgggttcaagcaattttcctgcctcagcctcctgagtagctggga

SEQ ID NO: 136696 - DNA, 1062 bp, Homo sapiens
tgtttcctaacatgccacccagaagaactaggctgccccttttaaggtacttcatagtttcctattgtcctttcacgtgtgtaacacgagttctcacagtactcctgtgaggcagcagtggattgtgctcattatattgatgaagaaattaaagttactaaagttccttgacatttgcagatttaacgcttgtcgcttgaactctttgcaagtgatactgaaggtaggtaacatgttagtgtgtgttattttgctgatgccagatttaaattgaactgaaagaatatccagtcacttaactaatgagcaagccaagcctactgctcctcacccacactgccacggggtcctgttctgtgttccccatcagctaagtagttacactcatgaagtgctaatagttatattactttgtggaaaatggtctccaaaacaaagacaacagctagtactgaaaagggtcttaaaaggtagtattttttaagccagaaaataagagttttatagaagaaattatatgctttagtgtatatgggaatgtggagattttggaaagtctcaagatgggtcccatttcagtgttaaggatttccgctatatttcctgaactgttaaagtgaaagcaggaaagtttcatcatgaaagtagcaaagagcccctgtggtcctctctaagctagttgacatccttagaatttacttggttaaatccttaacaaaatattaaaaagaagactgtgtcagagagcacctgtctggtccttttcttcttattgccactttttgaagcccactggttgtgttctgttttttggtttttttttgagacggagtctcactctgtcgcccaggctagagtgcagtggtgtgatcttggctcactacaagctctgcctcctgggttcacgccattctcctgcctcagcctcccgagtagctgggactacaggcatctgccaccacgcccggctaattttttgtgtttttagtagagatggggtttcaccgcgttagtcaggatggtcttgatctcctgaccttgtgatccacccgcctcggcctc

SEQ ID NO: 136697 - DNA, 1109 bp, Homo sapiens
actagaatttgttatagttatctctaggtggattatagcttttctttttctttataattttatatattttctacattatgtactctgagcatgtactgctctcataacatgaaaaaaattataagcactaaaatgttatagagaatgttactcaacttgaagtaattacccaaataatttcacaattgagggaaaaaataacatagaaatgaacccaaaccagctttttttctccgtgtatttttttccaagtcaaacctaaggccttgttactccaagtgtgatcagtaacccagcagcataggcatcacgtggaagcttgttagaaatgcacaatatcagacccacccctgacctactgcatcagcatctgcattttaacaagatcctcaggtgattcctccgcgtgttaaagtttcagaagcactgatctaagacactctcccttaataactaaagcctacttctattttattcattcattgattagggccgtccttttggtaaaactttaaaacaacaactatgcaggctacagaaggactacccaagttttaaggtagaattcatatcacaacctggccttttgaaatatgtttttattaagctaaaaatgcagtggtctgacaagggctaagagaggggaaaaaagccaaaaagcatgagttcttccactttgtttcttcgtaactagaaggaacaagggagaagtaaattaggattttcaaaatagctttcagctttttaagattagtggcttataaaagaaagaactaaggccgggcacagtggctcacgcctgtaatcccagcactttgggagcactttggcaggtggatcacctgaggccaggagtttgagaccagcctgatcaacatggtgaaacctccgtctctattaaaagtaaaaaaattagccaggcatggtggcacgtgcctgtaatcccagctacttgggaggctgaggcaggagaatcgcttgaaccctggaggtggaggttgcagtgagccgagatcgcaccatagcactccagcctgggccacagagtgagactccatctcaataaaaaaagaactggagtgtagttctacacccacttcgtgtaaggg

SEQ ID NO: 136698 - DNA, 1069 bp, Homo sapiens
cagcaacacaagggctctgccatgtctaggtgataatgtggttgatggtctgcatttgcaaagcatattgtcattttttagtaggaaaaatactaaagattgataagtttttttatgtacttcttaaaaatatgcttctatcaccaatgatgaaaaaaatgaaacaattcgcaagcagttaagccataatgtgagctaatcactttattttgaagaaaagtatttttaaacagttgagctagtgaatttacttttaaaatgtattgtgcttacacagtagatggttttatttccatgatgttttttactacataattatacatcttaattacgtaattactatcataattattatgtaattgcatgtacttccactaattacaaaatcaggaagtgtaattatctagtaaaaactttatgaaatttcatgcactaaaagttagttaaaaggctattccagtggtctagtggaaggctttccatggttagtcttcttagtcataactttagtttagagctggaactcataggccaggacaaggataagtgccaacagaccaacactaaactgagtattgtggtatgggtaagatagactttgtcccttgtgatttaaaaagtcagagagcattttaatttttttgtgactatggagtgtggtaagaataatatctaaatgtttgaggtaggtaccacaaaaactgtcaatggaaagggcagttctttcttaggaaggaattgattaatagaatcaacaaggcatttaggttacacaacagcaaggtcttctataattctgtaatgtgaatggcttatttaatagctatctctgcctttaaaagcaataatgatattcagttttctgtttcttcagtttggagaaggtgtttttccagtttgtgtttatatttactaagatatgagcaaacgtatcaagagagcatactcctttctactacttgatgtcaaaagcagcttttgagacataaacataagcgcacaaacatgtaacatcagaccctaaataaagacaaaaggtttaattcaataaagctatgatgcctttacc

SEQ ID NO: 136699 - DNA, 1034 bp, Homo sapiens
cctacttaaaaaaaatatctctatagtgcatggtgcgccaggttaaccactcctgtttgttagtctgtatacagctcaacaaataagcggcaaagcttttcatgggtatatagtggctttccattgaggttttcactctttgaaggaggtcatttataccaatgagatctgtagatgcaaattgctttccctatatgtgaggggtcattcctttcacagccagcttgctcatctcttttataaaggttttgttatttttgtactgctcccaaaggaatgatgagaattatgcccccccaccccctgtctaacttagcatccaaatcttttccctccagctctgtgaaacttttgtgtgttgatctttggaaacaaaacaagctgttggcagcagcctttaactctgaatcaggaaacttttttccttctttcaacctgaaatatcatctctttagatttgcctttctcgcctaattctaaggaaatatctttttcattgcagcagagtgtcactgtaacatgctacaggcatgtgggaattcctggaagcagtgtcctcaaaatgccatttttagtttggctcaaatgatgtaagctctcacgaactagaggaatagaaatgaagggatcgatttaagggttagctatgaaaacctagcttctgatctcattactgaagtaaagggaaagataatatttgtctttgcctaggctctaaggaatcatacaaacattcaacggttctagtttgttgtgttcaggagttttaggaaggaggagcttcaggcataccatgtgaatgctctgtaaaatgtttgttgttttgttccttccttctgctagcatttgttgaacaccaagggcattggcctgggtttctcaaaagcaatatagggtagtgattaaaaactcagtctctggagtgagagtgccaggtgcaaattttgactttccaccccttactagataagtaaccttgaagtacatctataaaacaggaaaaaaatagcacctacctcaaagggttctaaatt

SEQ ID NO: 136700 - DNA, 1080 bp, Homo sapiens
tgcattggcgcaatcacggctcactgcagccttgactccccaggttcaggtgaccctcccacttaagcctcccaagtagctgtgactacaggcatgtgccaccatgcctggctaattttttgtattttttttttagagacaaggttttgccatgttgctcaagttggtctgcaactcctgaactgaagagatccgcctgccttggcctcccaaagtgttgggattacaggcaggagccaccgcatccagccacctgcagatttttctagtgattcacagttttagctctctgctccagatgtgttatttggttggctagcctttaatatatcttgaaatgtctggaggccaactccagaaagctctcgtgaaggtgggaaggtgaagaaccgctaagagactttcagactggttttctcttatcacccatgtgactttcagttgagcagcatgcaggcacacgtattaatggcaatgtaggtttgtaaacaatactactaataggctggggctgggggagaaaaatagcccacaagaaatctggagatacctgtcttgagtgtaacctgcaagatatactctaacagagtaatcattgcacgatatcattgtgggagactgagcgagttagaaaatctattcctggtttgtcgctgactcactttgtggcatgggcaaaccattattactctttgatttagttgttttatttgttcgaaaaagggaaaataacatgtgtttaaaaagcactctgaaattcctctgaaaggaggtctataagtgcaaagtactattgttgtttttattattattattagtgttctagtatggtttagttttatgccatgtaggtcacagatgtttcaattcttccgactgatgaattacaaaacacttccatctcattctgttttatagcgttgataacagtttagcacatctttgttttaaccccagttaaagtatatgtccaaaatagacctcattaataaaatacaattactaaattaaatatatctatgctactttctgtttttttttttcctccttaaaaaggtggttaccaacaactactaaata

SEQ ID NO: 136701 - DNA, 1012 bp, Homo sapiens
accaaatgtgcacctgctggaagcactctgtgtattttctctagaaattatgtacggaggtctagaggaaaatgctaaagccttaaaaattacatattaattagggagattctgaagagcatcacaactttcaaaggtgactgggataatgcagtcttattcccatatcagcatgttgtttcttgtgtgctctgctaagcagctgctagagtcctaaagacctctagtatgacagtgagtacatttgtgagttgtgttgccccaaattatagtagggatggggataaagaaatatgtttgtatacaaattcttgctagatactaataaccagtgctggagaaccttccacattagttccaggaagtgcactgtaaagacctgttggttttagttttctcttggtacatttgaaatatgtcactggcttttaaaattaaatatgctttttatgcttttaagtattgtctcttttgaacttttgagtgtgagggttgaatttttagtgagaaaagaattttgtttggatttgtttttaattagtattttttaaaaaatatgttaagggcttctggtggtggtggaaaatattaattcctttaaaaatctggctgtgttgctagatccacatttgcttttctgtgtttttgtgaacaactgatcaaattagattcgtcactcttggcttacggtgatttgaaattgaaatggaatatattaaagcagccaaccacactgattacattgcaagcctcatttaatttcatacattcacactttacagtgaaaggcagcttttttaatgcatgattgtgactgtaccttgagcaactccaaaggtcatctgtaatgggtgcataatttgttagtgttagatatctgatttatggtaggtgtttctcagcctgatttgtactagtagtaaatatggtgagcatcaaagtaaaatctgtaagaagtttagcctgtcacatttggtggtattgtcttattcttcactggtcagtggaccac

SEQ ID NO: 136702 - DNA, 1593 bp, Homo sapiens
aagtttgttttaatgatttagaaaatatcctagtattcattattataaagtgtttattttgcagagttttcatttgaaaaactagcaactctgccttaccatagaaatgcatcgttcttcaagtttttgaaaacattttggttctacatattagactttaactcttgaatgctagccctgcctagtaataaaacatgttttttttccagtgccacttaatggcaagtctcttcaagtttctcaacagtcaactgctgtaaatgtacctgaggtacattctcattttctagagggggaacaggaaaaattccactgccaccatccacccctgtcatccaaaagcaagtttattagtgaacttcaagtcagcattctaaccctactatctggtctctcttttttacttttttatccttttgggtttatcaagtccttattttaagattaacatgaagaatacttaatgttgtaaaggctacatggatggttttgacatcagagtgacaaaatatgttttaaaaggataacaatatctgagtgcatgtttgtaagagcagctagataacatggcaaactctgacagcaatcatttcttcactcctgccccatttttcctaagcaaatacacttagggtgctcttcagtggtagtgtatataaaggatggtctccaaaaagagattggcagctttaatttgtttgatatgtgcaatcatggtccgtgttaaattcaaaatgcttgtccaatcaaggattcaatatagaaaagaggcagtaacaagcatgctgcacactgtaataaagaaatctgttgattgaaaacagtttgtatattttggaaatgatagggaatgtaattggtaagaaagaaaaggatagggcttcataaataatgggaaatagagcatattttttactgataatactaactcaatttaataacattttggtgttgaatttttgtgtgccagaaaataagaaagatgggttcttttttgttactctaaatgtcatgattcatgggttgaccttttttgtttttgtgtccatcgagagcagctttgacaggttgaatcaggcaatagtgggtgatacgttccggttctttgagaactttcacagaacatttttcttttgttctctcatccaagaagacgaaacatatttttaactgttttttttttttttaggtacaagtactacatgaatgcatttctgtggtaaaagatctaaacaatagagaaatatacagagcaaagtctgtatacttttcgtacatagatgtctgggtagagatttgtatgctgattgtttgaggggctgtagtattaagaaattgaggctgggcgcagtggctcacgcttgtaatcccagcactttgggaggctgaggtgggcagatggcttgagctcaggagttcgagaccagcctgggtaacatggcgaaacccattttatacaaaatttagccagttgcagtcgtgcatgcctgtagtcccagctacttgtgggactgcaacaggaggatcgcttgaacctgggaggttgaggccatagtgaaccgagactgcaccactgcactccagcctggggga

SEQ ID NO: 136703 - DNA, 1629 bp, Homo sapiens
catgttaagaaacatcttctggctgggtgcagtggctcatgcctataatcacagcactttgggaggccaaggcttgcagattgcctgagttcaggagttcgagaccagccatggccaacatggtgaaaccccgtctctactaaaaatacaaaaaattagctgggtgtggtggcacttgcctgtaatcctagctactacttgggaggctgaggcaggagaatcttgaacttgaacccaggaggcggggtttgcagtgagctgagatagcgccactgcactccagcctgggtgacaagagcaaaactgtctcaaaaaaaaagaaaaggcaagaaagaaaaagaaagagagagagagaaagaaaggaaaagaaaaaagaaagtcctccaatgtttgtgcctaggcctgaacctcctagattgtctccactggcttcaggctgtgtccactctaaaacatctctagccttcagggtcctatcttggcctttgtcatggcatgtctccagagggttctccctcttcccagggttacctgagtatacagcctgcagtaacctgctctttctctaggtgcttccattcacctgaaatgtagttattctccaaaggcaggctctctttggttattctgaactgggctctccataatccctcccctcccaccatggtcgggagtcttcctgggagccactgactttctttggcgaccatctacattgtattggttgctgcggacaaccaaaagcaaacctgtatgtactgttttcctagttgggtacccacccccacacaagcttccctttcttgggggatgtgtctagttctcagcccattttcagaacagaaatgtcgtgaatttagtatttgaccagttttttttttccccctaggcccagattctcttgagtagctcattgttcatacttgttttctttttcccattaaatcacctacccaggagagtattttgttttctaaaaaatagtcacttatcaattaaatgacaggaaaaaaaaaatccaccccagagaggagacctagtatttattggacacatgggaaaaatgagcctttctaacagagggatggtcatcttgtacaagtacactgagggcagctgttctcaaccaggatgattttgcctccccacccgagggaacatttgacaatgtctggagacatttcattgtcacaagttggggagaagcaggagggaggctgctgctggcgtctagtgggtagaggccaaggctgctactaaacttctacagtggacacaagatagacccacaaataatgattggcaccaaatgttagtaggttaagatagcaaagacttggaatcaacccaaatgcccatcaataatagactggataaagaaaatgtgacacatatacaccatggaataccatgcagccataaaaaaagaatgagttcatgtactttgcagggacatggatgaagctggaaaccatcatcctcagcaaactaacacaggaacagaaaaccaaacactgcatgttctcactcataagtgggagttgaacagtgagaacacatggtcacaggaatgggaacatcacacaccggggcatgttggggggtggggggcaaggggagagagagcat

SEQ ID NO: 136704 - DNA, 1083 bp, Homo sapiens
cacccggcccttgggtggctactttcatagaaaggcagctatgctatattgatatggaacagaggcttatttattaaataaattcactttagcaataataaactcattacatgttaacatagaaaccttttatgaaaatagctatatctttcaaaacaaaaaaaaaaaatggtgagaagagcagcattgttttaaattttggcaaatctctttattctctggcttaatagaaagccagcctgatttctcatctgcttctgcattcaatctgtggtaacatcacacatcatgtagcctctggaaactccactgtagacccatgagagaatgagagtggaaaaagccagtaatgtcttcgtatgatttcgaaaaaagttttgaccttgaagacccctaaaagggtcactccagatgtcccctggcccacacattgtaaactgctgctctagaactgtgagatctgtgaagcagaatggggaaaaagtcacatgtttaatttcactactctttaactagaatttagcgcacccttcaaatatggatggaggcctcagaatacagtggtattagcagtatctgactttgttatcagcagtagacgtcaaggatgttttctgatcacattacagttgttgcagatatctaaaatatcacttagcattgctttgaaattttactcaccacagtgctagatcttgtctataatgccttaataagaaagtacatacactactataccacaggtgtgttctttaataccgacaagtatatttcagtgtaattgctttactttgcactcctatgttgttttatttgttttacctatttaaaaacattctgagataggagctgtgggctttagttgactgccaaaggagtcctcggtacaaaaaaccttcagaagccttactctagaaagttacacagccagaaaggcatgccttggccattttgggaaagcagtacagccccaaagcaagctcaaatcggagtgtttgaagaaagcaagttccattgccactgttgtcggcctgtgtcctgcccacctctgtatgcacagccacaacttcaagtaattacaat

SEQ ID NO: 136705 - DNA, 1088 bp, Homo sapiens
ttatcagaagttcatatgtctggttacaaaaagcagtccctttccttcccatttcccagtcttcaaacacaaccacttgggactccttccactgctgttttcagtattcacctccttatctctaaataataggcacagagtgcatctcccagtaatctcctacaatgagaaaagaggccttaacacctccagccatggtcctcaggcagttagagcatgattccggcagactgattgattgataccaatagccactattgatacataccaattcttcctctgcttttctaaacctgctcttaaatcagttcacacataactggtatctgagctgatgaccctcgcggcctgatgcacagctgttatcctgggaatcttcctttaccatcatctgggtattgccttcacatatcacttatttcagagtccctgtgccctacagtctgtatctttgtttactgtccctcttttggggagaggtaaaacatctcttccagtagcttcctgagaaagagtacttggcagatgaagcttttgagacctttcttgtcttaaaatgtccttaattcaccctcatacttaattgatagttagatacagaattctaggctggaactcagtgttcctcataattttgaaaacattgttctactgtcatcttttttagtgttgcttttgaaaagttgaaagcttttctgagtcctaatcctttatatatttgacctgtgtcctttttttttctccttccttgttagacacttggaggatttcctttgcacccagtgcatgggcacattcatgatggtgtgttttggtctggggcagttttcatttatggtgctgggtacttggtgggctctttccatttggaaagtcaagccctccagttctgggaagttttcttgaatttcttctttgatttccttcctaccatgtccaattatgttttaatttctaagaactagaattttcttgtttttgcagtgttcctgttctcatggatgtgatctgtcaataacttgagatctcttcttgtgtgctggtcagattccccagaatagatccagtctcctccctgaagaggatta

SEQ ID NO: 136706 - DNA, 3031 bp, Homo sapiens
taatggatcggttgtcataacttcaccaacttacagctctttttttccacataaaacttgccaaaatgccttcagactgaagggagaaaaaatttaactgtttccttcaaattaaattttattagcagagaactagtattaagatcattgcatgaagaaaatgtaaattagccgcttactgtaaaatagtattagagaaggcaagtgataaacatgtctattcctctttttccctttattagtggttaataatcaataaatagcagcttaatgattaacattataaaagattacataagagttttagaagaatttagattttctttactaggtagtcatcttcatttttataaaactgacatcagtgttaagccatttttaccacaggttaaaatttgactgacctattctgttgctgactgagtcataccaggtcactgaaacctaaaataagtatgttgtaagcatcgcgtaacaattataacctatttagatccaagatccacttaagacatgttgacttcttttctgcatcactgagatggccgacacatccatcaataatgtgctgaagttctcattagctctctatacagggaaggatgccagcaaaatgtacagaagtaaattcactggaatctctggtcagaaattatgactgttctatatgtcagcccatgtgttgctaacagatttttttctttacaaaaatgtgttttgtggtttgatttgacccatggttcatctgaatccaggcaattacacttatattaagggttctactgtccactttctcctcatcttgagaaatgtcaaaaggcacatatcctgcatctgaaggaaacacaagaaacaaaaatggaaatgcctgaagagtgctttcacctgcattaatcaagggacagctgctgccattcccaaggcgctgccctgcagttggctgagcagacccacatgggcctgctgaattaagtctgaattaagagtcagactgcgagtgatgctgcctctgtgtttaggtgaaaaggccactttagcaagtgtaataaaatgtatagactcaggtgagactccaggggaaattttgccccttgagtttgggttggagaaatgacctccagatctctaatatcattcactgtggaggagatgtggaccatgtattttttccttttcttccctttataagatggtaatttccccttagggatttgggtttctctgttgtatgcattaatagggagatgggggagagagagagagagtcacaaattaaagtcattttatggtaagtgtctatgccttttcacctctatgcttcactttgtagaactcgtcaggaaaatcattcaggtgacgactatgcattttgatgttaacagatccgactcttaccgggtagacgaccagttaacaacatgaaataaggcagtgatggtttttgaaatgaaataatgtttgatgtaacctcgagtttctctctgaactctgaccacactgtagaaacccctaggaggaggtgagcagctctgtcaggcacagaattacacccagggaagaaaaattaattccaatactaagggagaaggctgtgttctcttgcatgatatttagcagcaagagcaaggagagggatgtttccttctttgtgtaatgtgcagtagttacaataaacacaagatttccaaatctcagaggactcttcttgacagttgcttgataacagcttttttcattccatagttttgacagtttgtgtgtgttgccatatctagtgtaaactaaaacatcactgtcattctgtttttcttttgtatgtggctttttttttttcatctttaggataatgaaaaagatgggcttttcacttgtagactagagtaaggcaagttgtgtgtggagattagcatgtgtttataagttttgaaagattcaagttgacagcagaacactgctttaaataatttttttctccatatcgcttcagtaaaagtacaagtgggatgtgtaagttttctcttaatcttttgataaatagcaaaccttaggcatctgtgtgggtacctatattatttatcggtggttattgaaaatgaatgactacaatgaacatctctagagctcctggctgtgtagcctttgataagtggtgagcatcctgtatcttactgttaccagggtcttgccctgccccacgtaggtgcttttcagtccctcgctatgcttcccttcacttgatggatcccctatcccacccacctctgtcaggtttatagctatgctacgttattggtttgtgtccaaaccaacaggatgatattgttgttgtggttgatgatttatctggagtaactctagaaactacattgcatctgcactgtttgagaggctgcagggcaggtgatgggccagaagcccaagtcaggatcagagcagtctttactcatcagatgtgaactctcagattccccaaagtcaggaagggatcccatacctgagagaccttcccccctccagccccaataacctttgatttgtagaagtctcagtgaggttattttgccatcaaaccaaatttgctgtagcatagcaaagctcccaatgccgtcatctggcatgttacagacaaattccaattacttttctacttcgagctattgttaaacactacaagctagctgacagtaaaattataaatacaggtgttgtcacactacactataatcagaattttaatttgaattttcatttgtaaagcctttttttcagatgaaaatgggaatagaattagttttattgacagtaaaaagacattttgaaagcttcctaaatcattacctgtatttagcaggaggaaaaattgtatatgtccatgtaaaaagaagagttttattatcacatatttactcattatatttggtggtaaataaaacggggaagacatgtttgacaaatgattgacggaactcactaggtttttgcttcatcagaacaatagacagacataaatatatattttgcttttgttttg

SEQ ID NO: 136707 - DNA, 1681 bp, Homo sapiens
tctcaagtccctcccctccctccactggctttgcttgtgaatgaaagggactcctactatgactaaggacagatggcagctgtatacgttgtatttgatgtattttggagtgagccatattttaaaattcagggccaatagatgggctattttgagagtggcactagcgccatcctttaagcctgctccatttcctccaaatttatttacattttaaaaattatataaataagctataatctgtgctcaaaataattgagttgtgatcttttaactgtattgcattaataataaaagcaactcagacttctgggctgcctttcttctaaagagtatgtgttcatttatctttatgttgtctctaatggatttttctcgtttatgttaatcatatctctagtattatcagattctgatcctaatgaaggcaggcacttttgtctgttttgtccattcctatgtcccagggcttagaatagtatctggcacgtagtaggcactcagtaaatatttgctgaatgaattaataattcatgtttctatgggtacatcgaattgtagtgtatttacttatttgtatgttttcctctccagctagaatgccaaactgtgctcctgaaatacagcaggcgtgctaaggcattttggaatcctttcttcatctctaccctatcccaaattgtacatgacacccagtcagtacttaataaatatttgtcaaataaacaagtagagaagcccaaacgcaatttatttgccagtgaaagatatggtcatttggtggtagagatgaggataggttaatggcccatcaatcagtattgttaagagtctccacgttcttagccttatgttaattcagagttctttcccaggtatcctattggttttctgggcttattgccaagcatattttagatccatattttccttcagtttacagtttaagagcattttaatttttgctaaagcttgcaaaaaaaggctctgataatgatgcagtcaatatcagtaaccatcccatttgctagtgccatctagatgaatccattgtgtagatcgtcctgtcttaatatgggagggagactgctgtgcatggtgggatggcctatagcagttagacctctctaagcaccatttgcctcttctgtggaattgtggtttagtcattctgtcgtgtcctctactacctgcctcccccaaaactccctgcttccgtctgcaaaatgaggacctagaggctgcttaacaaggccagaggcttcagagaattcagtgacttaatcaagaactgtactgtgtaagagacacactgctttccctttaaatcattgagtgtaagagacacaccgctttcccttttaatcattgagtcataaatgtgacatagctttaaatggatagcaacaatttgcaaatcaataagacccattttgtaattagctttggactaagcattaaaaagtatacattgaggattatggtagttaaaatgctgagcagtgtggggattcttccttggtagctgaaactgtgcataataaacatacagaaatgaggatggcgagtttcagttttaccacaaggttatgcatttatttgagaagaatctgagatgtgcaatacaacattccctaatatgctcatttcatcttctctgctatcattgaaccttcatcta

SEQ ID NO: 136708 - DNA, 1060 bp, Homo sapiens
ggaatagcagtccacatgaagagaacttggaaatgatccttgccccgttgagcactcaggagacagtgggactgacaccttgattgtagccttgtgagaaaccttgagccagagatgcccagctcagccatgcttggattcctgtcccacagaaaccgagaaatgtatgtattgtgtgttatgtttagccatcaaatcatggggtgatttgttacacagcaatggtccactaataaaccctttaaagtgcaatgcttatttaagcttctgtttctcataacctgtttgacagtgccttgcatgtagcaggttatccacagatacttgtttactgatccgcttacactaaatgtatagtcatatgtttcattattattttgccagaatactgatttggcttaatcaaaaatgttcatctttttctccacaaggtatgtaactcaccatcttgaggtatggcatctgtggatccatgatacccaagcaggaagggaatgttccctacccgcaaacaaatacggaacccaagaaaggctgagtgcccctggaatcgttgtaactttatccttccccagtgtgcagaagggaaagggtgttacgagaatcttgccttcatgtcaggatttaggaaggcacgacctcttttctacactctatccagaatgtgatggtgacctggaatggtaagggccccaccaagaagacctgtttatagcacagctgttaccttcaccatccaactgtggcctcgctttagttccagctgtttatattagtcaaaactgtccctaacaccacagcataggctgtgagaacaagaggctagtgagaagggaagatatccagaggattaagaagcaaccaagccatggcctatgttcttttgactttatccccaaaagaacaacagcttagctgatggtacagcctttggcccaagaaatgtaaaagccattccttcaggtgcctatttgcatatttctacaccctgagggcttttttcttctcccacctgtggtaaatgactgtgtacactggactgtatttactgcctatctgt

SEQ ID NO: 136709 - DNA, 1015 bp, Homo sapiens
ataaacttcccaggattcgacttgactctgtcccaaccccctaacccccctgagcaccactgacctgggactgatcatctccttgtctgtcatggaatattaattggacattaagatttttagattttttttttttttgagacagggtcttactctgttgcccaggctggagtgcggtggcacaatcacagctcactgcagcctctaccttctgggcccatctcccacctcagcctcccatgtagctgggaccacaggcatgcgccaccattcctagctaatgaagatactcagaatgcttccattttctcatgacttcatgtgtattaaaaagtagtgcttacatcaaatttcactgtagtcactatcccattggctttgattaaattacaagcttctgtgtagaatgccgtgaaaggtttttgcgaattgcagtaatagccatggggggtgggggtgggtgatgaacatgttttctgctggggtagtaactcagaactctaggcctttggtacagttgatccttaataagacttagtttcaggttggaaactgtttgttgaaggtcaacattttgttgctgctttttctgctcaaatgtagtatagaatcatgtggaggataaaattttgctagttgttcagcgtatccagaacagagttctggcagttaaggcgtacaatactcttgtatacctcaatgatggcgctttttaaacattagggtagttttaaaaaattgcaataaagtcattgtaattcatagaccatgctgtaatacagagatacgtgtaaaatacaatctgtgtacctgattgcaggtaacagagttaaatgtaccagcaatttcaaacacagtttgatatttcctataataaaatataatgtaaaaaattaaatatccaatatcaatggattctaaatggttttgatatttctttttgtcctttcccatgaagagtaatttatttccctttttaaagtgtgggcagaatgattactagcgcactgtaatg

SEQ ID NO: 136710 - DNA, 1034 bp, Homo sapiens
catgtagaaaggatcagagtaaataagctttatatacacgttcctcgaatgttattctcaagaaaagtttaaaaaggagattagctttgctgatgtattaagatgagtgatttctgggtgatacttcaagccattagagtatatttcagtgacgcacttgtgtgtaggaagagcatttcctccccgatctcgacaaaggttggctttgtggtgctggtggcggagacagcagttaccagggccagtggcatctctgtggacagggatgggatggctgcggatcttctctggctcttgcctaatggcatgttggaatcttttaacagttgttattgggcacctgacctgcagcacctgaggtgatggcgtcgttactgataggctgactctcaaaatcaaagcaggaaaaggaatcagggttttactggccacattaactggcctccaccagttaacacctgtattttcccttgagttctaaagtggtggatatagtattgacagaaacagggtaacagtttaatgtgaggcctaacgtgggtggcccaggtgcctaaagggggaagagaaaaaccaggaaggggtgactccttccccccaccagcccctgtccctgacgcagcctgtgacagctagtccagttctgtttcctagaagaccttccatatgttattgattaaattctctttggggaagcaagtgggagcttttatctgcatctctaactggcgtggaatggtgccttggccgtattgactggctatgggatatgctggcggtcacagttgtcttttaggaggaagagcaccgagtgacgctggttgtcattctaactctgctgtgtggcagcgtaaatagtcccctttctaaccaacctggtgggaaaagtcaatatcccatcagcagaggaggtaaacacatcaggagctatgtcctctcttttcctcccctgctccgtattaccgcagctctttaaatgtgctctccccagtcatcagatgcatttgtgtcattcacatgcacggggttgctgg

SEQ ID NO: 136711 - DNA, 1580 bp, Homo sapiens
tccaccccttttgggcattttaattctctataaaacctgtggttgttctttaaaggacaacttatgtaattcagaaaaggttgtggagagcaaatgcgaatgtatagccaagaaacaaaaatctggagtctgagttttcgttttccgggtgttttgtagacttcccgtgttgctgttgttggaggtttgctttctgtgagtggcgcgctctcccctccgtgtttccttcctgaccggttcctatcgggaggtgctgggcagccttgctgctcccaggccctttggcacaggccagcatcttatgggggcggaggcctcacctcaggatcagctgatgtctgaggcctgcaaatttctatgtgggagtagtgatgtagtggcagggggagtgggcagaagtgagcctctcctcaggtgcgggctgggggttctggctacctgggtttgcgtgtctacaactctgattacctgctgtgtaaccttgggtaagtgacttaacctcccagtttcctcagccatcaaatggggattgggggtggggggggcgcggggaaagcagcctctccagacaccttaccaggttcctgaacacagcgtcatcccccacgtgatcactctcttcacccaaaagatcagacctgagcatcacagccccactgctcctttaaaagaacaacatgtagggccgggcgcagtggctcacgcctggaatcccagcactttgggaggccaaggcaggagaatcacttgaacccgggaggcggaggttgcggtgagccgagatcgcgccactgcactccagactgggcaacaagagcaaacctctgtctcaaaaaaaaaaaaagaaagaaaaaaaacaacatgtagaagtagcaggctctgggaagggaaaggagaggggtcttttctctggctggtagcatcctgctcagaagggaaaggccagggatgaatgggttaaaggagcaggagtgccgcataccctgagttcacacagtgtggacaaagaagagcaaagaaatcttggccatggacagacaggtgccctcggggccgctcacctctcgcctctttcagcaaaggaaattttgtttagcagagggacttgggctggagggactagaaaatgcttactaggcccagctgatctggggagttggggctggaaggcaccagaggccatagctccctttgagactaggtgtttcctgccacgtccagacttcgcaagcagttgcatgcatgtgctcgcagcgccggtgaaagtggcgtctgcgagtagagctcaccttgtctgctgcacatgagggtgcacctgcagttcacatcagtagagggtggccctgtcccccagtgcactgagtcagctaggtgctgagaggcggacagacaggggaaaggaagaaaagctttcacagaggaatggtcggcgggggctgcatctgactggccccaggggtagaccagagataagatggtggagatacaaatggaatcagcatccccttctctggtggaatactgaatgttctttaaagaaactacctgagacttctaatctctctctctctctttttaga

SEQ ID NO: 136712 - DNA, 1060 bp, Homo sapiens
agccatccaggagtggctgtccttttcagtcttgtcttttatataggtagctgagggggaagatttagaagccttgcactcactaaatagattaaacagagcaggcttgtttgttgaattgctccaaagtccaacagacacacactgagcaggtgttttacactcacattccctttttgccccttaaatagaaagtgcaggtaaaggtttatacaacaagaaagcacattgaaaataatttgatactctaacaatccattaacatgtgtaggggttacggtgaggatcactgtgttgtattcagaaaaacggggagagggatgcttaattggccctggcgcttgctatttttttctcatttcttcacaataggaccgtctttggcagcagcaaaatgtatttcagtatggcagtctttcctctcttacattattggtaagattatactaacaaaatgtttccccttgtacaattatgctgtgtttttaaaaaacattgacctgtgtgtttttataaaagaaaaagtatgttgtgccttcttcttaagaataaagttttctaaagggaaagcagttgtggtgaatccttaccaggtgcaaagagttgactagagaggcagcaaggagtaaaatgtgagtagagccagttgctgtggcacacacctgtagtcctggctactcgggaggtggaggcaggaggatggcttgagcccaggagttcaaagcagactgggcaacatagtgaggcccccacctctaaatacatacacacgtacatacatatacatatacatatacatatacatatacatatacatacacacacacatatatatatatacacacacatatatatacacatatatatatatatgactagaggccatccccttttcaaacctcagcccagtttcttcatagccacctctatcagaacccagctcaggagtgcacagcatgatatttggtcgaatgttctgagaagcattcagaatttctgtgactttaggtcatttaagagatgaagtatggtttcttacgtgctttgctgacttagagag

SEQ ID NO: 136713 - DNA, 1131 bp, Homo sapiens
gagatttcatacctcagagtagacttctcatgattttttttagttctttctgagatttgcagctaaaatgtttctcacttttacttatgcctgaattccactgcatttgttataccttccatttatttcataaattagggtttaaccggctcatagatcaaataatgaaaaatgaaaattcaatttgcatcttcatttctaattccccttgttgctcttagatggttataaaagataaaaagaaagaatactgccattactccaccaccttcaaatcacaatttcaatttattacagtttgcaataatatactaaaatcttatttgcttgttacatggattttagaaaataactattgatactctattacataagaggaggtgataactatccttacagaatctctacctctcccacccccacttctacctttcattaagaatacttagttacagagcatataaatatgaaaattaatatatgccttgatattcaaaaataattgaatatatgagataatattgatgatggaggtagagggtgggaaaggtagggtgttttcttttttctctgagtatgtgagtggagggagggaggcacaaagcaaggaaggaaagatggaaggaagaaaggaagtaagggaggaagtagggaagtaaggaaaggaggaaataaggaaaggagggagggagggagaaaagaaagaagaaacttttatgtatcattataatagataatcttgtttctgtggctgatttctgccacagaccttcagtgacacccaagggagctgtggaattgaatacaagtgcctcttgtagagaactaagcagaggctgccactccatcctgtcattgctttagcagtgctccgccacctcaattctggcctctttggctatcagctcttgtttttcacaaccctgggaggtagtggcaagttcatgtgggctacagttgtaccaaaatgatccctgcaagagtgatgcatctagctccaactgccatgtttctgatcaattctcacttatgactttccaactgtaggtcttaaaagatacataaaaagtcctttaatgatacccaattctttactttaatatttgagcatctatcatgcacaaggaacgt

SEQ ID NO: 136714 - DNA, 1004 bp, Homo sapiens
taaagtaccctggaaaggttttggtttactgtagtctttaaaaatccctccacaagaacatttccaaatactcactttgtagcacatcagctgtcaaatgatttgtaacttgggtgcctatgtctgaccaaaagtatatttagagttgttccattttaaggctttaaaatggtttattaatagggcagtacttccagctactcaaaccttgatttttattccagccctgagtcttaaatctgggcaagcacggcttctcagacatggtatcttctaagggcagtgattaagaggcaggacctgggagactactctgttgttgcatgctctattctcccctccacactgtaaaatcctcgcggataggagcaggatttcttttttttcctaactcccatagcacacacagagtgtattgaagaatgttcagcccaacctctttgcaagcatctttattacaaaagatgaagggagggtggatgtaatcaaatatgtactttatattggaaagcaaccaagcctctctgtgcatgcactaccctcatacaatcgataataaattagcattttatttatactgtataatgccgttcttttcaggagtctgatttggaagccaactactgtttgtgttctccaaagtggtttttgatggagtgctaattatgtttcacctcaagagcaatgctgacgggggaccacaatcgccttattgtagtagatccagctgatgaatctccaaggatagcctcatgctatattctggggggcaagtaaatataaaaatacatttttgatcaagaaaatgataccatttacacaacagtagcaggattcagcctttgtaaaacagctgcatagctgcataactgtgacgtgattttttttttttttagtagagaaaaaaacatggaggaaaatatatatcaactcaggaccctagctgaatctggggtttagtagttcatggtgggggcaggggactatattttcaaataaatcta

SEQ ID NO: 136715 - DNA, 3859 bp, Homo sapiens
gctggacacactgtcccacagagtgcaaccaaatcactggaggaacgtctccctggacagccaggcaccttgtcttgggtgtttctcactattagaatcatcttcaaccagcgtcctttcaaaatgattgaagtgggaacaaaattttccaggcaacttgagttgggatagtttttataatgctccttttgtatcttttttccctggtgctggaatctctgattaagtccctgccccctgcctagcatttttgagggtgcatagatcagtatttggtgggataataatttgttcaaacctcacgtttcatgacgtagagacctcagctcaccccagtgtctattatatgttacctttttgcttataccattgttttccaaacttgcctgtgcataagaagtacttgtgtgtgtgtggttgggggtgggagggagtagataaaagtctttctaggctcctgccttatatattctgattcagtagctctggcccagggtctgcaaatctgcattcataataagtgtcgcagatgattcttaagattatttggaaaacagtcttcttattccttcagccagtgttactaatcatccactatgttcctcgtcctgttgggatataaaggtgagaggggctcagcttccagaaatttacattccattagtttcagtatcaacagtttcccttgactctgttttatatacttttaacacacacacacacacacacacacacacacacacacacattcttccttattcttgattgacttttcctaatcctctctcaatatgagtttaaccagctaagctgagtgtgtttgaaacacaaatgtacctatatttgggagaaaggtaatgcctattaagagtgtggcctctctttgctgtttatcctttgtatgtcccatatataaatttaaatacattatatatataggttcaaacttaaggagatataaaactgtggagtccatttgcattttctcttccctgaccttattttgaaggccagtttgtgtgtctctgtgtgggggggaaccacttgggtggggagaaggtggaggggtatattgtgaacacagagaaaagtaatgtggcatacacaagatgaagttttcacaagccatgaatctagacctagagaagcttcagatttctggtggagtttcatgcaagcctcttcctactttcatcgatggaattcaaacacaacaaaattgggtcttaagcctggatctcaagctgtagatagaaggggatgataatgtgtggactagagtaatcagaactggaatatggattaaaatggttgctttatttttgttcttatttatgagatttgatattcgcccataataggagtgcctctcgcttattaccattattatttttttaaagaacactggttctgctgctctgtgatgattggcatggtgcttttaaaatacttttctgttgaattttttaggaaaagggaaggaaaatgattgcaatcatcattaacatcatttaaaccaagtggtcaactgctaattacttgaatacaagttaaagaactttgcaacgatattatcatcatggaagatcaaaggaccttcaaaagcagcctcctcttattactttccttataaaaacttacatccacttaaactttcctgcatttatttctttcacttttacttcggtatcacactatactgcaaaaggtcatgtgttttctattacaaaagttattcttgaatcatggtacaattcgtgatgttttcatgtttactttttaaacttttaatgactataagaattttcaaaaacttcttactttaatatttttgaaaagagcctttttgaacactcattagaatcattcttttatttttttcaaaatcttccccaatacagaaatcatggtgcaatgagctaagtggccagtgttagctttcaaattattcgggcctctagactaatattggcctgcaggcaaataggtaaaatgaaactgtgcgtcaaagtttgtggctgtgaagtttaccaccattggctgaacgatcagtgtaatgatggaaagttcaaagaagaatggtaaaaacatttgtctcatggcaacacttcttgtttatcatggcttgtttctcataggtaaagtgcccacctcttgaaatatcatgaacttcttcatatttgcatagaaagtgaactggagtgatgattcattaaaccgtattctactgtcatattaaattgtgtgcgtttgttggctcatggccagtgtatttgcaaacgtgtgcatagaaacatagtaaatattaagtaagatcacatgatgtttcattcttggacacgttgcttctgaaaacgtagactggtttggccttttacccttttaaccgggaagctttgggtcttgtttaattgggatgaaacagaaatggctatttttaaaaagctagcaaaggactctgtggtgagctgttttataacaaagagatttttctccctccagacgtgccgggcctgcagtgcgtgaagtacattcagggactccagtggggaactcagcaaatactcagtgaacacaccaggatgacgcaccaagggccccatgacagattcatcgaacttaatagtacccttttcctgctgagattcatcaatgccaatgtcattgctgaactgttcttcaggcccatcatcggcacagtcagcatggatgatatgatgctggaaatgctctgtacaaagatataaagtcatgtgggccacacaagtgcagtagtgcagttcaccatgagggaagaataaagagctgtgggcaaaagagtgtaaaatattttaaaataaactttcttaatatttttacatgcagagtatttttgtattcaattaaagaaataattttattccagacagtcacaaatttctctgttccatagttaaagaagacatttgccaacaggtagcatagctctgtacatcttttaaaaaaaaaatagcagggtactagtataataagctattttcacaagtgtagcaatttcatggaacctgctcaaatcaaatttgtacatattgttataataaattttaaggtcttaactattaacttgattgaaaaaagcttcagcagggtttaagtaaggcctcaaaaactattaaaacctagccaacataagcaaaaagtatctttggaagtaacaacatgacattgaatgtaattatgtgccagtatcagtgggaggtcactttgctctatcttcatttccacttccctcagctgtatggaagactgcgtttgcatccaactggagtcaagaagcaatctgtaattataaagacatgcagaagtgaaagaggagattttctgttttattgggggatctttttggtacacagttatggatttaaagatccacaaggaacatacattctataatgaggggttatagttccagaaagctcaacatcattataaaaccactaattacacttcatcttttagatacattacgtttgtaactggtatattgaacaacatggcatgaaatcataaagcaactttattgttatctcctgctgcccctttaattataatccatagaactaatttttctttgtgtccagataaaatcaaggctactatatgtctatttgtttatgggcaataaattgcctgttattaatgagtgtatctagtctagggtaataacccattgcaggaagtcttaaactttctttcgtgcagatccctttggcagtctattgaatcctatggacattttctcaaaatcaggctctcagaggaatgcagtagggcggaagcaagcgtcatgatagtcacagcacacacacacacacacaca

SEQ ID NO: 136716 - DNA, 1578 bp, Homo sapiens
catgctgacgagcgcaaagcaaacgtacgcggcaccgaaggcgcccgaggcgacgctgggtccgtgctggggctgttcgtgcggctctgatcccggggtgggcagagcggggcttccgggtgggcggcccgtggcactcctgtaccgctgctgcttttgtggtgaagaccacccgcggcagggcagcatcctctacagcttgctcactagctcaaagcaaacgcacgtggctccggcagcgcccgaggcacggccagggggcgcgtggtgggaccgctcctacttcgcgcagaggccagggggtaaagaggcgctaccaggcgggcgggccacggcgcttctgtaccgctgctgcttttgcggtgaagaccacccgcagcagggcagcaccctctactgcgtgcccacgagcacaaatcaagcgcaggcggctccggaggagcggccgagggccccctggtgggacacctcctctggtgcgctgcggccggtggcgctcaagagtccacaggtggtctgcgaggcagcctcagcgggcctgttgaagacgctgcgcttcgtcaagtacttgccctgcttccaggtgctgcccctggaccagcagctggtgctggtgcgcaactgctgggcgtccctgctcatgcttgagctggcccaggaccgcttgcagttcgagactgtggaagtctcggagcccagcatgctgcagaagatcctcaccaccaggcggcgggagaccgggggcaacgagccactgcccgtgcccacgctgcagcaccatttggcaccgccggcggaggccaggaaggtgccctccgcctcccaggtccaagccatcaagtgctttctttccaaatgctggagtctgaacatcagtaccaaggagtacgcctacctcaaggggaccgtgctctttaacccgggtaagggtactggccttaggcgccggcttttcccagctcacaaaagcatcgggcagtgcctatctaggggcgcgggcagtaacgagttttcagtgatcaggagagtgtcggggcaaaggtgaagaaatcgtgactaactcagcagagttggggtggggagctccaggaaccacttctgctgggtgggctgctatcagaaactcagccaagaggaggggagttgtttgtttaggtttgtacttggctctctacacatttcttaccatagaaaagtttgtgccttcatgggaaatggttattctttcttctttagctttcttttaagtccagagcatatctttttctaaaaaaagtttttgctcactgaagattctgcaacatcgatttctgaaaccccattctgaaatttactagaaccttttttggggggaggaaatctattaaggctagcaaaaaaggaaacatttgttaaagggtcccatagagagactattccctagggacacacaagacactagatgtagtgtttcatgggcctgcctctgaatggttatttgtatggtcctaagcatctggactatcccttcctccaaatctctgtgaataatatcaggttggcaaagggatagggaaaaaagacacattagggactgag

SEQ ID NO: 136717 - DNA, 1045 bp, Homo sapiens
caggagaatcacttggacccgggaggcggaggttgcagtgagcagagatcacaccactgcactccagcctgggcaatccagcctagccaacagagcgagactctgtctcaaaaaaataaaaataaataaaaaataaataaaagtaattgaaatgaatgcctgctgataaaagcccatgctttcaatggatatttgactaacttggcaagttgatgtaaatatttaatgattatttagctcttcactttaccgcaaatcatgttttcctgtgttatttagtatgtatatatctgtacatatatacacatatgtgtatatttatacataggcattatacatacaatgtatatattttttcaaagttctgtcagagctggcacttgactaaaaactgcatttgtgctttgatcctgacatatctttttttgtctaaagtgagaagctttcagtctaattttggtttgaatcttatttaatgacttaccctggtttgagctgccaagcatagttccactgtctcttgcactgtttatcttttgatcacccagggcaggtttcactttgtcttatattcatagaaatgtttatagagtaatcctgaatcataagaaagtttgcttaactggatttgattaatacataatatacacgatcatcatcttcccaacttaagaaagaccattaagacatgtgccaactaactgtgggttgatgtttaaagccatattcaagaattgcccacacaaatgcctgcagggaccaggcaggtagaagggggaaggcagactagagagatatccaggtcaaggggacagctagtagctgccaagcaggaacacaagcccagtgctgccagatcgtcagattaaaagcaggtagtctagagttttcaatgaaatctttcaattcttaaatgttggcaattagtttataaagcactgtgggggccaaaccaagcatggcagatgttctcaagtttatacagcctttgctcaatatgaaaatgggtaaaatatttcataactttgtaggcttcctttaggag

SEQ ID NO: 136718 - DNA, 1019 bp, Homo sapiens
agctgatgtgggcagggctggagctcgatgtgccccagctctctgtgcttccggggtctgtgtgtgctctttgcctctacatcacaccaagcatgacgttgtcaactacctttctggcccacacaaaagtctgagaacagattttttttttttctttcttctttttttttttttttttccgagacggagtctcgctctgttaccaggctggagtgcagtggcgtgatctcggctcactgcaccctccgcctcctgggttcaatcgattctcctgcctcagcctcctgagtagctgggattacaggtgcgtgccaccatgcctggcaaattttttgtgtttttagtagggacggggtttcactaggttggtcaggatggtcttgatctcttgacctcgtgatccgcccacctcggcctcccaaagtgctgggattataggcatgagccacagtgcccagcctggatctttttctttaagcttatgacctaaaatagaagcaactgatgactggatatctccacttctgtgcccaagcaacatctcaaacacacattatctaaaacaaaatttgcaatctcctatgcgttcctgtccggaagctactgctcctaccctatcccttgtctggtaaacactgcctactcagttgcactgacctgtaacttgtcatccctgggtgttgctctttttcctgcttgtacctcctgaattaagaatctctctgcacttgcacttcacttctgtcaatcccatcgcagcggccctcctagtggaggcctctgtatgtttcacctggactgcagacacattgcaactgctcttcctgtcccagtcttgcctccctctaatcctttctcatcaacaagtactgtgcaccctcgcccacctgaacaccctgcagtcctatgcccactgtcccgcatggactcccttctgttcaacctgaagtcttagtttagaagttaccacttctgagagcccttctcagaccctcataattctgggttacatgtccttt

SEQ ID NO: 136719 - DNA, 1048 bp, Homo sapiens
aaaaaagactagtatacttatttgacttttcagaattccttttgcttcccaaatatatcattctcaataataataaatatatttccatctacttagaaataatcagcgattagtgaaacatgcagataatttatcaaaattaattaaatctgcaggatataaagaaggggaactaatttcttattagacttggaaaaataattttaaaataggtagatatttgctgtttgtggcctgccattagtggcctccttgaaaatgattaattactatgtggagaataataaaattgtaaggaaataggcttttcttgaaatcatttctttaaaatgtggaatgtaatttgctttgcttaatctggttttctttaatgtatgcaccagccacaccctcataagttaacatttctatagaaaaaagttatatttgtgttgctttcttactaaccaaatgccttcttttgttcaaagatgggtggaacaggaccctaaggaaattctacattctgtctatgagtgtatagagaaaacatgtgagaaacttggacagctcaatattgatatttccaacataaaaggtattttagtagaatattttacccacataataagactctctcaatcaaattcattaatttattctttcagcttataattgagtgcctatgcagtgccaagcatttctatgagaacttgaggatacaacactaaagaggaagatttaagttcttgtcctcatggagcttttatttggatgggggcgagataataagagcagaaaaatataatttcaaatactaaaaagttccattccaaaaaataaaaaccaagtggtatggtgggttttgcctagaagggcttgctttagattaggtggccaggaaaagcctttctaaggatgtgacacttttgctgagctctcagagggcaaaaggggtcagccatgccagtgtctagaagagtgtttgaggaaaaggatgcagcacgtacaaaggccctgaagtgggaataagcctgggacatttccgggtcagaaagaaggccagtgt

SEQ ID NO: 136720 - DNA, 1071 bp, Homo sapiens
cctgagagaacagaaagaaattaaataatatttagggggtaccaacctgagagaaaaaatggccttgttttcgacaaagtgagtgttgaacttgtaatagaagctaattctgggcaatgagaaattagatggttccaaatgtagacttgaaaattgataacatagatgtgataatctcaatttattatggatgaactcactatagtaattaatataaaattaattcaatgaaagaataggtgcctttctgtgttctaggttttgtgataacccttggcatatagtgacaaaccaggaagaccttgtacttgactttctgctacagaaactaaggatagaagtttggaagctagaaggagaaagggaaataggaaaggaggagagccactaagaaatgacaaggatagattctgccttcagttttatttcatccaggaaaactctaaagtgtcatatctccatgtaggtcttcagttgaaaatatcaacataatattaaatctttagcagttttattctaaagcaacacaaggtaggatggatggaaacaatgagattttcacgtatatttgtctttgaacttcttttgctttgtttatatcacagtctgcaggttttatacttttttctctgtctcggttcaggctgctttaacaaaaatatcatagactgggtggcttatagattagaaatttatttctcacatttctggaagctagaagttcaagatcaaggtgcttacccatctggtgtctagtgaggaccttcttcctggtttgcagatgactgtcttctcatcctcatatggcagacagtgataaaaagaaagtaagctctctctttttatgagggtactgatctcaatgagggctccaccctcatggcctaatttatctctcaaaggtcccatctctaataccatcatattaggggttaagattttaacatacgaatttggaagagacacatacattcagtccatagcattctctttgtatgttttcttccttcgttgtctatttctcttgtaaatctctgtaactctatgcctgtccttctcctctttatttct

SEQ ID NO: 136721 - DNA, 1855 bp, Homo sapiens
gttttacttttggccccacctgtttctgagaatgtcatcaggtgaggggcagccatcaatatagtctcttccaccttgcaaatgaccacttacccagcttaattaatagcttagcttttgacaaatagtaaaatgccataactaaatctgttttactatcatgtctcttgtgggagaaacaacccaataacactttgtataactgtcagcagtctgtgcttaggatgtgttccataacctggagcctcaccttcacctcacttcctatcaccctagcagctcatgacagaccatctcagagaagatttattatttgcctgtttctagtcaaatggaaatcagctagatgattttagtggggtttttttttactttattttgtttttccttctattgtcatgactaacgaaaaactggaaagttatgaggttttattattctaaatatttaaaaaataatttattcctctgtactgtttgttactatgtcactaactctagcccatggggattgaggcaactacatttatcttcactcttcaaactttttttttccagaacaaactaaatctaccagacagattggatgtgactttatttaatacaaataagttcagatcatccaagttatttttattaacttacttatttgatgggcttgaccatttacttctgctttacttggtgtagataaggggagggacataccttctagaagtgggctgtctagtgttctggactccctagcatcaattttccttctatttttttcctaattactttggaagttagcaatcccctgttccctctagacacgttgctcccttctgtgaaggtgccctttactcccagctatcttaccaggaaagtgctttcttggggacctgccttcccaaagcagccctttcatgtcttaatgtagatggccacaacacagactgtagcatgctccttgccattcctttctaacatcctctaggattgtgctccctcagtacatcatccatcatttcaatttagtggttgaatgagtagtcagttaccacctgagccacttttctaattaggatgcatatatgttgccagatagagaagagtcatcctaaacaagaagcaggtatttacctggtcttcatccaaatggaaatattattgaatcagagattcatactggacttcctttgttccctttctgctccctgcctcttccttttctttttctacaccaatgtgtagaaaaagtgttcattctgataaacttgcccaagtgatctaccatttcctaaatggtcaacaagagaccttgaacctggccatctctagcgtgaattgcccttatttcttctaatgctccagctgctccagtttctcctggcccttcagttccagttgccgttgttccctctggctcttcagttccagctcctggtacttcctcaggtattggtgctctggctattgctcacttcccagcctcccaagtcctatatgttgggggaaattgacttctgctgccagatctggatctgtcattccttttgattgttctcagagattacctacacaaggggcttagtcctccagcttgggagtcttctctttggcttttggtctctctgcaaatctaattctgccatcttagcttctttaataagttttctaatttttttgttcttaattcaattaattttgagcatttgtgaattgcttggtagtgtaccaaccactgatatttttctctttggcagttttactaatgcattccatgtattctaactgccttaatgtctgtctataaaaacacagtaattattatgacaggtttctatgatcatggaacaatggaaggagaaaga

SEQ ID NO: 136722 - DNA, 1055 bp, Homo sapiens
aaatcaatatttatcttacccagtgcactgaactctgatattttccattctaattcatcctatttcaatttttaaagtaggtaatcaaaactcactaaattcatttttaaactcatagctcactgtattttgaaacactgagtattgagatgtgcttgttaattttacctatcatagatttaaaacttttctaattcttctactttttctagttatttctgtgagccaataacacctgctaggattgcttacctgtaaggaaggtccacatttgtcacagtcatacagtactgccactgtgtaaaagtagactgcccttgttccctgggcatgggagatcttgccacctccatgatgatgtcactaatggcttgtatcaatcacagtgtaaataatagaaaattctatttcaactaaatgaagtttaaagcagggggcagttcttttgctcttggaagcagcagtgcaagggtagctaagttcaggtgctgtttgattccagactcagacagtatcacctgcatccccctcaagcctgccttttctgggatggctcctgatgtggcatattcaactcccacttcatgagggcagcaggcccaagccacacactgccaaggtcagctgagaagagggactcttgcagactgagcacaaatctctttgaccacatgtttcctgatccagtcactggggcccagacccattcctggagctgggagtaagatcaaatctcaggtacactacatggctgagggtgagggtggaacgatttcctaaaaagaattcgaaatacctctccccaacagatgcaggaggagtagatactgggcagcaaatgcagatgttatctattataggccatctattttcatggtctttctcttttccctcctgttttcttggttgtggtgagtcttttcttgctgcttttcccacctacagaaacccgtatcttgtcctgaagtccccagtttaagtcttgtggaaagtagccactgtcaaaatgaagtgcagggccctccagggaaatgacagcataagtaattagaaag

SEQ ID NO: 136723 - DNA, 1028 bp, Homo sapiens
atacaaaataagcactctaaggtttgtattattctcctaacttggtctgtaattttgcataaaagctttaaatcctctcataaatttatttttatctaacaatatgcccattcatttctaattttctaatttctatctcttaaaagctatagaattttaattccttatagaaactaatcagtcttttatccttgatagtgatttcagtaagttcttattttttaaatgaagtttttcatgtatattattttattttggtctatagtgtggcttgatctaagaacccagtctaccgttgagagtcttagtaaaagaattccaggaaataataactttgtcaaggtaagaatttcttcagaagtatactataagaatgtttctttttttaaaaaaagtttgcagatttcactagaaagaagcatcttatggtacaatagttatttgatacaatttatagaatctttttcccggataattgaggccaactcaagtctttaccttcccgtctttcttgctctgtggtggattggaacaataataacacaaaattgacaggctggaagagattataatgcgtcccagtggcttaagtcacacttcccaaggggtgctttttttttttttttttttttgagacggagttttatgcttgttgcccaggctggagtgcaatggtgtgatctcggctcaccgcagcctctgcctcctgggttcaagcaattctcctgcctcagcctcccgagtagctgggactacaggcacgtgccaccatgcccggctaattttttgtatttttagtagagatggggtttcactgtgttagccaggatggtctcgatctcctgacctcatgatccgcccacttcggcctcccaaagtgctggtgggaggggtgctttctataattgaactatgttttccaaatctatccctattttttctactgcccatcaaagaatgttctggctgcttttgagtttttaagcatctggattcagggagagagaaagtaaaagacactctagccc

SEQ ID NO: 136724 - DNA, 1055 bp, Homo sapiens
ctactatgcccagctaatttttatatttttagtagagacggggtttcaccatgttggccaggttggtttcgagctcctaacctcaagtgatccacctgcttcagcctcccaaagtgttgggattacaggcatgagccaccacacctggccctgtgttgctttaatttggcatgtctttgagctctactttagtgtctactaatttcatgttatgttatttgaacttgtgtgtgtatatatgtaaaatatattattaagtcttattgttttaaaagttttctggttatgatcattagtttatgatttggtatactctctggtttttaatagtttaaatgtcatttttatggaatataaaataaacagcatagttttgggctaggttctacatacaatactaatttattgcaaaaatcaacatctacattgtcactatctaattacaggatgttgtgtcatttaattttctctttaccttgctacgtggatgccctttgaactgtaaacatgtcaccctaatctttgttcatgaacatgctttcctgtgccatgagacaggaaaagtatttttattcataatactatgggattgccttcagggtctttgaatattttgtgatttgttgagttcttttgtttggtggttttgttttaaactgttacacttttcatttgctaactgaacttcacaactgttttagtccaagacaggccttccacttagcacttacttcagtgcagtgaaacttcgttggctccttgacaatgtgagaaaagttcaaaaggccgttgaagaaaaacgagctctttttgggactattgattcatggcttatttgggtatgtttaaatataatggatatatggagaattttttcagaaattttttctagactgccttgcctattgtttctactagcaggtcagactttttaattagcagcattatgaagaaaaaccactcaaaaagcaacaggagaagttttcagcttccattcgagaagcatttttgcctacttcctctttattttttcttgtcttacttcagtgaaaatg

SEQ ID NO: 136725 - DNA, 1224 bp, Homo sapiens
tatcattaaatattgccttgagttaatgtgtctttttttaaaattaaggttgtcaagtctacaatcagccacttaaatctcatttttcttcctagaatgctggccatcatgatcaaaataaaaaccagtatttatgacataaattaactgttgcttatctaaatttgaagaaagatgtttgctatgaacaaataatatacaatacctgaacactcttgtgtttagagcagcttgagtagaaagaaaagttgctaaaatatggccttgcaaaataaatgtgtttcatactggtttgatagctattggaagaatatattagtcatttcttaataatggcaataatagcaaagtactaatgaacttgagcaatcacgtagcccaatctccattttgtagagaaataatgtgatgtattgagaggtttcaacagcctgctagtagattaatactaactaactaaccaagagtagagccctcatttactggctcccagtctaacgttttatgttcattctccagtgccacatctcttcctgtcattctaggaatacttgtagtatctgtctctttatcattcatttagttgaaatgctttctttgtcttgtctgcccacatcctctggcacattgctacttgtgttcactcttgttgcagctatgttagtagagccaaaattttgtgactattcataatcctttttttaaattttattagaaagctggggccttggaaggtgtgccaatatctggggtaagtttcatcaccaagtgtctccccatccccacccttccccatgttatggctttcctcctcttagttcatcagtgtgcctctttttaaactagggaaaacaagtaaaagttgcaaaattggctaattcttgttcttacatgtcatactgtgggccattgagaatcttttgaataaattaattttaactctcccttcccatacctattatcttacatattaacaaatggtattaacaaatggggaaaatggccaaatggagaaaatgcaaggaaatagacagttcattctttgataaataaaaaatgaaaaatcctatggctcttctaaaaagaaagttaatactattgtattagtcagtgttctttattgtcatttatactttcagtgtttaggggaccagtctgctgcattggtgggacaaatgtgcttccagattggacaagccaaaaatacgtgagtttaagaaacag

SEQ ID NO: 136726 - DNA, 1037 bp, Homo sapiens
gaataatggaatgtgtaacatttctagattaaacgttcttgtagtctagcagggtcagtggctctcatgcaagagtgtgacattatttgtgtgagagttttttgaggaggagggatgtgggaattctttgcaggtcatggtaatctgaggttacatgaccaagagcatctgagtcagcctgagtctggaaacattcttggaatctgggttccaggcagctggaatcaagtgccatgagaaactttgaagcaaagctgttgggtttcaatgggaggatagaaaagtcacaaaagattatcttagtaatgagatgctttgaaaaatgagcagtattggagggtacagggaacattgaacaaagatacgtatggggaaatagaagactttgtttagagaatgtagagaacattagagtagggaagtgacaaaaaatataaagctaggatcatgttgtgaagccctatatttcaggctaaggagcttttcttgataggcaataggaaacttttgaaggtttataagctggtgttcagagatgactggagttgtcagtagcagtcttgggtgaaagtgaggaaagactagaggccaagatgccatggaggaagccaccatagtgtcccggtaatgagcacatgggctcagaaggatggagacagagagggaggccatgagtgaatgtgcatggcactgcagaggagaaagggaggggaagtaggtatgtcatctaggtacctggaccctgtggttaggcttagccaaagtaaggaaagggtctgagtggaagaatttctgttcagagcgtgtttgtggtgctggcaggctgtatgttgcacacatttggaaatgtggaataagttcagtataaaaatagaaatttttggccaggcacagtggctcatacctgtaatgccagcactttgggaggccaaggcaggtggatcacttgaagtcaggagtttgagaccagtctggccatcatggcagaaccctgtctctactacaaacacaaaaattagctgggtgtggtggtgagt

SEQ ID NO: 136727 - DNA, 1040 bp, Homo sapiens
actctgttgcccaggctggagtgcagtggtgggatctgtgctcactgcaacctctgccctccgagttcaagcgattctcctgcctcagcctcctgagtagctgggattacaggtgcctgccaccgtgcccggctaatttttttgtatttttagtagagacgggggtttcaccatcttggccaggctggtcttgaactcctgacctcatgatccacccgcctcagcctcccaaagtgctgggattacagacatgagccaccgcgcctggccttaaaatggcattttaatcctcctgtctccctccctccaaccccatgccttacacacagatacacagttctcctcactagcggttgaggatgtaattttaactgcaaaattcccacaaaatcaactgatcatttttcccttgtttgtgtactttactatcaatgaatttaaaatactaagaaaaagttgataaaacaaacaaaaaaagatatcattgctccaatttctgctatcagcattaatgataaaagtaatttgatcttttgagagttttatattttaaagaactttgtttttgtttcagttaggctgcagtggatttaagccagtttgattttttttttttttttttgagatggagtttcgctcttgttgcccaggctggagtgcaatggcacgatctctgctcaccgcaacctccacctcccgggttcaagcaattctcctgcctcagcctcccgagtagctgggattacaggcatgcgccaccatgcccggctaattttgtatttttagtagagatggggtttctccgtgttggtcaggctggtctcgaactcccaacctcaggtgatccgcccacctcagcctcccaaagtgctgggattacaggcgtgagccactgcacccggcctgaaaatgttttttgaatagatttatgaaaaacactctaatatttaatattttgggggtctctaagctgtataataagcttggaatagtaataaaatgctagttgtattcctttaagcaatctaagctatataact

SEQ ID NO: 136728 - DNA, 1891 bp, Homo sapiens
gtagtctgcccttgggcttttttatagtgagtagcatggtaatgttaatcggagcaaggtacatctcaggttagttactctttaaattagacaactctattagttagctttaatgttttcgtgtataacttagcagaaatttttcagtgtttttcattctttctgtgtctaggaagctggaaaatcaataaaaggtctaattagttagaccaattaatctttgggggcagttagaagtaagaactgtgactctgcttaccctttttaaatttttaatgtgatgacttctttaagagggactacattctgctgtcagctgcagcaataagcaaaagtgaaaatactaatatttaaatgaaaggactttcagactgactgctgaaagttaaagtatacttttgacattaattaaattgtctttcaaatgtatataaattatttttcataatcctgaaaatttgctaagcaagtcttaacttttcaattctggcaagtttcagccagagcatgtccacagagttcctgtaaaaccctaaaaccagggaagatttatagttactcttattttagttaaaagaatatcttttatgaactgaagttttaaaaatgattccttaaatgaaggggttgaaatgaaaacagaattatttttccacattaatttatactgaataatctttttttaataaaagtaaaatggctcagcatgttatggaatatattgcataatcttattaatttataatagccatttgtggaagctgctcctggtgatagctcaatttttcttaaaattactggcttaaatggaaatgatgcttcttattctgtatgttcccatgaaagtgaaacttaaaaaaaaaattcatgattagggtttcatgaaaaggccttgtttctatgaaaattgagacaggttgcatctctctaagctaaaagatgggctatgtgtctagagtcttagacttctaaaatgcatgtggtcactatatgtaggttatctcttcggtgacatacactgcaatttgagagggctggaaattgtttgccttggtaaacgattagcaacagtggcaatatttgttaattttggaattggccctgtttgttgcattttaattgtgaggcatgatttagaaatcatatggactttctagcttaataaatgattgaatcatctgcattgctttaactcctgaattgtatgcatgtattattgacatatatggtttttgttccccatttcaggtattccataaaacctaccaactcatggattcccaagatgtgagctttttacataatgaaagaacccagcaattctgtctcttaatgcaatgacactattcatagactttgattttatttataagccacttgctgcatgaccctccaagtagacctgtggcttaaaataaagaaaatgcagcaaaaagaatgctatagaaatatttggtggttttttttttttttaaacatccacagttaaggttgggccagctacctttggggctgaccccctccattgccataacatcctgctccattccctctaagatgtaggaagaattcggatccttaccattggaatcttccatcgaacatactcaaacacttttggaccaggatttgagtctctgcatgacatatacttgattaaaaggttattactaacctgttaaaaatcagcagctctttgcttttaacagacaccctaaaagtcttcttttctacatagttgaagacagcaacatcttcactgaatgtttgaatagaaacctctactaaattattaaaatagacatttagtgttctcacagcttggatatttttctgaaaagttatttgccaaaactgaaatccttcagatgttttccatggtcccactaat

SEQ ID NO: 136729 - DNA, 4558 bp, Homo sapiens
ttatactatagagaggaaaagtcaaggtgggctgaagtcagggaaaacttacagaggcgacagaatttaacatgctataaaacatttctctttttcttcatttggctggaataaagcataactctccgctatttacaggtaatgacctaggaaggcaatctattctggacatatatccatcttcttatagcagaaaaaaagtaattagaacaaagtaaaagatcaactttctgttcaactatgcatttccagtagatatatttactaattggcttacatattaaagtaggcaattacctcccttgatttttgtggtatttttcttttcagtttggattatacttggaaaaaggttaatctatttaccttccccctcccccttaatcctaacctccctcagagcatcgaactggctccacacaaagtcctcggacacaacctcgagatgaagactacgaaggggctccatggaattgtgatagctgcacctttcttaaccacccagcactaaatcgctgtgagcagtgcgagatgccacggtacacctgaattcagaaaagtctgcgccaggttgaaagtgaaactttgagcactaccagaagaaaaggaaacctcgggactctattcatccacccagccttttcattttcgattgcacagcggggaggaggaatggctttgtggtcgtcgttgtgctcacgaaaggaaaaatggggaggtcttttttttctcctttcttaactcactacagagtgagagatagaaagggatacttgaaactgggaaaggattcactctgtgaaagaatgtacacacagaagtcaagagctcttctgtggtggaatcccaattgttaaagttactgctgagtggcccttattttttaaagtagtactttgaatcatagtatgaaatgctacagtttatgcaaactgtgaattcccagagcagacttacctggtcaccgctctctggaaaaccaaggctccccgtgcttcttcccattgcttcctactaaagaggacaacaggaaaaagcacctagaatatttggggggggggggcaaattaattaagggtatttgtaattgctgcttttttcaggggtaatttccaacacacatacatgcacacaaacaaaatgttttaaaatgtgatttgtagcagtcaggaactaggcatatcatgcctttgtttaaaagtacaatcagaggtggtaagatgcctttggcttgtacagtgtgattcatcgagctctatcaacactggtaactaagacctacttatgccacataagagatgcatttttttaagttactgcatgtttttattaaggccattggttttcaaaataacaagtccttacaaagtatgattttataaatgatattctcgtaaaactgcgctttgccagtagcacagtgaatgtatgccaaatgcaagtccattccaaaatccatttggaaatcttgagctcagctgtggttcttaaacttttgcagtccatagggccttttttttttccttccaattttgtgataaattcatgatgtttacagcacagataaaactttgtgccataatcctaatttagctgaaatcaatattaactgttcaataaaaacttacttgcatatgttaacaaaccagtgtgaggggaattacagttggccaacgacaaagttgcacactgcattatttaggaaaggagggattgtcaaaaattattaagagaaaggtgaatatagaggactttgaaacaacttttaaaatttaacataactgtatctagaggtcaattgagtctctacaggcagttcagatcattttaaagcactccttatttatgaaatagaacttcagggtgcggataagagatataaagtcatgtgactcactagggtgcatcgctggaaacttaatagcacatttcattaaggtctctgccattgttggagttccttcttagctcagaattggagttttggaatcttcccctcattttggtgagtataaacagcaataaagttagtaggttctcccatcctaaaggattttacctgaggatatcgtcttaggaatatccatagacgctcccatcaggtttctcccccaacccccctacaccgcccccccacttctaatttagcagtaatctctggcagacctggaaaaacaagctgctcttaatagcataatgaaaccaaaggcgtaataactcatcatagttttccatcagaatcatttcacactctgcctacagctttgaaaacattttttcatatgtgaaaaactccccaaaatatatccactagtctcccaaaggaagcatggtaattaacactgataaaaacatctctcacacaacaactgtggcaaaactgtgaaaataacggtgagaaagcagatgggcttaaaagcatggtccccaaaacaacgttcttcaaaggtttttgtaacactggtctctgtctccaataacagtctagccgtcctactgttctgtaatatgcctttgcctttgtatggtttcatatctctttagtgatggtcaaccccacttggttttaagttacaatttaggggaaatatatatatatatactgcttggtgtcctagctaaaaggtttaccagtattcatagtgatatgctgaagtggaggcaattaacttggcagttgtcagttgagaatgaaagtagcatgtctgaaaacagtctgatgctttataaaaccatgtagatgactttaaaactattgcatgaaaatacatcaaggttaataagctgttatacagtagatgcatggtttcaatcctttggtgatattatctagtcaatcattgttttcacctgccaggaaaagagagaaaacagtctattggataggtgtaaagggtggggtatgcggtatcagattgattttaaggaagttttgtacatgttaatttttaattgtgcacaagtttcatatgccaacataggctgtattcagttttaaaataggcaaaatgacttgacactgataaatctggtatgtttaactgtgtcccatatgtagactgctttttgcctatgaccagtttgaacaagaattcacccaactttcaagatgccttttcaaaaggatcttgtagtcagttggtatgtacagacaattggcatggaagtggtaggatataaatcggatgacgcctggctgctgaggtgccagctggatcagctggtgcacttcttgtttcttgtaagaggtttctttaaaatgactagtttgatgtatctggtaacatataggcctgactatacattttacattatttcgctattttgtaaactgggattttagaaagcacgtttgccattttgttaaagtacattgccccttaaattttggagtagtttttaaaagtttaaaatggtaatagaggagccagaaactttttaagcattgtaaaatgttttgaattgatattgactttgtttggaagagagtagaggcagggggctttaaagaaacaaagaaatgcattgtaaaaatgtagttttagagcaaattaataatgatggtggggaaagtgttgctaatttgtttatttccctggaagaaatgggaagtgtgataagcagtttaatttttaaggagctggtctcaattttagtactttttaattatgcaaataaatcaatgtttccttaaattttgtcattgctttgtcacagttgtctagggttcatatccaaccttctgtggcaattcaattttatatagtcttttaagaggtaattgtaatgtatttctgacagtataaacaaaaagaatataaggcatagaagaattgtcctctaaaaatatcaatgatgtatcctggaatgtgaagatgtccctttatagttaaaaattgaattattttaatattgtaccattgttagaccttgaatgagtccatgttaccgtgtgtgtctgtatatctatctgtagagaaagaaaaatgacaactgaaatgttacttttaaaaatcagaataaattgggcactgtctgtgttgcaccactactgtatcttttcgaaagaattaacagtatttgcctattgtaaaggttaattctgatgacgttttcacattcaccagactttttttcctgtattatttgcatccccaaatatttaatacaagtagattctgcatggcttgggcattcagagattaatagaatgatgactcaattttaattctaaagccatgaaaagttactttgagactgaacaattctgaattatttatgatacccaatgtccatgtttctttccctactgtaaaagaattgatcagtttcttcattaaagcagcaaaaacttattaaatcttgtaaataccatgtctcttttagatttctgtgtatgctgtgaatgaaatcattttgagatgaaattgtacaaaggcattttaaaaggctctgcatgcatcgtacctccaaacagtacatattcggaaagtcaaagattcctgcaaaataaataaactaaaagcaaacactacattctgcatcttttctgcgtaga

SEQ ID NO: 136730 - DNA, 1048 bp, Homo sapiens
ttggctttttctgtagttcaatttataatgaatttttaaggtaaattatgataaatatgaaagtaagctttcattatttaagtgttctttctcacagtttgttcattaaaaatcaaaacaagcagaaagagaaaacagttcaaccatcctttcatttctcttcttcatttatctccccaaatgccccacatgcctaatcctgcctaaggagactagccttacaattagaaaaatattcctttaagtgtaatacattgtagacatacatctgtgtagtggttttcttgggtcttttctcacagcgatgaaaacacaatttcattgggaggacagaattatgtaatgaattttgaaatcctggaaaacatttttcccttcttatgtgttttatttacatattttctttaaaaaaaaatcaaataacaggaaaaaagagttcttaaatgcctgatgaatttactttctttataggaaactttgatccaaaagccatgaataatttttatgacaacatagaacctggcccagttgtaccacccaagccatctaaaaaaggtgagtatgaaaaatgtcacaaatacgatagaaataaatgtcaaaataatttgggatttcacatttatctgaagaaatttccactagaggttaagttgttcagcataaagttaccatatttttattatttttatttttttgagacagggtctcattctgctgccccagctagagtgcagtggtgtgatcatggctcattgcagcctcgaccttctgggctccagcgatctttctgcctcagcctcccaagtagctggtgtgtggcatggtaggcacacaccaccatgcccagctaatttttttttattttttgtagagatgggatctcaccatgttgctcactggtctcaacaaatttaccatattggtgttataatgtggcaataatgaaatgtccccaaactttagtttttaaaaagtactgaaattagtaactcttagaattactgtcagaggtaatttgatggactatataattttttacaaacagaag

SEQ ID NO: 136731 - DNA, 1074 bp, Homo sapiens
aggctcaacttaacctctactttttccatgaagcctttcctcattttcctaccctctctaagctaagggcaatctctgagtttacaggtttagagaagtgggcatatgtcaggcctcttgcagtcagcatgtctgcagccactccctcatagagaagtttctacttgaggttcttggcttcaaaggggatctgtgaattctctgaaattatatgcagagtttcataagtgtgtttaatatgggaagtgggtctatagctttcatcagattttcataagattattacattggaggaaaaaaggagtgaggaaccattgccttaaacaataggcagagagaaaaggggaaggcattttagaagagaaaagaacaataaggtaatgaaggcttgaagtcaagatggagagtgacttttaggagacagtaactacagttccctggcataagcatgagatttctgaagagttaacagaggttaactggggctttgaccttgaatgctaggtcaaggtgcttgaactttattctcctggtaacagggaacaagtgggagtttttgagagagagagtcttgagaaattggcatattcactaatttagtgacttttttgtaatatcgtgtatagtcaatattagaagtgaggaggaagattttaactacttaaagcactggaaaataacaaagttatctttaatggaaaggtgatgttaatataaatcaaatttctgcctcattttctccatttgaaatcttaattgaatcctctgattgcggaagatattgaaggacataacccatatgggaatccacccgtagtagttgggtactttggaaacctttaggtacctgtagagcataaacaaattttcttagcatagtaattttctttaatcatatacattttatttagcaactacttgctgtgtgataatccctgctaaataaaatattggtttttttttgtttttcattggaagtggagaactgtctaatgtagcataggttagtactaaaaaaaaaaaaaagaaaaaagccccagattttatatcagagctcttattgatgtatctttt

SEQ ID NO: 136732 - DNA, 2018 bp, Homo sapiens
agtatcccagaacctcccttctggacagactgtaccaagagctttacaaattcttccacaaattccaagcaatctctatgggtctcctggttctatttatattagacagacatctcagagttcatcaggaagacaaactcctcagagtacgccgtggcagtcctcaccacagggcccagtgcctcactatagccagcgtcctttacctgtttatccacaccaacagaactatcagccttctcagtattctcccaaacagcagcagatccctcagtctgcttaccattcaccacctccttctcaatgtccttcacccttcagctctccacagcatcaagtgcaaccttcccagttgggccacatctttatgccacctagtccttcaactactccaccccatccatatcaacaaggacctcctagctatcagaaacagggaagccattcagtagcctatcttccatacacagcatctagtttatccaaaggttccatgaagaagatagaaattacagttgaaccttctcaaagacctgggacagcaattaataggagtccttcacccatcagtaatcaaccatctccatggaatcaacactcactgtacacagccaccacgccaccttcaagttctccttcaagagggatatctagtcaaccaaaacctccatttagtgttaatcctgtgtatattacatatacacagccaactggaccttcttgtactccatcaccatctcctcgagtgataccaaacccaactacagtttttaaaattaccgtaggccgagcaacgactgaaaatcttttaaatttagtggaccaagaagagcgctctgcagcaccagaacctattcagcccatttcagtgataccaggctctgggggagaaaagggaagccataaatatcagagaagttctagttctggatcagatgactatgcctacacacaaggtaaattttaacccttttatgaaatttaatttctgtggtgaggcagcagtctcccattcaaatatattagctgtttagttttaattaaatgtttagtattaaatgttgggcagtagcattgctattaagaataaagttagtggccgggtgcggtggctcacgcctgtaatcccagcactttgggaggctgaggcaggtggatcacctgaggtcaggagtttgagaccagcctggccaacatggagaaaccccacctctgctaaaaatacaaaacttagctgggtgtggtggcgcatgcctgcaatcccagctactcgggaggctaaggcaggagaatagcttgaatccaggaggcagaggttgcagtgagctgagatcacgccactgcactccagcctgggcaacagagggagactgtgtccaaaacaaacaaacaaaaagaataaagttagtgcttcagagtcatgtatagactttgttttaaaacatgaaaatgtaggcctaataaggcttagtttagaaagaatattcatagagcgaaaaatacaagtgacatggaaattgtcaaaagtacaaactacagagtaggaaaaaagagattcatggagaatggactaaagttcatcaaacgaaagaatttgaatcttttctaaagaggatggcccagagggcataatgatatttacatataaataatatataagaagtggaattattggattagctaaaaagtaataatatataaaagtggaattactggattagctaatagtagattattggattagctaatagtagacctaaattagatacagagtttttaaaaagtctattcagattgtttcaagataaccggagaatttagttttctttcagtatataagaagggaagtaattattcagtatgcctggtagtcagcctgttcaaaacacacataagtataaagagaatcttaggacaatagaacaagagggatgttcaggtgatgtcactttggttgcattcagagggctaaattgaagcagatgtggaggcagcatagcattagaaagacatgagag

SEQ ID NO: 136733 - DNA, 1224 bp, Homo sapiens
atggttttcttcaattaatacatctttccgtcactcaaagtattttttgaagtatttgaattttaaattttctatattgattataattgccatttgtcactatcatctgggtagaatgttaatgttttacacgcatgatctcattttttaaagtatttgaattttagtatcaaaaactttatataaagaaaaggttaaaatgatctatagagttttaatacagccaattcattaaatttctaagaattcattttgtaaagatttgctggacttttttttaaacttcctaaagctccagtttaataatgtccttttggccagacatcctttcccttgaaattatcatgtggaaagagcactgggactcaggagaataagaatctagaattggcttttctgttaactagttaagtgcctattgtcaagccatgtaacttcccaggcatctttttcctcatctgtaaatgtgcgttgaattggagcagatgaactctaataggagttctcccaactctaaaattacaacattatgggtcctgttttaggtttaacttcatttggttctcagcagaaatgaattatttcctttcatttttatataaaatgtacttttcctaaaataaatatatagtaatatctatgcatgtacatatctgtgtgtatatttatgaactacagagaaggtcacaataattgggaaacttttatggattacttcaaaagtagtggataatatgtgctttacactagtaaaatagtttggaattctgtatttccttagagaactgctttatgataaattaacattttacaaagagggaaccttttattagtctgattactgtcagttggaacttcaaaagtgtcagtttgctattacctcctttgtgagtgtagaattaaacaattcaaatctttcagtgattttgaaagtataccaagacacctttcagcgggtaaaaacttttgagactgtgagagtatgaatgaatttaattaaggcagtcgacaccaggtttttaattaaattaccctaactcgggcaaagtcatggagccgtagttcaagttatggactttttttatactgattcgttttgcttaaatcttacgtaatggttcagacagttgaagttattcaaggataaatttaggtaaaagaaaaatgagggctgctttagaatttttattgttttaactcttgaggaattttattgtaattctt

SEQ ID NO: 136734 - DNA, 1045 bp, Homo sapiens
actcgtctgtcgtcccacacctggtgaatggcatatgttctttgtctgttaatattacagcattgtgtttcagctataatggccaggtaactcttgcctgcatatgctcactgacttcccagttttatcatattatgctttcttctttctgtaagtcatataatatcctgaccccatgactcatgtcctgaagattgagacaattgggagattactccttcatatctcatcctcaccgcctcccaccccatttctagaacatggtaccaccagctctggaatttgccaacctctctgccctgttagaaagcttgctgtgtcactagtcctttctcatccctacacatacagtccctttctctctttttagacatgtctcaatttttccagttctaaaagagatgcgtctttgctttccagttcatttaccgtctttcttggcactcagggcttcctttgttgcttctccagtcactcttgatgaaatcctagccagtcttgtttgccttatccttctgaatcttaagaagggcaaaaagcttatctgccttgtacttcttttccagcaatagagtcaatgctcctatacttctagtgattctgcttctgaaccgccctcatatctcattttcaaatcattgttttcagcatccagcaacatccttgctactcacttgtaatgatagccttgaacaattattttacgttaggcctgtgaatgtcaaatacccttgtttatttgtaggtacttgacatttgaacgttttatttgaacatttctaaatgtacacaaatgaaaggtccaatgaacctctgatgctacagttacatacgttttaccatactagtttcatctccttactcctcttttttccaagaattaaggcatagccaagacataatttcactccccaataatttaacatctctaaaacaacacattttcttacatagctacaatgttattatcttatacagcacatacaatacagttcttaatagcacatataatacagttgacccatgaacaaagccgaagttagga

SEQ ID NO: 136735 - DNA, 1383 bp, Homo sapiens
tcatttatacttaatataattattgacattttggggttaagtacagcattgcatttttattctactagctctgtatttctttttccccttgtctttttcttttatttgactatttttatatcatttttcctttattacttcagacatcacttattcatttttattctttttgtgattaccctagcatttatagcatgtattcttcacttatcaaagtctagtgttaattgatacttctaccttcctcctagttgaagcaagaatattaaagcaccttagttccatttacctaccttgtgacatacatattgttgtcctgtaatttaattttctgtatgtattttaaaccttacaagacattattttatacagtcaatattcctttagatttcacgtgcttatttgaacttcatgggtcttcattcctttctctatctgtgaccttccatcttgaggcagttttcttttgcttcattcttagtgagggtttgctggagatgaactctgtttttatttgtctgagcctgtattttaatttttttcttgaaggatattttctcctcagtggaatactaggttggcagttgttttcttcatgcttcttggagatacacagtcttttagctgccatttttgttgttgaaaattaagctatcaatctaactgttgcttctttgaaagtaatctccccacctctgcccctgctgcccctccatcaggatgctttaaaactttcctttgtctggtaggaattcattgagattgttacacatgtggtttgacaggtttcatcatttttggaacatttattcaaatattgcctctgccccattctgtctcttttccttctgggattctgattaactcttggatattagacctttctcactgtatcttccatgtttcttaccctctcttcattctgagcgttttattttcccccgacctatcttttggttcactgtctcaacggtgtctattggctgttagacctgtttattgaattcttagtttcggtttttgcatttctcagtaataaaattattctttgcttcttttaaaaatctgctgtgtagcccggacaacatggcaaaaccccatctctacaaaaaaaaaatacagaaattagctgggcatgctggtgcatgcctatagtctcagctactcaggagactgaggtgggaagatcacctgagccccagaggtcaaggctgcagtgagccgtgatcacgccaccgcattccagcctgggtgacagagcgagacccggtctcaaaaacacccaaattctgctgtgtcacattttatgatttctaggtcattgctgagatttttaagtttggctttcatctccttgaacatagcaagcataatttaaaatcc

SEQ ID NO: 136736 - DNA, 3558 bp, Homo sapiens
gcagttttgttgaaagagcatagttttggtttttcataaaaggaatatcttgttcccaccatgaattactgatgatttgaaacttttcaaaggtattggacctcttgcagttattttaccctcatttatttagtgtaaacatgggacagtgtgtttgttttacttcaagattttaaaataaagtgttagcgtgttgaggttacatactgttaccactgtttgtgatgttcagacaattaagtgagggatatgaaggtaataaaaacaaagctaagtacattttaaatttgttttccataaatgtgttcagtcttatattggttgaaggaaatactcctaataaaaggcaagatggtttttttttttttttggtttccaaaccactctttcgtttgaaaaatgactttcagtaagcacgctgtgttcattttaagagtttaccaagttatttaattacacagcgagtgcagaggttaaaaatatgatctcggggtaaaatgcccagatgttcagatctgacactaactagctctgtgttcgtgggcaaattacttaatctctgacctgttccctcatttttgaagggataatgtggtacctacctcatacaaggattaaatgagccagaggatgtatcatatttaaaacatgcctagcaatggtgaatactcaaaaagagttagttcttattattacgttgtcgtcatcattactactattattgttattactttagctactttcgaagatgatacgccttctgttctggggtgtgggcatgaaagatatatttgtttacctggtagcaattttttaatgcagagtttatttgagaggttcagggagagagcagtatgttaactgctggatatatccacaattggccatagtgcaggaaattcatagaatattaagcttatttttttcagtaacaccattccttttgttaggtataaagaactatgcctttttgatgtttgagcaaaactagattatttgagtaattgcaacgtctttattaaaatacagttatcttggtatctaaaggctagagtctgtgcagggggagcctcaatttctaaatgatccattggtaagacttttttttaagcagcaccattttcccacagaaaaatgtcacataatagtgttcagattcccaagccagcccaacatatctgaatttgaatactgatagtattataaaaactaacttttatgtgtaacagtgtctcagcaggaacatgcactgagtacatcaagtactgaaagattatgaacacaatcttgcagatatggcagtagggctatcttcctttgcagtcctagcaaggaccgtcaagccttgggaagagaactctctcctctggtagaggccgagggtaagtagtggagactggtctctagaaggcagtagcttttttctggcttggctccttaaaaggctgtatagtatagtggttaagcgcatggactgtccactcagagtgcttatcttcaaatctctgttctattacttacagaacttcccatctgtaaaatgtaggtaaaagtagtgcctcccttatggggttcttgagaggattaatgtgttaatacgtgtgtagtgcttaaaatagcatctgacccatgagtgagtgcataagaagtgttatgtattttttaattattcagcttgactggtctaggatctctagaatacttttgtctgcttggctgtccactgcccacatcttttgcactaaataggattcttctctttcctttctactgaggaatggtttcagactcttcattcctgcctgaagtattttttaaggggtttaggggggtttattttattttttaatgttggagaaatagcattcttctgtgaacccactccatttccccatttaggccttgtgttgatggagatcatcatttgaagaaagatattgactatgggcatttaattgagtcagaattgaggtgcaaatttctcaacttttagtagtttttgctaagtcatttctttttaaataagctttttattttggaataattttagacttacaatgaagttgcaaagattgtacagaattcctatatactcttcatccaagtatatataaccctggtacctttgtctaaacgaagacattaacattggtacattattgttagtgagactgtagattttactcgattttaccagaatctcactaatgtccttttgctgttccaggataccatgttgcactgagttgttaagtcatttttaattatttgtttttatatcatggagccctccagttctttagtgaatagatttctgtggttgtaaagccattttctgttttagttttaagttttctgcacatactcgaaggctaggtgtttcctctagggatggcaagtccagggatttatcttggcactgaactttataggttgaaataaaaggagagagtcctattactgtggaaagaacactatggtgatggagtgtaggctaaagcatttttataatttaaaactgtgttttcatgggactaaatgagttattttatgcactattcacttttgatggatttgatttcaaaatgacaagtcattcttcctattaaaaaagtgttaagcatacttcttggatatagaagctaattgaaatgaattggagaatttaattttttagtactcatcatagttatgattgatttaataaattaagttagtataatttcagtaatttagaacatttgtttatatgcgcttttagaaaatccttggtttcgatttgtggcaacaatccagtctttttgtttttttcagggataccatatgtaacaggtgccattgttactctaacttttcacacatgccttcagtttgatgtcaaagtcatcatttagtgtaaacagcaagttatctgttaggctgcacatcatgaactttacttttagaaagtcttatcttttatgccacagaaatagcatttggctattagtcatggatggcaaagaaattaattttgagttgtttggataaaaatgtttcagttgactgtagtgtgtattgagagacactgccagtaaacaaactctcttggtaggtggaaatcccctagaagttacagaaaattgggaggaggtgaacttaattaaataacttgaattgtttagacatattcagagcttcttatgaccttgaagaaatcacccaacttcaaaagacctcggtttcttcatttgtaaaattagggagtttgactagatgtgtaaatctagttgttagttaacttctaagatgtaaaaaccctcttgtttaacaaaaacctacaagatcaagttgcttatctgaaatctttatgaatcaacactagtcactaagtctagatataagtcagtttatcaattgggttcaaatagtttcaaaccaatattactgtaagtttgagagtcactagttggtttgacacctcttgtatatttttggtaattagtatattgctttttaaaattttgttatctgatttttgtgctttaccctgaagcaatgaccttcaaacttttttct

SEQ ID NO: 136737 - DNA, 1048 bp, Homo sapiens
aagagaaaaagatactaaatgtctggtagtcatcctccaccaagtcacttagtcaggtttagctgcctagttaattatctctggctgaaagttctagaaaagttttgaaatttggggtttgctgcttcatcttttaagaagtacattgtttgggggccttcagttaagtagtcctgtcttcatggaaacagaaaaaggagtcttgtgttcctcagtacacatcagtatgtgtgtgtattatgtagctttagagactgttttaagtaatcccttggcatcttgatgggcaatctgtggtctgaataagtttttaaatatagttatactcccaagaaagcgttaaataaaatatacttccttacttgtgaaagtaattactcatggtatttgggctatttattagggcaaaaaaaaaaatcaacaaatgataatgtaactgaatgcttaccaagtaaataaagcctttctgaaatgatttatattgccaccgtataaagataaaacaccaggaaattgcctcatatctacttataagtttattttcataccttctatatggtaaacctcaaattattaccatggccacaaatatttatttctctaaaagtgaaatggacttgatgaaatatttggaactatcaaactgaattaatcctaaataagaacatttattatagtttaattcatggacagttctatttgtccaactctaacatcctacttccctccctgcttcaaatttctctactttccatcctctccttctgatgctgttcctaccatttacctggcacccttagttttccattgacactgaagtctttgatagggtggatgctaacaaggaaggcaccaaaactcctccaagtcccttctccaccatcccgtgctctaggaggtcaagagggatgcggataagatctcttaccccaccctgttctttcttgaaaaggaggatgagaatagccaagagtgagggaggcactgtcaagaccctccaatggtttctcctcttcttccctctccttaaacaccaaggaggaaagtt

SEQ ID NO: 136738 - DNA, 1019 bp, Homo sapiens
gtgttgagtaaggagaaaacactgctttcctttaaagatcgcacaagcagtcctctgaggtccaacaacagattagagttattcccagttggagttctgtagtttactaccgtgtgccagctcataaagtgcgtaaaagcaggatttgaagggtgagggacaggtgaggcataaagtaagctgcataaaaagatccaaagtttgttaatgtgttaaagtgtaaatccttctgtttctactgaaatgtaacttatttaaattatttaagaaaacttgccacctttggtccagaccgggcttgtcagttcgatgtgtttcttcagtgacgtttgtcaatcaggcagtcattttggcatacagtatatttacttctggtttctaaaagaacaagaatgaatgagaaaagggaacagtttggcaaactgagctttctttgcgcactttttcattttgaaaggataagagaatttacttttttctttgctttagtaatgatttgcagtagtatacaagaacacgtggaagaagaaagggttttttgagatgagagtttaattttgcacagtgttaaattataaagggcctcatcacccatggtaagttttgtgatggtgtgttttatgaacaccggaagaatacaggcacatacatatacatgctttttagtcagtgtgtgatatgaatctttacaaccgtagggacagcccccgcccccacttgcttacaactggcttaatcaagggaaagacttcagtgaaggtaaatattaaatatgtgattttcatcttcacatctgaaagaacataatctgcattcagtcaccctgaattttcatccatatgtttatttgatggagtcttcccctcagttatagataccacattgtgtacagtttgttggagcaaacagagctaacgtcgattatattcaggcactggagatcctcacagctaccctatgctaaagataatgttatgccgattgcacagaacaatactaacctccaatattctttggcg

SEQ ID NO: 136739 - DNA, 1079 bp, Homo sapiens
gtttgtttgttgtgttttttgttttaataatgacaagtatattaattaagtcagtttgcagttcatactttgcttctcaagagaatttcatatcacttctattcttaatgtcaccatctaagaggatgcatgagtgagtagtaagaaagagacacctaaaatgatgtctcacaactggttctggggaagaagaatcccttaccatagtcaaccaccaccatggggagaacctctcctttgcccctgccctgctctgtttcttgccctagctgcaaaggaagctgagaaagtgggtagcaatgtcagcacttcttagggagaggctatctatctttacctattcccaaggttcatggatggggtgggcggggttccccaacagtgttcagatactggtgagccaaaggaataacataagtccaccaggtgcagcctatcctagtgattttggaaataataggagatgagatgatccatctcattagaaatgatgtttgttagtagatgtggcatctctgctgtgaatcaatcacttgctaattttttgaaagtagggtgatgatgctgacctaagtgactaccacattgaaacacttcccttgacatccacacataccaagaaaaattttcatcctatttaaataaacaaatcatttatccttcccaccattacccgaacctacctttgtttgaaacacccagactggctgttttggtgacacttaaggaggtaactgaggaatcttcaatacttcaccacgtctaagacaactgtgtgtggatgactctgaggagggcatttggttttccattccatacttggcacacactagaagagacagaattaattcagttaaaaattaaaatgaatcgagctggcacagattatgcaccggcaagcaaaatgtgtgtttgtttgggagaaagcaccaagactaatggatgtgttctgtagagctgcgatgggatttccctgaatttgtaatgctctaatggtggaatgaatacaaaggcaggcactggcgcacttgcaaagactttgccttcaaattaagtgtaggaaggacacaaatcaaatt

SEQ ID NO: 136740 - DNA, 1095 bp, Homo sapiens
ttggagagtgggctgacatcaagtgtaattagcttttggagagtgggttttgtccattattaataattaattaattaacatcaaacacggcttctcatgctatttctacctcactttggttttggggtgttcctgataattgtgcacacctgagttcacagcttcaccacttgtccattgcgttattttctttttcctttataattctttctttttccttcataattttcaaaagaaaacccaaagctctaaggtaacaaattaccaaattacatgaagatttggtttttgtcttgcatttttttcctttatgtgacgctggaccttttctttacccaaggatttttaaaactcagatttaaaacaaggggttactttacatcctactaagaagtttaagtaagtaagtttcattctaaaatcagaggtaaatagagtgcataaataattttgttttaatctttttgtttttcttttagacacattagctctggagtgagtctgtcataatatttgaacaaaaattgagagctttattgctgcattttaagcataattaatttggacattatttcgtgttgtgttctttataaccaccaagtattaaactgtaaatcataatgtaactgaagcataaacatcacatggcatgttttgtcattgttttcaggtactgagttcttacttgagtatcataatatattgtgttttaacaccaacactgtaacatttacgaattatttttttaaacttcagttttactgcattttcacaacatatcagacttcaccaaatatatgccttactattgtattatagtactgctttactgtgtatctcaataaagcacgcagttatgttacaaaaaagtattgactggactgcagtactttgtttttattttaatttagttgttgttacttacttacttactttttaaataggtaatacatgcatatgagtaaaaaactataatccagaaagacagtgaaaacactcctaactaccccttcccccatatcaatcaatcatcctcattgctctatgagtagacattattaatttcttatttagtcttccagagggtctttcttt

SEQ ID NO: 136741 - DNA, 1878 bp, Homo sapiens
tttattctgaggtttcctaattcaaatgttaatagtgcaccaaaaggtcaattcaagagtttattattattatttttcaacccaagtaaaagcagagagaaaatagccacctccaccatagcctcagaagcaagccaacagcctgaaacagctttgaaatgaaaagttggtgtggcggtgatggtggcagtgataatggtgacgatggttgggtgctggtgatggtagtggtagttgtgaaggtggtgatggtggtttgattgatagtaaaaaaaatgttcgttaatacaagtagagagtaagtaatcaatcaatcactcatagccaaggtggaaaagatgtatcccatcatggaatattcctgttctgatagaaatcttgtgcttatctatggaattcttttgatatatatttacattgggaacctgaatgtagcttgacatttttccatgtaaacaccagtagcctgatccaacattaagctgatactaacaaacaacgtgtaatggcttcattaataaggctttgcttcttcctggaaactggtgaaaaatcaaaccttgttgtgtacaccctcgatgcagcttctgtgttgtcttcacccagaaatggggaatgatttcccaaatggcaaagaaacagagtgatgctatctatctgcaccttttgtaaagtctgtctttctttctctttgttttccaggacacaatgtaggaagtcttttccacatggcagatgatttgggcagagcgatggagtccttagtatcagtcatgacagatgaagaaggagcagaataaatgttttacaactcctgattcccgcatggtttttataatattcatacaacaaagaggattagacagtaagagtttacaagaaataaatctatatttttgtgaagggtagtggtattatactgtagatttcagtagtttctaagtctgttattgttttgttaacaatggcaggttttacacgtctatgcaattgtacaaaaaagttataagaaaactacatgtaaaatcttgatagctaaataacttgccatttctttatatggaacgcattttgggttgtttaaaaatttataacagttataaagaaagattgtaaactaaagtgtgctttataaaaaaaagttgtttataaaaacccctaaaaacaaaacaaacacacacacacacacatacacacacacacacaaaactttgaggcagcgcattgttttgcatccttttggcgtgatatccatatgaaattcatggctttttctttttttgcatattaaagataagacttcctctaccaccacaccaaatgactactacacactgctcatttgagaactgtcagctgagtggggcaggcttgagttttcatttcatatatctatatgtctataagtatataaatactatagttatatagataaagagatacgaatttctatagactgactttttccattttttaaatgttcatgtcacatcctaatagaaagaaattacttctagtcagtcatccaggcttacctgcttggtctagaatggatttttcccggagccggaagccaggaggaaactacaccacactaaaacattgtctacagctccagatgtttctcattttaaacaactttccactgacaacgaaagtaaagtaaagtattggatttttttaaagggaacatgtgaatgaatacacaggacttattatatcagagtgagtaatcggttggttggttgattgattgattgattgatacattcagcttcctgctgctagcaatgccacgatttagatttaatgatgcttcagtggaaatcaatcagaaggtattctgaccttgtgaacatcagaaggtattttttaact

SEQ ID NO: 136742 - DNA, 1050 bp, Homo sapiens
tatcgataagctgacaggaaaaaaaatgagttttctccccttttcgttgatgttttgtaatatgttttctagctactaggtggactacatactatagtcacatgtgggccatgagaaatacttcgaattacattcaggcaccatgttgtaaaggtcctggactttgtttttactgattttgttaaccgtaaagatcgctagtaattaaaaattggcagttagtccatctatcttcaatttatgcatgaataattatgcagatttcccagggttgctggacagccaaaaatagatacaggggaagccctccaacttgatagcagcagttatatatttgtactctgagctctaaggagcagcaaaggccccactgtgtcgtcttcctgtggtttttatggcacagaaagccaaaaatgatttcagttcttcactgagggctgccaaactattggcccactttatgaatagttgcatatgctttgttaaaaaatttttatacttgcagtctcagccaaaatccaaagtgattttctaaaatataattaatactccatgaaattctttgcactaataaagcacaaaaagatagatatacaaacttggtcaccttaatagaaatgcctgaatgacattaaacttttaataagtaagtcttcagttgatctggtgccatcactgtttaagtgcctgcccgtgaatccgcttcattttgtagagaagctatatctcttgaaataaatattaaaacaaaatactctccctagtctatagctttaatttttattgggatatctttaatttttattggtatttttaacaattattatgggaatctgtaaagttgatacatggcaaggtagtaatagcctagtaaagcatttcagttccaaagacaatacttgaatagtggaaggatttaccaatgtgcaataattaaaattagccatgtaaaactatgggacatagacgaaaaggcaagccataaagtaagtctcagattatcttactctaaatctgaattttgctacgaagtacccagggacattgtgc

SEQ ID NO: 136743 - DNA, 2231 bp, Homo sapiens
ttctttctgttttctcaaatgcctccaatttcatcatggaaatgctcagcttctatcagatagaacaaattctcccaagaggatggagtccagcctctatgtcgggttctaccttgcatttgatgtgcagactttgggcacacagagtcaactactgtttatgtttcaatgtgctgattgtcaagagtgaagagattctgagactttttttaacattaagtttgagttgtccttgaaaacaatgcccaatttgtcagatttctattctgtgccagttttcatccagtttaatgcgtgaactctatggattttacaaatgacgtcttctggatcatgttatctgtttacactgatcttaagtgtatgtaaaggttatttgactagatgtgtcttttgggttttttgtttctgtttttttttttttttttttttccagcagagaataaatggtcatctcaacatttgtttggtaaaagaagcaaattggtatgaaattgtatatttatgcatgttttttttccctttctgatatctctgcctcttcctctctctattattaaaggaagaaatacccctggaaagccaatgagagaggttagtgagattcaggctcacggccatggcttctgtctgtctcatcctgctttttatgtttggcgtttgtgtaagaattgtgtgtgtgcacgcgcatgtgtgtattacacattgtgtcatcatgtaaggatggtagtcacctctccacttgcagctcatgaggaacattcctcaaatgttcattgccgttgtcatcaccatgacgacaagactggggttgggagcaagaatctctttaaaatggcaatcctttgtagtccctaggttggaatcctgccgttcatcatctgttgccatttgcaacactaacaaaatcttcaaaataaatttagccttgaacataactgatgagtcataaagctttcttccacttccaggaccttagcattttctgccagcgcccttagtttttattcttctgggatgacttcattttgcttttgtttccttttttcttggttcctacgctctttctctcccattttagcgaacattttttgagcacttactgtgtgccaagcattgttctcagcacttgccatctttttcatcatgtcatcttcatgacaaacctgtgaggtaggtactcttattaaccccgttttacagataaggagactgagtcaatgagagagtaagcagtgtgtcccaggtgacagagccaaggatttggatccaggcagtctggctccagacccacactcttaactctcatttgaaaggcttacatcatctcaacgtacccttcagaagatgatcttttttatttggtatttgaagccacacagaacaataaccaattcgattaaaaaattaaatattggagttttgagaggtttttaaaatgcctatttatgggttgaaagggatagggtgcagtcttatcactgaatgtggtttcaggttttacggtgaaagatgcttcttactcctattccaccaggaatattgtctgaatatcgaattacctaattaagtgactgttggatgacaaagtgttaactgacagcccaagtaaaatcaaggttgtctttaccaagaatttaatctgaaggaggagagaaggaaagctctcccatgggatgacagtgttctgggagacaggctggatgggtggagagtccttcttaaatgagaagattctggattccttagcaacaggatggactggagagaccactgattcatttaaacacaggagtcgtaatgaaaactctgccaacatcatgccatacaagtctaatcaatttaatgattcttcagtgtgtctgtgccagtgcctccttccaaggctttgggcagtggggccagggagggaatggtaggctgggaggagaaattgaggaaacctgacttggtgaagcattgaatgcccctgacggtttgcctggttcatgtacttcgtatgtgagacttcttgggttcattcttatggtaagtgccccttaaaatttattcattttaactttttgtagaaaaatgcaccataattttgaccaccttaaacatgtttcactcacaaatgaatttcagaaaaggctagcacatgtaattgaagttatataggcatttgcagacttgactacctgaggtgtatggtgttcagacaagtttccagaagccaaagaatcaaaaca

SEQ ID NO: 136744 - DNA, 1845 bp, Homo sapiens
gcttcatccaagatgatgttttgctgctactgttcgtttctgggggcatttatttggtttattgccctcacataaaacaaagtcactctctcgccttccttcaacgaataaaaaggatggtggcagtcacctgtgatcaaatagaagaaaagcctagagaaacaaaagggagaaaacacaaggctttgtggccagtgattggcacctctaatgggtagcctgggagggacgggcagcaggaaatctgggctgtttgttcctctccataagggcaatgaggagggtgtattgagtagtgtgtttttcctatctttttgttcagtgtcagttaacaatggccatttcctagctatttgatgtgcaagtaaacgttgtgcagtgcacattaaaagcaataatgttctggtagagcgttgctaaggaaccgtcaggggaagctaattttaaatgtctgcaccagccatcttttcactgctgagcgccactgaagtgatgattttaacagataaaaatcttatctgtcttccacccacctccacatcccccaccgccacccgcatccccattctgactatcttaggtatctccttcttctagatgtcataattcataatgagaagatcatacacaggcttgacagaatcaggtgctttcacgtgtctcctcattactttgtcctgcttgcttttactagcacctactacgtaccagtggaggtagtagggatggaaagaagaaatgacaaattccttgccttcaaggtacttatggtcaattgcagatacagaactccaaagaaattcaaatcacagtacaatcattgattactgtatgatcctggccccttgaactggcagcttgcttacctgctctggaaagttgctggctgccctgttggcaccctgggcatttcttccacatctaaacaagaggttagtagagaagaagctacagcaaggctcatgactctgcttcttcataggcagccttgacttcctagactcctttttgtacctgagtttctggtccaccctaattagctgtaaggtgaaatcctttgcaccatctccctgtgtcccgcttttagagtccttaaagctagataccacatgggtgtagaagcttcctggaagacaagaaatatacctcctctgatatggtatttagcagtcagtatctctgatgttgatttacttacttgtatggaaacttgggaaactcaattcaggccacctggatagtgtttactaaattagtgcttacggaagaatttcaggccttaagggctgatttaagttctcaaatgtgggagaaggaagccttgtccgataccaattccattaacttaagttccggcttactcagtggtacccttgtggcctgagaaaataaattcacattcttaaaaaacaaaacaattaaatacacaaaaaacacaagagagtagctaaggtattggaaaatctggcctatcattctgtaataccatgatcttggcatttcctcacgttttgctactttcagctaactcaggctttcttacaggcctttttctccccaaattcaagtggataaaaagtttcattattgtaaaaattaggctaattattgatgcactcaaaaaagtggtttttggatgctttctttccaactaaaagcacttttgttttttaattttgaaaaatggcatatgtgtgtgtacacacacatataccgtcaagtttggcgggaacatcttaccagttggtagatgtgttcagctgatattaagcagaaattcttgagaatcttaacatcttgggattacaaagtctttcaaatggaagagccttgaaaggtcatttt

SEQ ID NO: 136745 - DNA, 1175 bp, Homo sapiens
atcccagcactttgggaggctgaggtgggcagatcatgaggtcaggagttcgagaccagcctggccaatatggtgaaaccctgtctctactaaaaatacaaaaattagctggacgtgttggcgcatgcctgtagtcccagctactcgggaggctgaggcagaagaatcgtttgaacctgggaggcggaggttgcagtgagccaagatcgtgccactgcactccagcctgggtgacagagcaagactccatctcaaaaaaaaaaaaaaaaaaagatatacagtttttttttctccaagggtaatgatatagataaactactgtatggatttcttcttccctttaaagaattacttcctcattattaagcttgagggttttctttgttatttatgagcaagtgaaatgaatttataatggtgttaaaaatgtaatcatggccctttaatatctgttttctataaatgtaattttccattatttgtttttgcttttattaaggtgaggaagatcttctcagtcctccccaggacacaagcacagggttagaggaggtgatggagcaactcaacaactccttccctagttcaagaggtaagctccaatacctagaagggactcagatttgctgggatcaggccactcgcttccctacccaactggtgtgtgtattttccatatggaagccaacacgcagtatcagaatggcaatttgggtccatggtgaaaagatttgatttttaagtgtgaatttgtggtttagagtactctgaattcaaatacccgtgagggcaacatgtttccaaaaataagaataccaccctctatttgtcaagtattttacttgcttcacacattagtctgaagagttaattatgaggtgccctttactgaagagcaattattatgtgacttttacagatgaggaaattaatgccctgatagtgcctttgccagggacatatggctactacgtgctacagcaaggcctagaacaatgcctactgattggtagtggtagagattctgacttgccatctgatgccctttatatttaaaaattgtatcttactccatcatttaaatatagggacaattaaatcttcatagagtagttggttattttttacttcgatagaggaaatacaggcttagcaaagaaagacattaatatttt

SEQ ID NO: 136746 - DNA, 1045 bp, Homo sapiens
ttatttatgtacttttacattcatgtgttgttaaatggattgcatatatttagattaacatgtatatctgtatgttaacatatttttatatactgtatatgtttatattttatgtgcatatttaatcatattcatgcgtgtatatagtttgtggatttttttttcactgatccactcaatggttaggtttcatacataacacttcacccctaaacacttgaacacgtgccttctaaaatgaaagatattcttgcataagcacaattatcatgctcaaaaagaacaatactgttatataatgtagaatttaaattcaaatacctccaattctgccaattaatattcttcatagcgatattttacattcaggatcagtgatgtccctgtagtctcctttaatctgaagcactttcccagcctctttaaatctttcatgacattgatatattagaagaggtcgggctagatgttttgtagaatgtcccccaatttgaatttgtctgcttgtatccaagtgattgggttcgggttaaatgttttatgccagattaccatataggtaaggtatcctcagtacatcacatcaaggttttcctcaagattctccatccccttcaccgttcttcactctccctgggcgctccttccatactttggcttctgctatgctgacaactcttaagtcaagatttccagcccagacctcccacctgagcatcttctggataaaattataaataaaaatatagcctaatctgaaatcatgatcaacctttggagcatctcttccaatttcccaatctatacaaagtcattttctaccccttcttcctttacctgccttccttagctatgttccaccaccatcaatccagtcaccaaggtcagtgtgttttgctacttatgaaaaagagcaaaattcttcaattcagctacttctgcccaaatttagccctcatcatgtgttacctgaacagacaatatgaatactttcctaattggttcctctgcctttggtctctctccctttctaagctatcttcca

SEQ ID NO: 136747 - DNA, 1051 bp, Homo sapiens
aatttctacatctaacatggtgcctcccagcgagctgctgaagattttacttggagatcactgaggggtagggagtacagttcatggagttgatgagaccaacgttgctgagcttatcagcagaggggtgaggtccagatcctgacgacagtggtagatcaggatggaaaagatgttgaagaagatggacgagggctctgaggagatgaacatttctgaggaaagagacagggtagttgaaataaatgtgatgaagttcaagaacctggagcagtgggaagaggcacatcctcctctggagaagccaaatcttgtaggaaagccaggttttgatttttttgagaaggaaaaggatatgtttgaggttattttcctgaatttactacacctccatgatttaaggcaatctctgtgtcagattatctccctccacctgagatctgaatatagctaataaactgttgggattgtaaatgacaacacactacatgaaaaacaactgtatgcatttgcaaagtctgtaaattctgaaaacaactgagctttagtacctcttatttttttctacttcaggattttcccccttttttaagtaagtaaagcatatgaaactaagttacatattttagtggtcagattcagagccctgggtgcttagaagcattaataattatttaggtcgttgacaatggcgaataggcagcatactcgttaaagcactcaaattaaagtgcacattaggatgtggtcctgatgatctgtggagctaaaaagatcatggtagaactgaataccaggacaaaagtgctatattccaatggctaagctaagagataacttgctggcataaaatggataagctgtgttaaatttgtcctctgaaagaaaagactgaattcaagggtactttttcttgaactgtgtattaatctgttttcacactgctataaagaactacctgagactgggtaatttatgaagaaagaggtttattgactcagttccacaaggctggggaggcctcaggaaacttacaatcatgggggaaggt

SEQ ID NO: 136748 - DNA, 1022 bp, Homo sapiens
tgggaattttaaatttttcaattatgttctctctatcttgttacttaatacttcacaaagatatgaatcttccattacagttttgagatctcacatagtctcatcattcacacatgaccttctaaatcttccagttatttaatgtaatgatgtatagtctcattccagtgtagctctgatttttttctcaaatttataagggagcacaattcagatacaaagacagtttctatggattatatcaacagtgaaatatcccaaattaaacaatctttgggagggcttctaaagtaggaagggtcaaaatttatgagtcctgagtgtgtatcatattttgaaatttatacatttgtatgtttattatgaaaagtaattctgttttcttttggatgacttagccccaggcagaggccaaagtgaatggcacaacggtgtcctctccttctacctctctacagaggtccgacagcagtcagcctatgctgctccgagtggttggcagtcaaacttcggactccatgggtaagtgtcctagctactctcagattttgttgtctgaagaaaggtagagtcgtattacagggacatgaatatttggccgtaagtgtttgactcatcttggtatcagggagccactgaaaatcatataccaggcgaaaaaagtctaaaaagaaaattctaaaaaggtgtattctggcagctctatctggcccacagaaaacttgtataggtgagaagaccagttaggaggcaattgccaaggccaagattggtgagttctgagggcctgcacttgagagatgtgggaggagaggactgtgagactattctataaaaatagacttgccagggggctgggcgtggaggctcacgcctgtaatcccagcactttgggagggtgaggtgggcggatcacaaggttaggagttgaagaccagcccggccaatatggtgaaaccctgtctctactaaaaatagaaaaattagccaggcatggtggtgggcgcctatagtcccagcta

SEQ ID NO: 136749 - DNA, 2075 bp, Homo sapiens
taaaatttacatcttttataccataggatgccataagcaaagttaaagataagctacactaagataagggtagaagatcatatttgccatgcacataactaacaatggattagcatctagaacatatccaaaggtttaaaaagaaaaagacaatccagcaggaaaatgggtaaaggaagcatgaaaagccagttaacatggaagaagtctaaccttgccagtaatccgggatgtatgtgcaaattaaaatgcacccatcaggttaactaaaacttgaatgtctgataacaccaagtatttggtgaggaggtgggccaaatggaaaacctcattcactactgaagcgagagtaaattggtaaaagcaccgatttgtcacccagagcgattcggtgacatgtagcaatgttgaagatgttgctaagatccaacaattccacatcaaactatattctgtaaagaatctcttcaacaggtatccaaggagataggtataaaaaagaatttcattgtatcattgtttataatagtgaaaagttggaaacaacctaaatgtccatggacaggaaaatgttggcatattcaagcaacagaataataataccttatggcagttaaaatagcaaactattatgtatcgacctggagaaatctccaaaatggtgttgaaggcaaaaagcaactcttagaatggtatgtatattcttaaatgtgaagttcttaaatttaaagtttaaaaacatgcaaaataatgttattagattgaatcacataaaatgggtgtttttgtaggtgaaagaaaaatacaggcaaacatcagcatcttttttaagctcaacctagtatttgttgatacattcatggtaacactgggcatgaaattcagtgtggcattatctccttgagggcagcggggaggagagaatggtatggtgttgaggcgggcatgtgagggagcttctgctttggctgttaacttttctttcttcaaaaaacttttgaagaaaatatggcaaatgataaacttatcaaggggaggtgataggaacatgggtatacttactccattcttatacatttctgttgaaaatatttgctaatgtttagagcaaaccaaagtgttgatagaggtataaaatttttaatctcatgacattataaagaaatatttacaaagtgattaaatcctttgctgcttacttatctgaacataccagtcgcgaggcttttagtgtaacataaaaaattgaaaagcatggctcccttcacacaccaggcaaaagcttcaaattttgttttgttcttttagcactggtaagattgtcatcattaaaaccattcattagtgcctcttttgcttgctgttcttcggtggcagtcagatgcatctatctaccatggtatataaaatttggtgatgatattcaaattactttttttcttctttttctttttctttctttttttttcttttttacttttttgatgccaataggaatctgcaagcagaatatgaccgtctaaagcagcagcacgaacataaaggcctgtccccactgccgtcccctcctgaaatgatgcccacctctccccagagtccccgggatgctgagctcattgctgaggccaagctactgcgtcaacacaaaggccgcctggaagccaggatgcaaatcctggaagaccacaataaacagctggagtcacagttacacaggctaaggcagctgctggagcaagtgaggagagagatgggatttttacaaacattcatttttccctcttaaacaaaactaaacctcagagagcactttttataggtgcaacaagcatcaattcttaagtgcttggtatgtgcctgcaaagtgatagtatcaaaggatagaagtagaggagatagaaaaactagtgtgtcttttttgtatttgtccaatattgtttcctaccaaaatggttttttcttgaccaatttgaaatacatcttggggaaaaaaacgcctaaaggtttccactagttctctaaaagtgaatatttcacttcttgaaatggaactatttcatttacaattagttata

SEQ ID NO: 136750 - DNA, 1016 bp, Homo sapiens
aaattagctgggcatggtggcaggcacctgtaatcccagctactcaggaggctgaggcaggagagtcgcttgaacccaggaggtggtggttgcagtgagcggagatcgtgccactgcaccccagcctccatctcaaaaaaaaaaaaaaagatgcttaaaggcataaataaggggtaccactcgctaaaataacaagaaactaagaaacagagatggatgaaatgtaactaggtctgaaaacaaagatatctttgccaaaaaaactagtcattgaagttactaaactcaatatacaggataaattctagactttgtcctgtcagagaaggcaagggaattagaagatgatgctgagaatgttactgtgtacaacactcacagaaaaagataagaaatataaatgagcaattaggagaaatggagaattgaccacaggctctacaatataccttactagaatttagaggtttgtttaggagtgtatttgagaggtttcagaagaaaatggaggaaatggtagagaagtaatatttgaagctgtcatagctgagaatcttccagaattgaagaaggatgtgagtcttgaaggaaatgtgctcccaagagaaatttcaaacatctgggaaggaaagaaaggcctgcattgagcaattgatattctttacagctcagctttggctgattaaaatgagccttttctgttttcactggaaaccaccaaaacagaaatgtaatgtgttgtatataccaaaccatgcctcttgaacaagggtccttataaataaatcataaaagaagagccctgtggacaactaaacccacaggatcaagataccaaggaagatctctctagaaaaggcagtctcctgtcagcacctttgtgaaaaataggtgggaagacagtaatggcttgttgtaccatcttgaggtccatgtctaaaaactgttttcaaaaggaacaccatggctgccccaatctggtagaaagaaaaatttgaataggattctacataaaa

SEQ ID NO: 136751 - DNA, 1429 bp, Homo sapiens
ctcaacctcccaaagtgctgggattacaggtgtgagccattgcactgagctttattgtaatttcaagggctcaatgcaatttccagtttttaaagttcatcttgcttgcagaatttgtctttcatttaaaaaaaaactgctgattggctacatttatagctgctgtaatagttctgtatgatttactacatttgcctgaatttagattggtggatatgatttagctgcttttaatattatatgagggtaaagccagatttctttggatctattccttttagatggcaatctttgtagttgttctactttacaaaataatccctgtgtgtgctcatgctttggtatacagttaaatgtatgatactgttaagaaaacattgatcactggaaagtgaccttcatttctttatttcataaatatcattatacaactatataactacacgtagtagggaagctccatttaaagagtagatgacttacactgaaatcatttgacctttgtaaattagtttaaattacacagagattgttgtaatgttctttatcatacataatagttacgattgctagagaggcactcataaatcattgctaaaagggccagctgctttcatgttttcagcaggttgagttaagggaacaagccttgccaatttgattaatctcttatgtccattagttggttgggaagtttttttgagtgtaaatttgtatgtagacaacagagtttatattctttatgacataaaattaatcagatatatctacatatttgtagaatggggggattcttagctctatagagaataagaaatactggatggaagactttttttaggatgactggctacaggaagaaattgtagtgacagaagccatgtgtattgaatttgaattaatgttccttagggagctaccagagaaatataatttacaagataatcaagaacgtaaatagattctctgtggagtcgttgtctgatcactgacatatattcatctgtattgaaatgacttcatgactacattctaacaattagagaatcattaggggtgagatgtacgtgtataccttcaagaaaagcaaaatatgtattggtaataattgacagctgttaaaacgagtgcattgtgtacttgttaaacattagaggctgggcatgttggctcacacctgtaatcccagcactttgggaggccgaggcaggcggatcacgaggtcaggagatggagaccatcctggctaacacggtgaaaccctgtctctactaaaaatacaaaaaaaaaaagccgggcgtggtggcgggcacctgtagtcccagtgactctggaggctgaggcaggagaatgtgaacccaggaggcagagcttgcagtgagctgagatcgcaccactgcactccagcatgggcgacagagcgagattc

SEQ ID NO: 136752 - DNA, 1732 bp, Homo sapiens
aagaagttattctgggctgggcatggtggctcacacctgtaaacccaacactttggcaggctgaggtgggaggatcacttgagaccaagaatttgagaccagcctgggcaacatggggagataccgtctctacaatttttttttttaattagccaggcatggtggctcatgcctgtagtcccaactactcaagaggctggggctggaggatcacttgagcccaggaattcaaggttacagtgagctatgattacaccactgcactccagcctgggtgacagagcaaggccctgtctcaaaaaaagaaaaaaaaaaaaaagattctatagtttctgtcattgtaatagaggaggccataggatcatatatggcaagagtatatagcagtgcatgccagggagtgaaaaataggccatcaaattgaagttactgggagaacttaagactaagtctaactacgcatgagggattgaagccgggacacacaaagcttaaaattatgattcttctagagactgttacggctttttgctgaccacagacaatgaaagtttgatattttgctgtatttgtctgaaaatggaaacacacttttcccaatggcagtattcctgaggactagagttcttcacctctaaaacctctccaatcctagtttttccttttggctgatgatgaccagccactgccatttttgtcttaggttttgttagtctgtcttatttccagttataagtggttaaaatttcttatgaattcttcttgtgttgaacttttgattaatacatttagtctatagacagtaatgaattagcatctgatcaggaatttgtgaaaaacatctcagtcattaaagattaagaaactgaagccaattaatattgtcatgttctgtctcttggaacttgagcaagatacagatctacgtgtcaatgacatatccagaaaatagactccacctagatacattaaccctgtacccttggtccacatattttatttcagcaatgatccatggacatattataatttgacagtttcatcacatacctagcgtattgggtcaaatcaaggaaatctcatcctagtgatcttaactcagtgatttcattttgcccagatgttcagctgtgataaactttactaaggcacagatgatggatgatacacaataattccaaaatttgggggtggctacaatgtggctaggggctagaactcaggtatctacaggacaaatactgagtgattagtcactttctaagcgctagatatgcatatgttctgccaagctcagtaggtctaagtagattgcttccatttcagataattaagtgctttctttttataggaagtttttagcacatctgaggttctaaatccaaaaagtaaataatatatagagaaagaagtaataacaataataatagtaaccaacatttattgaacacagtatgggctgggcatggttcaaagaaagtttgacatatagaatgtcgaccatactggcttaataatcctcataactgaattagtgcttaagtcagttgcccagcctcagcaagcagcagaggcaagtaagtcataaatcaagatcttctgaatccaagaccatctctcaagccttgttctaattctctcctcagccatggatggtgaaaggcaccacaaaggcagcgtgtcaaaaagtggcattgttcaacctttcccctgatggggcaaagcttttatt

SEQ ID NO: 136753 - DNA, 1016 bp, Homo sapiens
aacaatatcccacactctagaatgtgagctcttcaagggtaagggacagtgtcctacatatatctttatctccacagcactgggtacataaatgtgtcataaaaatgaatgggtaaatatcctttggagtttttctgttacttgatgggtttttggggttgattttcaggtatctcccttgtttttctcatttcttacattattttctttcccaaaatcccttaatatacctgtttagtttgtgatgtcattttccattagactgaaaccatccaagttgtttaggctaacccagacttaagcattttctgggcttatttttggactctttttaaaactcatcatctgaaaatatttaatgtccacacggataattctgaagacatgtgcataccatttttcttttatgtacatgggttaaaccttgatttttccatagtaggagaaagcattataagattttattgttttcactggggtaatatcttttgtgctataagaaataaaattttgaatctagaacttagttttttataagacctttattgagatataattctcgtaccataggagttacccatttacagtgtattagtcactgattattagttaataggttaaccagtattagtaatcactggttattaattacagagttgtgcaaccatcagcgcacaattttagaacatttttatcaccccccaaaagaaatcccatccccattttcaagtcactcctcgtttctcctgcaactactcttttcagccctagcagtagacaatccctgatctactttctgtctctatggatttgcttattctggactgttaatgtaaatgaaataatacaatataaagtcttttgtgactggcttctttcacatagcgtaatcttttaaaatggtatctatattatagcccgtattagtatttcattctttctttaatgctgagtaacatttcattgtatggatataccacattttttaatctattcattacttgatggacatttgg

SEQ ID NO: 136754 - DNA, 2458 bp, Homo sapiens
gctgccatctccctagaacatgctggataagagtttatgttcttacaatccaatttcccttttttttttttttttttttttagatttttcatgaagaccctcatcctcctgttggccttcatttgccaattgtccctctacagtagaattgattatggtcatgagtttctttagctactttccaggcctgaggatgtaattctgttcaattctgcagatagttactgagtgcttaatgtaattttaaaattatgagactacaaagatgaataagccttggttcttaccctcatggagctcaaaatttattttaaaaaagttaaaatagaaacaactacttatatcctactgttacaagtgctctgggggcacagaggtgaatgatttattctatcagagggagtagagaggcctttacaaagagagtttaagagttgaagactgaatgggagttttccagtctgagagatgggggaaggatgagttttccagactggtggaccagtgagtaatgtgtggcttggaatgaggagaataagagggcagtgggatggtaggtggggactactgtttaaaggactttgtgcatcatactaaggagtttgggttttatcctataagcaggtgaacagtgatggctttttgacgggggggaggattgagaaaaataactgacctggcagaaagctaaagccatgaagattggtagaagcacagtggaatagtccattaaaagatgccaggttcttaactaaggatgtcttaggcaagtgaagaaggggatggagaaattagaaggtcactgaatgaatgagaccaagggaaaatggagagggggaggcatctggtgttacggaaagttttaatttgggaactgggaaatgatcattgaaaaacaaacaaaagcaacctagtgcacccaggaaaaactcctgatttgcaaagggttagtgcatggagagaaagagctacgtatcagacatactgaattctatttgcccaaggacatttcaagtggaaatttcctatgttgattttacgtattcagttttcagaaaggattctttaaaaagtcatagcaatacaattcctgcaatataaataatagatcaatgaacatcatagggattagcatagttgatttgactaagcttcagattcagtttgagcttccctgtagccagggagataataggaaacaaagatttgtctgtctcttaatattgaattaaagaagcacgcagcatcctaaagaaacatcattgttttcctggctctacgtaataataataataacaaaaatagctgtcctttgagtgattgctatggacaggaactgttctgagtacatatgaactcctatttaatccttaaaacaaccctatgaaagagaggctgtttccagaggattacgtggcacagagtattaaggacacttcatatggccagcaagtaataggacctgtattcaaacttgggtggtggtcctgaactcttaagcagcgttacacttgaagtgattattggctagtgtccttatcaacatttttataacaaatcccaagggaaattatatgtggctgtttctcatggcctttgataattgtggaaagcttaacattaaaacaccaaagatagggtgacagttctccaaggataaaggtcactgttgcctaaaatgtattctgcagaataccactgagatactctgagaaaaaaaggattccaaggacagtaaaactttgaaagcactcatactggaaagtcatcattacgttagcatttgcactgaggagtttggaagtgaagaaacctgattagctttgtctaacctcatgttgctcccacttacttgacctcgagcccaactgcaatgttatatggaacacactttggtaaagaaattcaagtctgaagtaaactttgaaaaccagtctaggagatagcatagttgactctctactgtagttgttgagaagcctatccgttgtgtctctgggaacatcagaagataaagctataacaggtgcccacgtaggaagcctggatttttcgcacaaaagtaacttttcatatgctctagtggtgaagcagttaccctgtagacccagaagccagaatgatttagtctgaaaaatctaaagataggtattaaattaactctcatgatcatagaaaattctttgcaccatttttgtagaatatcccaccgaataacttggcttttcacccaaaccaccaagaaaaattgccaccagtgacttgatgcaattaacttgctatcgggagttctttcttgtgaaatgattgaactttgaaagatgtttaccaaagacagcacctttagcttcatcacaattactgtggaatctttctttgtaagtagttagatgcaaaggccagttgttgcttgaggcctctcctggattgtgattttaaagtgtatcatcaacacatg

SEQ ID NO: 136755 - DNA, 1427 bp, Homo sapiens
tggtgtttccagctctggaggctgccatctttcttggtttcttgtgtttccttccaaacatgctctctacatatgcaaatatttgcaaacatatttatggttgttggggttacttcacacagtgtcgtgcagtgttcactctggttttctctttttacttaaaaatctctaattttcacatgctggagaaatgtgccagaagaagaggagggcagagcttgggaatgatgggagcattttcccacaggaggcaggagagagaagggttagggaactaaagtatgggaggaggcgtgaccttgaatgagaggaaggactgcctctgaagacaaagtggtaggtaaggaatttagggtaaggaagggaggaaagaagcataatggaatgaatgttaaaatgtccagtagacatcactggaaataattcaagactgattcctacggctgttcccacatgtttttaaagttggagtggagaggaaagcgtggtatatgatacatttaacgaaactaggcattcaagttacttggtgtattagtccattttcatacggggcaatttacaaagaaaaagaggtttaatggactcacagttccgtgtggctgggaaggcctcacaatcatggcagaaggtgaaggaggaggaaaggcatgtcttacacggtggcaggcaagagagcatgtgcaggagaactgccctttttaaaaccatcagatctcatgagagttactatcacaaaaacagcatgggaaaaccccacccccatgattcagttacctcccactgggttcctcccatgatatgtgcggattatgagagctataattcaagatcagatttgggtggagatccagccaaactatatcatttggtgacatgggccccaaaacaaagggctacagagcccttcttgagacaaagggagctagtttgatcacagaaatcagaaagccaagaccttttatggcaaggatgaataagagctgaagggcatacatgccacatttaagaagctgtgtaagaatggggtcaaccatctcagctctactcaggcagggaggacaggaacatggtagaagtggaatcaccattattcacagactcagtttctaactagcagggccagtgtaactaaatttccttcagtttatccaaagttaattgaagtctgaggggactgattcatagtatgcagttcatggcagtgaatggataacccagaatgaaagtttatttctccctttatcctaattatctctctttttaactgccttgtattaaaatgttatcaaggttgccttaaagcttttttaggaggagacagcatctggtttaagtgcaaatactagatctattaaaatgaggaatatattcattttttcggcacacagcatcctgtgtcttagaatccagtgtcttaggaatca

SEQ ID NO: 136756 - DNA, 1038 bp, Homo sapiens
agattgttctcaagtcaacaaggtggctaaatattaacctaattcaccataaagtctaaagttaaagttgttagtagatgttatataacacgagggaactctgtagattcttaatacctactcaggacctttcatatgtcttgttgggcagtaagaccttatgaagccaaaatttgagttttctctttttcctttaaattcctccagtgattgtgcaagattattattgttacagtcaaagaagttctagatcagttactgataccactgaattaaagtagctggaaatcatgatcccgttgctttactttgtaattgacttgatgactttggacctagtctagtagctatcaatcttcatagctacgggaaatctttattcaatgttctttcattaggtctttgtgcaagtctccaatgatggtgaaaagatggccaaaatgaagggaatctgaagaggttaggaatgggcattcctatggaatataaacaaaggtgtcagggtgaggaatggcagagtttgtttgagggaaactgcagttgtattaccttttttaagaaggcaaagaatgagaggagatgaggctgaccaggtcagcaagggcaggtcgggaagggtgtggtacccactgcagagttgctgcctccgtgcctagtctagggagcaactcaagggtgtgatccaggagtcaggccatgatattgacatgaatatacgccacacaggcagctgtgcggagggtaactttgaaaagagcgatgctggaacgaggaaatcaagctggggggagtcacatgggagcccaggaaagagatgattagagccttaagtaaggtgatagaaatgaagtagacaggctgatctgagtgatatttcgggggaggatagagctgtttgattcggtagttctgtgggactagggtatgaaggaatgattcccagggctggtaactacaaaacaagatgatagtagttatttgcagctgggactgataattcaggaggagttgcagcaggtccatcctttaatgcagcag

SEQ ID NO: 136757 - DNA, 1066 bp, Homo sapiens
ataaccgctttaccctggaagatatccaagaccattctccaagaatgggatggtttgttctctaaaagaacaaaaaacataacaccaggcctacttagagctccaaaatgaggactctggggttgatgcaaatctttgtgtaagttaccttgaccttcacgaaatgatcaggatgagcttccttcattgtcccttcattttgtcctatttgaccttctaccaaattccaaagaaatgtctccacagagttcccttcctgaaaacagcccgtgtgttttctttgatctgccctgtcctgtcttcttgcagttctgcgcaaggagcttcagagccctagatttgccttcgctacccttgaattcagtgttgcttaaggagcctttaatttgccatttcctgttgagaaaacccaggaattctttagatgccctctctgtgcatgtctagctggctatgtcctaagtcagcattgggctacgcaatctgacaaatacgagcatacttttagagaaaataagaaagtatatttaaaattgagattgccccaagtcctttggatgtgtacttattgatctgttaatatatatattttatgttcctttagctgtgatttatctccaaataacagcaaaagagagaggcctggagagccccattcctgactagatatttattaaattccattaattgttcttattcatgacacctccctacaaccccctagaaaaacagaggatggctgtttgagaagtgtctcagaggtatcttatctctgcctttagaattccatttctcctggttgttgcacatagtattcaataaatatttgttgaatgcattaatgaataaatgaattgaagctgaatttattttaattgtagcatacatgcatgcacttttgactaaagttcttttacaaacctaatttcgtagagaaaagcctttcaaagactttgttttctgcttgcttttcaaaattctcccctttttcaaactgccttgattagcaccaggcatggctttgtcataaatttagaatgttaagaacccgttttccaaatcacag

SEQ ID NO: 136758 - DNA, 1045 bp, Homo sapiens
gggcgttcaaacccttccacaatattctcttgacttgctttttctatgccatcttcttttgttctccctgtgttctggctatgctgttgtagctagtatttctgaatacatcctgctctcatctacctttggggtcaagctcaagcttgagtctcagcctaactgctaacctctaacccaccactgccgtatctgacaaaggaatcccacctatcctccatcacactgctcaaaataactttccccatggagccctgctagatccctgcagttggaagaaatctgtcttttgcctctattcccagagcactttggacctttctcagaaaattccttgacagttttcctttttatcagttattaccagtgcctctctttaatgagctagtgtgtgtctttggggcatggactgtatcttaatcatcttcatatcctccagagtacttagcatggtttgaatatttaatggctactcaggaaatgtttgctaaaaacctgaaaatacagcaagaacatcacatgagtaccatccacgagataatattgaactttttttgttgttttaatgatagctttatttttggccgtacttttgagatcatttgtcagtgaagaccatggtagagaaaacatttctactttattgagaataatcagtaatatccatttatgttaaatctgtaattattgtaggggtcaaagtcaaatcggaataaaaagttggaactgacactgtaaatagaatttgatgttaccaaggagtaaatatatttttgaagtatatgatcgtgtaatatatcttttgagctcattggtcaagagccctgcctcgtttgtggttagcatagtctttctccgtaccattgcacccgggtcaaagaatgtttgtaaagagtactgataactatcatttatttatcattttatcattttgagtgcacttttacatattttagatcatttaatcttcttacaaacgctatggagaagagactgtcgcctttctgtgaatgagacacaggttcttagaggttcacacagcttg

SEQ ID NO: 136759 - DNA, 1008 bp, Homo sapiens
aaagtgccaggaatcttcacttagagtcattttatgtctaattgttttctaaaataatctgtttagctccatttgcagattctctctctcttttttttttttgttatctgaaagaagacaatggatgcaatagtatgatgaagaactcatattttaggtgtgaaggagttaatgctgatggtggtatttgacttgttgcatgtgtctccaaggctttgattttatatttcagaatagaatttaagaaaaaagtaggttatttaattttatgattatatgattttttttacatgtgtttggccatattatctacctcaaacatttaagaaagtagggttattggcttggtcatattgggaaaccaattgtttcatcttatttttcatcatcaaatgcagaaattattatttatgctcaccatcatagcaggttagtgagacaattccaattgtcagccatcacctgtaaaagacagtcatgtaaaaatagcagaaattgtagaagagaaaaaggctaaagaactctcataatgactgcagggaggacaaagatgtaaacatctggggtactgtattgtgtcaggataatgcaaatcattggactttcagttctgtattacatttattatgtcacaggtcccttggtttaaaaagtcttctcacatgatcacttctaactcacaatgtgccttcttcagacagatgccaccaagcaaggatttaaagtagatgttgctcagatttgtgggtcttaagtactttcatctctttggttgagcccaaggcaccaaaagctcttaacgtaggcaacgcagtgtgtctgagatcagtgccctcgggagtatgccacttcaggatgaaaaaacaaactgccactcttccattgcttcctgctgccactgcgagccttctagctcttaacaccttttacctatggccatagctccttatctggttggcttccctttagtctctttcccacccttgcaataaatcctccatactgact

SEQ ID NO: 136760 - DNA, 1035 bp, Homo sapiens
tctagcagtacaacttcagaatttggaatgagtgtgataaattaggtggtaaaactgcttttgttttattttaaaataagctttagcttattctgaggacataaaatccattttgactcaatgttggatggcaaaaactcatggcattttaggggcaggtttggggaagtggtttggtggattggttgacttcacttaaatgtgtgtttttaatacccaataattatttttagtcagcttttcacatctaaaccaggtaactggcttgataaacaaaaataattcaaatgagaaggactttttcctaaatttctgatatttttcaacttaagtgggtatggagaggagaatattagcgtatcatcttaatgatatctaaccagaaacaatgagctttagcctgtcattacggacagaagaaaattcttataacttggaggtaaacaggcctttccggagcttggagcaatgcattcagaaaaaagtttgtcctgtgtattagagagttcctagtttccaggaaagattgtagctgcctccccaaatagaagcctttttgcctccttttcccgcaagattagtccttaaaaccattatgtataaatttaaaaataaataaaacttgtatttaaaaaaactctgccccgaggaatgagatgttcagtcttcttttaatcagtcaccttaatgtcttttttccccttaattttcgttcttctgtctaaacaataactgaatgaaacaatcatgtatctccagtttaattgttgttgtcattctgcctcaatgacttatataagttaaaactgacttactgaagcaatactttttggttacattgccttccacttaataaaatatttcctctgttacttttagagctgcaaggtattttttcctactcagtacaacaatagcgtgggttagtgaacagattatcttgacaggcttggtggccaaagcattatacagccattattatatcttttaatattttttagctattgactaacatcaacgtagagtcccagtatt

SEQ ID NO: 136761 - DNA, 2853 bp, Homo sapiens
tttatgcctttacctaagggctttctgtgtcagcagagaaatggaagagaccttttgtgctattccaattaaaagaaaaagtccaagcctaaactggttttcagaacagatggttttttttcctaaggttaatccaaaagatactataaaaacttcaaggataattaatagatcagatatgaaaggatgaaaaaatgttaaccctaccagaattctagcctatggagataagaaaagataggtgtttatatacaaaaagcatatagactattcctgctaatgatctcctcttattttctcacctatgttttagcacacagtatctctaagaaatatttcagatatcatgacgttctatgaaatttagtcattcttttttaaaacctcacaatataatccagggtcattctattttgtgctagaaattagtggtatagtcttgctgctgaattggaagatacatttcttctttacaaaattgcatagatcaagacatcttgatacatggagttttaagaagtcttgtactagagtagcctctttgaagctaaaataattgtaagtatctaggcagatatacagctttgatccaataagaagatagcctataaatggcgcaggtgtaaactatttaaaattttaaaccacatagggctaacacaatttcggaattataggatgtgagaaattacaaagtaggaggacaaaatgcttcctagaaactgtctcccccaaccttttctacgatgggaattttccagagaagattttggcctctcttcatggcttttaataaaagcagaagtatgagaaatcatctctcaatcctggattttaaaatacttgataatatttaagatataggagcaactaaatgtatacattatccatagaattagaataaaagcattctaggccatgtgtataacataactgtgtggtgggttttttctccattaatggatggtatctgtgactaatcacattttctgccttataggcctgcctcgtcccctcagctttcacacgatgatactcattcacgcattgaacattatgctagcaggtatgagactagttgtatgccaggcaaatattgattgaaataactaaccaaggaaagctaacctatgatattttaaacaaatcttttctttttttccccaaacttgtctgattcctactaatcaacttgccctctaacgtgcatgccgttccactgcatgttgtttttggtcaccaacaagagcattagtccagaataatcttccctaaccctggcttttaaacatttccggtagccttgctatgtttttttatactgagcacatttactaaattggcttacaaatagtttaacctccttagaaaactgctagaccagacattcatatatgaaaaaatgatactatattatatggagaatatgaaagcatcagctttccgtttgtgtatttattttacatgatatgctgtaaagaagagaataattaattttcctaatccttggacttttctgtctcaccttctttgtgtttgagatgatttttatacctaaaaactgaattactaattttaaaatattttatgcttgttaaatccgtaagagtttggttaacttttttagttgtaaaaaaacaaacaaacaaacaaacaaaaaaccccctgtataattgcctgaggtgaagaagattttaaaggtaaaaattggtggcagaatgtttagagagcttactgtgcatccatcctttgtcaatattctaactgctggacatgtttaccaatcgtgaaaagcattagctagctgtgtaagtctgtcatcagtggaaagtagtaattgtcctaaaagacaaggggtagtgtaaggtagggagtgcacttattgttagggaagcttttcttctgaaaacaaagacctgttctcagtgaaagcaagactgatctgtagggggaaaacagtgaaatataactttccttagaatttctatcataaatgtagtgctactaactagctgtggtctaccacacactgcctcaaatggttaagccaacacacacatcctttaatttgaaggattcctttctcttcttgccatgatttatcctttagttttcaggaatgttcgattaggtcttgaatagattctaagacgtcacataagttttaatgagcttttacgttttttatcaggctagcagaaatggaaaacagcaatggatcttatctaaatgatagcatctctcctaatgagagcatgtaagtatcccatctctttttacaaaatgttcctgacaatgaaattgctttgagggatttagaggtaggatagcacaggatataggaattagcatcatattcatttgatcttttaaggagccattcatttacttttttcctttaattcttaatgccctggcatggaatgagctcatccaaattctggcattattagtattcagagtagcaaaaatagtttgccttactcttatttgaacttatttcataccatatgattacaaattgcagagtcccaagtatttatagtaatgcttaatctttgaccaaacctgccagatatttaaagggataggatattaattttaaagtcatggctaagtactattttctccactcatggggagtggaaacgtgatcttggtatagcatggctattcacatatggtaggttagttgggcattttccttcagaaatccaaagaagtagatttttgtgatttagcatcttcacaagataaataaagtgaggcaatcttatgaagagtttccagaggagaagtaccaattcaggttgcaggttgttagcaggatgataagccaaccctgttaaactt

SEQ ID NO: 136762 - DNA, 2120 bp, Homo sapiens
gggtttctaaattttgaactaaactcactttgctctcctctccaagctaaatattcagctcataaacaattatacatttgctctaggaggaaagtatttctttgttattactattggtgtgtattaataatactgagcttagataccagcagatgatttatctcagagtttataatgctagaaaactcttttttggggcctgtgatttctatattagcaaacaaagtgcctattttaaaactacattatgtagggttgttataacaaacttttggtatttcaaagtatgctttattaaaatatttattgaaaatcagacagctctgttatggataaaggggaaatgaccaattcggaagataagcttgtgtaagaattcaatttctttttattaaatcttttttattgttccaccatataatttaatctaaactagatccttttttaaaaaccctgtcgtgataaatgcatattattaattgaggtttattttcagtctttaataggcctaaaggaagtggaaggctatgctttcctttttaaaacttcgttattgcgccccttaattttgagatatggtagctataagtagtatattatctgatttatttaatcatcatgcttaaagaacttagggagttatttaggttcagttatgtcctctgcctcttggaaattgtgtttcctaacccaggtagtctgttatagaagttacaaccgttcataaataagaaacttttaaagagttgatacactacagtttcagcttgattggatcctgataagggaatggatttactctatgtggaaataagtttaaccgagtaagaaatccaaacgacaaatatgctaaagaacagttgttacaaatacatagataaaagtagcaccaaataataaacaaagagtaattaatagtccttgaaaggcaaaaaggagctacacgtaagctaatgagaaaaacattatgacaatcagattaacttattttaagtagaagattttgtctgtcttaaacgttgaaagactttaaaattaataacatcttttatttaaaaatattttctaacaactaaaacacacctcccaatttgcctttttatgaagagttggttagattattcagaaatagtgggaagttttaattttgaggaagaaaacaaatctagcagactgaagtctgtgttttctttaatagcagtaattgtatttaaagtatttattcataggattataaatactgtataaaatatattacaaagccatcctattcaggcataagagccaggtcctaacgtgtttcattttgcaagacttgtatctaatgttaacaaatcctatgatgattacaatatttgatccatttgatatggatcacagaatttgaaagtttccagagatacagaccgtttggttttccttagactaaactcttatttgcttgtgtttgtcatattactttaaaactaaagctaacataggcctttacgttgtctgtccataagtgagccagtcaaacgatattctttgagcgattctgcattgaaacctaaatgaatgtcagcttttaattaatagagttttcataaaagagaaggtggtggtgggtgggatggaattgaccaagtaggtcattaactcttatagtaagtaatccttctgggtatatggttttgtgtttaggaagtgggaagcggggaacagtattattaccttcttttggaagtgttttagaaggctttgcacttagttttgtttgtggactaagtggctttgtattttcactaattcttggtttttaaatgattcatctctgaccagtactcccttttggctcattttctggtttaataaatgtctcttttagtgtatattttttaagatttctggttattgtaagttcttgtgcttatgcatgctgtgataggcgccactgatattaataagaaaaataacatggaattatccttgaggcaaagaattaaagctctgtataagattttctgtataaaatggtattaaagtattttggatttatatgcctacttttcttggtgtacttatgctccaaggtcttaggctttcattcttgtacacacttccaggatagcaactattac

SEQ ID NO: 136763 - DNA, 3482 bp, Homo sapiens
gtcttgtgaaattgctttatcttgacaatgttttgaaaataattgcttcagaaaacttttgtcccatgatgggtaaggggcatgcacagcgtaagtctgtcgctcctggaagttcttttaaatttgagtatttggttttcaaaagactggaaattttccagtaccttcctacttaatctcaaagagttcctagtggagtttaaataaaagctgagtttttcttccctccttccatatgtttataggataatctttctgccaaaatgttttggtactgtaggagaggcaccggaaaaatctggaggcagaaagttaatcacttaccttgtgggactaatgaacattgctttctgtttctcaaattagaacgtggtagaaggtttattaaagagtgttctttgggaatttgattcgaagaaatacatacgtgtttgtttttgctctttatcaggtacaggagtctaaagcactttaattatgacatctgccaaagctgctttttttctggtcgagttgcaaaaggccataaaatgcactatcccatggtggaatattgcactccggtaagtttgacgccagcctgacgtgagagttagttcacctgggataaatttcagttttgtacaatactgcagatcatgtataatgctgtgatttgtcacttccccagatgttccccagctaaagtggctctcaactgtaggcttcaggatttaccctatccctggtgcctaggggagtgcctggcacatatggaacatgatagaccctcaataaatattgttggatgaataaatagggttttcattctgtgtgcatggttgtattgaagacgttttcacgtttattttgcacagccttagaggttgtgtggggcgatcttatggccatgaggcatgttgagtatgggggatggttctaggttcccccaaattcataaactaccacttttaatcaatgttgctcacctattatctgtcctgtatactagtgacattttaaaaatccattttatatgctaacacttactaaatgctaggcatttaccttttaaactaccctgtgtaaaataagtactatgatttttatcccctctatacagatgaggaccctgaggtcctgaggttaaataatttactcaaggttctataagtaagagttgaagccatctcctaagatgttattttaggaaaatgttaagtggccaatagaactgtgaaaaatcactagggaaatggcaaggatgtagacttggtggccagacagacctgagtacaaatctgcctaagaattaaagacaggctcctctcaggtttgttttttctaaaataaacctgtccctgttgactgtagagccacccttcgtgtttctcttctctttctttaattcttacagtctcctcttctctaaactttgcatgcttgctattcaagatacggtctgttgactaatcatcatatgtctattggcattaccttggtctttattagaaatgtgaaaccacaggccccaactcctgatgctctaaatcaaaacccacattttagcgagatctgcagctggttcccatacacaacaaagtatgagaagctctgctttagagcatctctctcttccatcatcagagtgatcctcccagatatttgcctgtctcacttttattcctcttatagagatggtcagtgattgagaatgtaccatgctatgaatagaccgaaatttagtgggtgaagcatgctatcattttgtactaagtagtttttaaaataccataaagtgtggtaaaatttaatgtcacctttttgaccttaagacctataaactaccatttattgagtagcctagtaagcttgtatgtttcttttatttatcataacaacgtgttgaggtgttgttgctcccattttactgatgatcagagcctctgagaagtaaataactcagccaaattagtacatgccaggcctggtttcagagccccatttgtctgattccaaagcctttgctcacaaccacaacactctccttaattacaaaacaagtgtcatggggcagaagactggagtggtcattagttttgaaatcatcctgtcctaaatctgatctcaccatgatctcccttttagactacatcaggagaagatgttcgagactttgccaaggtactaaaaaacaaatttcgaaccaaaaggtattttgcgaagcatccccgaatgggctacctgccagtgcagactgtcttagagggggacaacatggaaacgtgagtagtagcaaaagcagaacacactcttgtttgatgtatatttgaactcctctcagctgaacaccctccttcactcccaaatgcaaacagtctcttctatttctttctttttatttacattagctgaaaagagaaaaataagctgatgtccagttgccactttcccacgtcacttgacaatttctttttccaaaagttaaactttatctcacagggggaaaaaaaaaaaaaaaccacaacacaatacagccactaattgccttacaagccttataagaaatatgggactgtttacaaatgagtgattccagtatttcattttgattttcctctctcacaaatcagtaaatgtgtgtctttttgtatctcattgtgtggtcatatctagtcacttgtttctactcaaaagaaaatatagtcacaggaaactacttcacagtaagtagtaatgattctcaagatcaaaggggacgtcttcacctcttttcaacctgctcctcttttttgccttaactctgatggcagtcacacaactgtgtgtttttcttttaattcactttacaccttggtttggctattgctttccatggttcatacttaattggctggattttatttattttgacctttcagtaaatttttttgcggctgagtttgcgtgtgtctccttcaccacctcattttttgttttgcagtcccgttactctgatcaacttctggccagtagattctgcgtgagtactttttttgctgaagggtgctgctaccaccaacacattcgctcgcttggttctcttttgttctgtttatttgtttgttttcttttgttttgttttgttttatggacatattaattccccttccttcatttcagtttttttttttcttttcttgatgagactttgaaagtaccatctacacagatcaggagaatcagagtgggttttttggttcctccaccaggtgaaattcaaaccagcagaaatcctggcttgaattcaaattataatcaaagaagttattggagttttagctgtattcctgggagacatgtttatatatttcttcatataaaagcaaggaagaagcttctgattacataataacattctttagccatatttcttgagattcgatgctttttagaatctttagggtctgttataagtggactattaaaaatcagcagaattcgttttaaagtatgatgctgag

SEQ ID NO: 136764 - DNA, 1109 bp, Homo sapiens
gcaggctaataataagccagagatcgaagcggccctcttcctagactggatgagactggaaccccagtccatggtgtggctgcccgtcctgcacagagtggctgctgcagaaactgccaagcatcaggccaaatgtaacatctgcaaagagtgtccaatcattggattcaggtattaggaaccaaaaaaaaaatgtcatttttttctcatcatttttcacctttttatgacttgatcttttatctcctgtgccagttgctgttagttcgtaccgtctccaaagtgggagagaaggtgattgggctggaacatcgatcattcctgtcaccctcctgatcgctaggttattttggtggatctcacttattaggctggtgtcccttaccaccttcactcttcagctcttcggagccacatttttggttgagcaggccaaagtgcgtgtcttcacggaggtattacagatgaactgtacctcctccttcctggaaccaaaacatttttaccatctttcctttttcacggtctttcctgtttatagaaacttcccaagaatcagttataaaactgagagatgattctattctgggaggaaccataatagtagctcagtctctcattcactttgcaccatttttttttctcccttaagtaacaagaattgttttcagcatcttagaacttgcttctttatctgtgaatctgattacattctttgtatagtatcccagtgaacttctaaaggaataaaaagtaggcaagtaaatggaagattcacaaagcagctaaaaaacaaccagtccttatacatttagaagtgaaagagataggaaacgtagcaggttattctgatagtcttaaaatatcatggaaaacaaggccaaataaatctttagccctgctgacctgtttggggagacaggatttttttttaaatgaattaatctcacttaacattaatcctaaatcctaattctgaaactgcgatgtccttaaatgtgtgaatcaacatcaaggtttctatagtgatgaataagccacaaagttgtaaactagctctatggtctatgcctgtgcagaatccacttagcagcaaagtaaacactctt

SEQ ID NO: 136765 - DNA, 1994 bp, Homo sapiens
ttataaaggccgaaagggaaatggattattgtacttatttcaaagcttggccatgatcagcaaagtcttacctgatcttccgggtaacaactcttgtatcagagctataagatatagaaaacagtcttgtacatagagtgtggcatttcacatgagaccaagtgttctctgaatggaaacacacactaagagcaagatgtgaaaaaccattgtgtacaacctcatgtaaatgatcccttgcgtccgtacactatagtttcctcagtaactcaaaggtaaaacccaagtatcttgtgtctaagaggatcaaaatgtcaccttccttctgttttatttgttacatgcaggttttgtatagttttatagagtctttttatcactcatttgattttcataaaaattgggattgtttggaagaagagtcattaatattctttacagcttgttcttgttcctccttttatgttctctgctggtgcagacttctctcttatgtaaaatattccactgatgcccttggtagatttagaggttgttaaagaaattgtaataacagatcagggaacagtcagggactgcctgtcctatactgtctgaccctgactaaccgttctccttgtagttttaaatctttgtgtacagactgtaattcaaaaaacagtttttataaatttaaattcagcaaatctttccaaatgctaaggctttttataacgagggctagaaaagttgagttgtcagctattaatgccaatacctattaacaatggcaatgacattgaaatgattttttggatttatgaagggaacatgttactaatgaaaatagcaaatgaaaatggccactgtattagtccgttttcacgctgctgataaagacatacctgagatggggcaatttacaaaagagagagggtcattggacttaacagttccacgtggctggggaggcctcacaatcatggcagaaggcaaggaggagcaagtcacaacttacctggatggcagcaggcaaaaaaagagcttgtgcagagaaactcccgtttttaaaaccatcagatagtgtgagactcattcactatcacgagaacggcgcaggaaagaccaacccccataagtcaatcacctcccaccaggctcctcccacgacatgtgggaattgtgggagttataattcaagatgagatttgggtggggacacagccaaaccatatcagccacaaaggagagattaccctttttaaaaatctgtggtttgcccacaatgttttccataaatttacctttttctgtcaataaaaatgtttaggaattctatttatggatatgtatgtatttaatatttgcatatttagttcttattttttctctaaatggttatgacctgtactaagtaaaatcaaaacacacacacacacacacacacatacacattgtactagcagacctgctttaccttgcttgggataattatctgccatgattaaataaataaatttctgcaactgtttatcctggaatacactgcatagagttgtcagtttgagaagcaacttgatttcaaatctgagtctacaattttagcgtgtttccttgtgacttctagtttggggcttttaatttcccttttgctctctctaccctcagtttatgaacgagtgtggcatttcggcagttgaataggcctatggtagcctcccagtttctgtgttgtagaggatagttgccggcttattaaatgcccttgcaggactctcagggaagtctgttgtttagtgaatagtgatgaatcaatgtggatttcttagttttgacaagtgaaccatatggttatgtaagatgttaacattggggcagggtttctcaaccttggtgctactgatgctttggcccgaatcattctagttctttgttgtgggaagctgccctgtgtgctgctggatgttttgcagaatcctggcctctatctactaaatgctagtagcaccccctcc

SEQ ID NO: 136766 - DNA, 1061 bp, Homo sapiens
cgtgcataaaaatacaatgtttgctgtagggaaagataacaggagtgaaaatgtcctctgccctttgtttgaagtataggaccttcagaatgaggctgggctggttccttcagcaagcttgtgctcaaaggctgctatttctaccagcctgaggtaaacggtaataaagtacttgtttatcctacaagtgcattccttgcattgcagatttgatttcctttgatttcttgtcaccacctggaaaccttactttgtttcaggttggtacagttagaaaggtactgaatcttctgattcagacaagggcccagtagtggcaagaagagaggtacgtgtttgtgtgccacactctctggattatctattaaaggttttctcatatccctccccactaaccacttagaaaaggaaatcacctatcaggtctaaatgtaaaattttgcttatttaaaaatcactataggtcttccaaggaattatccattaagccaggaaatgaagtcacatccatggatatgaaaaaggaatagtcactgtaaatttatggctttgacagtggtatcttcgtagatactaaatgaggcaacaggatatgtttccacattaatagcatattgcagtcaacacatttactgggaaattgactcattttggtagtgatagaagtaaagttttgcaacgagtttaagagatacagctgtaattaatatattgccagcttgttcctttctcatattccatggaaacagccctgttgagagattagattgatttttacgaccttagtaaggccaagcctgccctggcagtgagtcacatagactgcctgaaggaaccttgaggattttctgcacctctcctttttcagatgagaaaacaggcccacagtggcacaatgaatctagtctacatcgtgcaatttacatcatgttatggcttcaaccagttcggagactagattgaaatgacagagtgttaatgtgtcaatgtgatcccctatatgaattttagattgtaatagaatgagatagataaataaacacccctcccccaaaacacat

SEQ ID NO: 136767 - DNA, 1048 bp, Homo sapiens
gtgggaacacatacatgatggactagaagctcagtgatcttatgactccataaagaagtcccaactgtggtacatttttgaatctctggtgtccaaggagggtggtgctttgggccagttatatgtctcttaatgctaaaacacttattttttgatgtagttacatcctatatacaataattcccaaggattatgttctggcttagaagaaatttaagtgtcgagggtacgtgtaagcttgcgcttcttgcagtgacacagtttatgtaaaagttatcacacttcatatatatacagtgatcattaacttgattcataaaaataataaatatccagattagcacaaattagaagtaaccccactctgtggaaatactggctactcttgagaattgctactggaattgagttggatgtcaggttctgctggcatccatgggtgctgtgttttgactgttgcaattttcttcttcctttgtagaccttttcaagcaagtggcaagttcaacaggattttgtgaccagcgcaggctgggcctccttctgcatgattctatccaaattccaagacagttgggtgaagttgcatcctttgggggcagtaacattgagccaagtgtccggagctgcttccaatttgtaagttattcaccttctaggtaacatatttattctttcatattttagaaattaattaaaaaacccacagagcttcgttttctcatattagctcttcagtaggcagtaggtatgggatttgggatatttggaacctctgtaagtaagcagcttctggaactctaggttttgggaaagaagacagtgctgaggaaggaaaagaaatctccatctgcagcagggaccccacagttattgaggtgctagaggggaagaagttcagcaagggaggaaataagtctctagccacagaaatcctatgtatataagaaaatggcctttgtaggcgagtctcttagtctctgagtcctttctctaattctatcattatagcctcctttcaatggctgttggtaaattgttagcacag

SEQ ID NO: 136768 - DNA, 1024 bp, Homo sapiens
aaaaagtaatatgcagcctccagcataaatgggttaagcgcagtacccaacagttgtcttttctgctcctctccctccttccaccctccaccctcaagaccccagtatctgttgttcccttgtgttcgtgagctctcatcatttagcttccacttagaagtgagaacatgcagtatttacttttctgtttctgcattagtttgctaaggataatagtctccagctaatccgtgttcaaaagacatgatctcattcttttttatagctgcatggtattccatagtgtatatgtaccatatttctcattgatgggcattcatattgattccatgtcttgaaagacattttctacaaaatggaaaacttttcattcttatttttcctttttttcccccatggataaaattagcttattaataaatttgttatgtgaaatgctttatttcagttttctatatgcaaatatagaaaatgctatgcaaataaaagcaatctatattaaaacactgatatagcaacaggttatttataaatttattttttagatcatatatttgaatgttgtttaatagagtatgatatttttcttacggagataaacatttatattctatattatgtgttatgtggcctgaagtaattaattttctttcaataaggggcaatctgatgaagatctgagcatttaagagggctgagcagttagttgctggtaatttttttggcttccatgaccaaagtaggtaatttgctttagtaaccaaagtagattggtgaagattagtaattcttctgcttaccaacttaaaccaaggtggctttccataggtgaatagaatttttttttcttaatttatgtagaacttttgcagttcaaataagggtttttaggaattgaaacttggtaaacattcagtggtcaagttggttgaatttccattgcattgtaggtcatcagtcaaagagataatgaatttggaaaagttcaaaacaatcttaataaaacagtggtcaatagagttca

SEQ ID NO: 136769 - DNA, 1178 bp, Homo sapiens
ttaatgattataaatgcatagctagaaatagagtttacacaaccttagccatacagattaatctaacagatcttctctaatgctaatacaagaaagtatcatcggatctctttaaaaatttctgctaaaacattttttttttcttattcaggtgacaattgactctgtttatgtagaacaggctaggtccccttaactctcagatattccccagtaatccaaggatgggaattatatctttgcccatatcttcacccaatgccagtgagatttaagaacaacttcagatcctgaatactgatcaaactcatcaacttagagtcgaggcataaaaataaaacacctttcaaagagagtgtggttcacgtttggtgtttattaaagggtatgagagagtcctagctaggattctcagaggaaaaaggacactgaaaggaaggttttactctttgagtcatttgtgattttatttgttttttgcagtggatctcttgagcctgtcagctgcatgtgatgccttggaccagcacaacctcaagcaaaatgaccagcccatggatatcctgcagattattaattgtttgaccactatttatgaccgcctggagcaagagcacaacaatttggtcaacgtccctctctgcgtggatatgtgtctgaactggctgctgaatgtttatgatacgtacgtatggcatgtttttatttcccgggctctgtcacaggaggcttagcgtacagaatggtgaagtgtaattagcattacaacagggccctggaagctgtggacctaatgctcttcctgtgataaatcatttttgcatttatgacttgaaaaatattttgataagctaggagttaagagccagaatgtagattgctctcagattagaaaacaaacaaaaccctgagacactcattttgcaaatagtggaatgagtcgacatatagcctttggttctttccctttctcgcccatggattttggaattcttccatgcacttcaggggtggcttcctctcactggcggccatggctgtgctcctggagatactggcacacctgtctccagatcagaatggtcttagctgatacttaggacacttttgcagaagattatgaattgataggccaaacaaaatgaaaacaagcccttaatacagcaaacttagcttct

SEQ ID NO: 136770 - DNA, 1079 bp, Homo sapiens
attcctctcttccagtaatggagctggcataccgtgtttctaagtgttcctactacgtgcacttgagtatgtgccctctgaggaaaacaagcacacagaagagagagagaagaaaagtttgagtcttttgtctctggacctcgctccagcctcccacgcagtcttctttcagccattccctcctcacgtcctcccgtcctcctgcctccttgcattgctttttaaaattctttattatttttctcacttgattcttcagataagtctcccaagttatcttccttcctcccactttaaagaaagtctcagcttccatgaaaagggtcatttctctatctttagagtatttcagagcaaaaacagaggggccttcccttccaagggaggagtgcagactcctgcttccaccaccatgtctgtttcatgcttctggggaaactccaggattttctgttttcctttttttaaaagagaaaaatgtgtgcgcaatataggtggaaaagtatttttgcacaaacctacataggtattaaccactatttttgtttttttcttaatatttaattagaactggccatgaataacttgtaaaatatactaaagccttaagtttgcatttctttattactgggaaaggtgtttactgagcgggatttacctctatttatgtgaactacatttataattgaattgccccttccccctagatgcatgagagatttacttaattagcattgattccttgcctcaaaggactgagaattccaaccagagcttaggtgtataaggtagtataaaagcaatgttgttgtgtttctagtttggctaataaattggctttagagaaatgcatcttttcatgacacttgggaataaagcttgtgatttgctgatgttggacaaggttgaagtttcacttttgttaaatttttgtccccagcataagattaaacacctcctcagatcaagggaattttcctccctcagccttataaagttgttagaggacttagaaagaatattatgaaatacaatttgaaggtgaaaggagaaataagcgagcctcaggtctgaaaact

SEQ ID NO: 136771 - DNA, 1132 bp, Homo sapiens
caaacatacagcagttcttccaccattactcacctctttctgtttctgtgctaattagatcacagaattatttatacatcaacatagaatatacagattgacctataggatgaacttggggttatatgggcaccatgagactttttttttctccactaaccaactttttggtgcttctgttttatcctactgttgtcattagcatggaatgcagaatggttttcctgttctgtaaagtcagtaaggacaccttctgccacccacttttcccccttacaatatgtacctccatgagaaatcagaaaacctagatatcctgccataacacccagagtgagtctccatatctctggtctcagttgtctcaactgcaaaatgattttaaagcaaccttctggctctaagagtctatcactctgtaaaagacaaaaaaaatctgtcttacataggaaggaatagcaagagttagctactgtggcatacatagaaaggaaaagaatgagcttttgaagctagaaggttgagaagatgattaggcacaaccagagcctcaggaaccattagtgggatccctgtgttgaagtcctgcctgctcgccgccccccaaccgccactgtctgcttttcctgcacagcaaagaggatcctggagagtcagccatttcttttatcctgtccccaccctctctcacccccacagccctcatgcatagggtaccaccacatggtccctgttcttcaatggcttcaaagcctatagcatcctctactgtaaacataatttagaaagtgaagatgtattagaatacttgggtttttatgtagctttaaagatatatctactagtgaatacacacaaacacacacacacacacacacacatacacacacacatatatatatatatatatataatatatttaatggaaattcctagcttaaggaaacaatggtttcacacaactgtatctgctggttgcttattgagggtcctagaaagagctaatcattacatttaatgtttcatcaaaaagtctaggtgtgttctctaagatgctcattttgaaaagcatatgcatggcaattaaattgtccctattgatattctcacctccttttcgggtccatagcat

SEQ ID NO: 136772 - DNA, 1002 bp, Homo sapiens
aaatactgtaatcttgtttagctgttacccactagggaaagaatggttttctctcagtcagatgctaaagagattaaagaacacctcgtaggttccgttttctagtaattattggttccattctccagctatcaaccttggcagcttgccatccctatccttcctcctggaattggatgcccttgaagtgcgcttcttgcactaggaagtctttctcgtcagtttatcatttctcattcaaagcaaattctacctggccaggtatctctagcccagttcctaattctcctaatagaagtttcttttatttcaagtggattcatgccccttggcccaccagacatgttgccattgagaaatagcagctttaatgggaaatacacatgagacacaaaaatgtgactaggctaaaatcatatgaatagtagtcactcctaaaaggactttggtttgggtatgtcacagaaatttctgtagccatccatatccaatttctagcttttcagtctcaggaaagtaggcccaccaaattcaacttaaatatctgtcactgattcaagctgtcccaattgtccctccacccactaatggctttccacacggagtaatggggcaaatagctatttttttaaacacataatgttatgacagatgaaacatacagcacgtaagccttctatcacatgcccaatacctttgttaaaccttcatcatcacaattgatggccacacagtgtttattgagattgttataaatcattgttcttcagatttgactgggtaaatattccctcaggttatttcctgacacagctgattaataacagatatgtcctgtgaaagaagaaccaaaagacattaacgaatactaaccaaaagccacattaatattgctccatggtgttgtagtcgcagttagaacgcccatctcgtcatccagtgtgttggataggttggctgactctcccactcacatcttggctctttcaaggaggaggaggt

SEQ ID NO: 136773 - DNA, 1283 bp, Homo sapiens
attatgaataaagctgctatggatattcatgtacacatctttttgtggacatacatttttttttattctgtgcaaatatccaggaaaagaatatttgagtcataatatacatgtgtgtttaatttcataagaaactgcctaactggtttcccaaagttgtcgtacattcccaacaagcagtgtctgagaattccagtcgctccatatcctcaccaacatttggtattccggtcttttaaacaaaattgtatgctgaatagtttaaattacagacattgttttctttcccctagttgaaattcaggcttttatgtttggtctctgcgatggccataaagctgaaaatgttgacccaagtgacttggatatggattgaattattgccctttcctaacacctcatcagaattggtttcgtaggtgtcatttgattatggcagtcatgtatgtcagtgtactttttctttctttcattcttttgtttattgattcagttggtcagtcggtccatgatctgtattaaaacagctttttcagagggcagttgcatattaagttgctaggaaaaatgacagaagtaggtgacagagttcttgtcttcaaggagctttttggagctgagttcctgaaataaatgtagcccagtatctatcaaggcttgtgcagacttgagtaagaacatcatctaaatatagcttcctgctaggtggcgtgagtcagggcttgatagaccggtgactgcagaaaccacagtaacatatattgttgttattctgtgctgaacattagaatgattgtaccttagaatatagagccaaatgtttattttattcctaattatatttttaaatacatatcacacacatagacacatatgttggataaaaaatactcaaaatgttaacagtgcttatttaaaaggtttatataaactttttttgtagagatgggatctcactatgttgcccaagctggtcttaagctcctggcctcaagcagtcctcccaccttggcctctcaaagcgttgggattacaggcatgagccactgaatccagccagttgtgcctatttttgagtttatgggcttgtggatgatttatttgattatatatgtatatgttaaatgtctaagttacccaaagtgagcatgtataacttctacagtcagaaaaaatgttatattgccacttgattgtttaaggtcttatagctatttaaataatgtatttcttgttctctttaatcttgtgcagaaaagattcactacagtagatccagatta

SEQ ID NO: 136774 - DNA, 1065 bp, Homo sapiens
taatactaatgatttttaaaagatcaggcaacactgctttgtagctttttagaagacatttatccttatggatccataattattatggattgtatgttttatatataatgaaggttttgggagttagagccctgatccttccgctcttgaagcttgatttaaaggagcatggcacagtggtgcctatatgagtcagccctccattatctggggcagaattcaggccccagaaatggtacttaagatacacagttctcccccagaaaactttatatcggccatttgttacagaaactgctttctcaacaaaccttttaccagggcagctaacaatgagcaaaactaatttgaatttcaactctgccattattacagtgttgctaagaagtagtgagattctgctgaggaaggccaagcaagaggagggagccagaaatgccttaaacaatccacagccaggattttgtgctatcttttatttcacagttgaacttctcagtattttttggttcataacctttttctcttttcctcaattctgagtcttccacatttgtgccatactaggtactttattgcttctctcccttttttttttttcttgagatggagtctcattctgtcgcccaggctgaagtgcagtggtgcgatctcagctcactacaacctccacctcctgggttcaagcaattatcctgcttcagcctcctgagtagctaggattacaggtgtgcaccaccatgcctggctaatttttttgtgtttttaatagagacggggtttcaccatgttggccaggctgctctcgaactcctgacctcgtgatccgcccgcctcgacctccataagtgctgggattacaggtgtgagccaccacacctggccctctccttcatttcttagaagagttttacaaagtcattggtgataaataagtaataccatttcacatctggaaacataacttgatagtaattataaattcacagactgtactttctgtacttatctaagtatgaatgcataattcctgtttatctgtgtgtaggtttatttttcccccat

SEQ ID NO: 136775 - DNA, 1048 bp, Homo sapiens
aagatttcaacatatgatctttctcccaaaactccatttcaattacttctctggtaaccacagaccagaggtcaccaactggttgaatttagtctgcagactctttttttgtgtgtgtgtgtgtttgattcgttggtcagtttgggctcacataatggtttttgaaattgttgaatgatacgccattagttaaaaatctggtgatttcccgttgtcttgcttctctggaagaacctgaagacctgacaatagagactcacattctcatagaacagtcagctgcaacggaggctctgttaccctaacagaagcttttcaggttgccccagttcccacccagtcaccttcagtcattcaaattaccagcttggccccaggaggcatttcttttcagatctttgcctcagcctgaccactcccttgttctcccaaaagcttttacatttacccttcagttacactctttttcaggtccctgtcaaggctctgactgtggagtccctccaataagtagctattacctggctgtcactcaaattactctatggaaacagttgttactgggttttcccaaaactttccagcgattaattctttggactccaccttttactaatgcattcaaactaaatgattgtgctgccaaaaatattgccttaatacacttactgttgcagtacaagaacaggtaggaagacaggccaaaatccatgagtctcctgactatatttcattaagtgacaattacttctgcatttaaaatcatcagttgacgcttacttaagcacctattatatgcctaactgtgtactaagcccaggggttaaagattcaggtttctaagatattggggaaaacaaaaagattattcaccctgtaaaaaatcagtacacgtatcccaggtatttgtgatgtgtcaagcaacacacacatacaaaactctggttatgtgagtgtcaaagaaaaaccagagatggacggtaaagtggtaaaaacagattttattcaggaatattgcaatagtgggaaagagacctcagtatagaac

SEQ ID NO: 136776 - DNA, 1030 bp, Homo sapiens
tttccatttgggaagggaaatcctttcttgcagatatcttctcaagcattggccaaaactgtgtccacacagcttcccctggctggatcagggaattgagatcctccagcctttgtagcagagaaagaccaaggagaaagaatttgggaaggggtgttgagtgagccaacatacagttatctgccacaattaaatacagcggattcaccttgcaaataagcattctttttagaccatttattttctttctctctttgtcccaattcctttattccttaggaaagtcttgatatctttgtgaggtgtgtttcaaaaaagaagctccagctcaggttgtaaggagtaagcaaaaataataattccagtgattcagccatagaagtggaaaattatattatttgaagaaaaattagatgtaaaatcaatgtcatcgacagcttaaacctggtaaaagcaaggaagttcctttcagaatctaattttattccaaatacatttattgagcaccatcatttattgccctagatgccaaggataagtgaacacaacatgacctcttcagaagtctgcatttttctcatcttttttccctcaagtataagaatgaaaaataaagctatttctaattagttacatcagtcatttctatcagtattactatagattttatttttattgtatactggatatttaaactaaatttaagcctttgtgggcttagaaattactgtttcatgagtaacatggcttatgtaggaaatttccaatgccattaaccttaaaaatgttcattggaatactgcttatgtcatcttggaaactacctttgcggttgacatataaactgcacgatggtctattttcattatatgtttctgtatgtacataagcatcctcatgataaagattgtctacttgatcaaacttcagccagactcctgaaccttctcctaggcccacctgtgcacttctttgtaaaaatccagctgtagcgagaatcctgctaaatcagtttagcaagaaccacctt

SEQ ID NO: 136777 - DNA, 1030 bp, Homo sapiens
aactgatttagcaggattctcgctacagctggatttttacaaagaagtgcacaggtgggcctaggagaaggttcaggagtctggctgaagtttgatcaagtagacaatctttatcatgaggatgcttatgtacatacagaaacatataatgaaaatagaccatcgtgcagtttatatgtcaaccgcaaaggtagtttccaagatgacataagcagtattccaatgaacatttttaaggttaatggcattggaaatttcctacataagccatgttactcatgaaacagtaatttctaagcccacaaaggcttaaatttagtttaaatatccagtatacaataaaaataaaatctatagtaatactgatagaaatgactgatgtaactaattagaaatagctttatttttcattcttatacttgagggaaaaaagatgagaaaaatgcagacttctgaagaggtcatgttgtgttcacttatccttggcatctagggcaataaatgatggtgctcaataaatgtatttggaataaaattagattctgaaaggaacttccttgcttttaccaggtttaagctgtcgatgacattgattttacatctaatttttcttcaaataatataattttccacttctatggctgaatcactggaattattatttttgcttactccttacaacctgagctggagcttcttttttgaaacacacctcacaaagatatcaagactttcctaaggaataaaggaattgggacaaagagagaaagaaaataaatggtctaaaaagaatgcttatttgcaaggtgaatccgctgtatttaattgtggcagataactgtatgttggctcactcaacaccccttcccaaattctttctccttggtctttctctgctacaaaggctggaggatctcaattccctgatccagccaggggaagctgtgtggacacagttttggccaatgcttgagaagatatctgcaagaaaggatttcccttcccaaatggaaagacaaagagactctga

SEQ ID NO: 136778 - DNA, 1061 bp, Homo sapiens
atagggtaagcacctaataaatgataaccattattactattattttacagcaaagacataaatagagcccattaagttttcttctctacccagtagtttttccattgtacaatagtactctcctgaaggacagcgggtgaagctaagaatttggaagaaatcccagatagagaaatcttgaaaagaagatagatagatttaatactcaatcattaaaaaaagtgcacatgactttaagaaatcaaacattgtaagaggatagtattgaaaagtaagtctccaaccactcttggtatcaatcccctaattttacttcctagagacaattaacagtatagtttttatgtttgcttctgtaaatatttttgcatatacaaacatacacataaaaatatgcccatttttgcacattgagagtataataggcacaatgttctgttctttgatgctattaccttttacataattaacctggagttttttttttcctgtagcgcaatagactgacagatggtgaatgaaaacttgcactatggagagttatgtcagtgttttaataagacaggaacccagaaataaatgtacgaagtttaacatcagcatctcgtggcctttaagtcaaattggacaaccattcaaagcttcataaatgctaactgcttctcatgacttcagaagcaaacaaaaaaatcattattcaaatgggaaattaagctgatcatcagaagtacagagaggatgtcctttcttaaaggcggcacgtctaagggagtgtctgagacctggcttcttcattcaggatggaggctgctgctactctttaaaagaaatgttcacatccttacttcctgacttccttctataacacagtctgcttcacaacactatgactttatatgtcagagcgggttaggaggagctgaatcttaaaaatttaagaagatgccaaggtctagaaaccactcttaacaggggaaaattagaccctgcttgcttttgggaaaatttgttttccagtcagatgtttgtcaaggttaaagaaattcacgggccctctgttc

SEQ ID NO: 136779 - DNA, 1033 bp, Homo sapiens
tttaccaaatatgtatggtgtcaaggtgacaaggcaagtatccttgtaaactttccgaattacaggaacaactttgcccttcttagcaagcaattttatacagaaactcaactttatgatgggtttctgtaagttttaatttttataataactgatatgtaaatatttagttacctttaacttatctctccaggtagaatggctagcagactgttttatcttctcaaaacatttgtgtgtacagttcccatgttcttttcaaggttcttgcttctaactgtcagttaaggcttttgtagcctcttacttcagttacattttctggccaagacgcaattaaagaatatagagctgataattatttccatagtcgtttccaatttttctactgttccacgtaagactttgaggaacacctttatgcataacacctttctacatttgattcatgtaagtggaatcactgagtcaaatggtgttaatgtttctaagcttcttggaatgcactgcctgaaactttctcaaaaggctgtagccatttacactcataatacttcaaagtgccaatctaaccatgtccttcccagcatggagtattatttttacttttgctattgtaacaaggaaaattaaaccatctcattgttaatatttgtgtattttttatttctagtgaccacaaatgttttcttttaaatatctgctgggtgtttttcttcttttttgagtaatgtgaaaacaaaacgaagttaaccaaacacaactcttccaaacttttctgatataatacacacttttttgtgtgttatgttgaggggctctagttggtaacagcctcctggttacataaatactgtacagtttaattttttttcagctaaataagccttatccctttatccatccttagtggatctattatctacccattaaattaaattttattctctataccaactcctgtttcttcacattttttaaatatatgcagagccctaaattacagtggctgtcctaataaaaggctattcag

SEQ ID NO: 136780 - DNA, 1046 bp, Homo sapiens
tttccaatgtcaaatcttactacaaatttaagtaatcaagagtatttacatatggacagatatactgaccaacagagtagaatttaggctgggcacagtggctcacatttgtaatcctagcacttttggaggccgaggcgagcagctcacttgagctcaggagttcaagaccagcctgggcaacgtggtgaaaccccgtctccccatctctacaaaaaatacaaaaattagccgagcatggtggcatgtgcctgtagtcccagatactcaggaggctgaggtgggagggtcgcttgagcccgggaggacgagactgcagtgagccgaggttacatcactgcactccagcctgggcaacagaacgagaccctgtttaaaaacattatttcttagcctgtcttattgggggggggtctcttaattataaatacaataaaatatgtggttccccaatggttcctttttaaattacaatgtgagtttttttgcatttgtgatactgtcagtatagtacaagaagaccagtttatgaaggagacatgtaggtaaaaataggataatgtgaagagagaatcgctgcacttcagaaagctgattttatttcaagcagtttattaaaatctagatgcaccgtatgttctggtgttacttattccaatttccttttccttcattgaagccctcttaaccacaagtgttttctcaaggggtactggttttccttttcttaagttatagcgttcttcagaaggatctagccctttttaatctgttgcccaatttttggatcctactatccagcatgatgctcacctgaatgatgcgaaagctctcaattttcaaaaatggacttctgagtgtttttggaattcttaggaaaagtggtctttaaaaaccataagatttgaaggcagtctatcagcacgtagcccttagcttcatgtctatggtttgcagagagcttcagaatgttaaaatgagggtttaattttagggtctgctgggcctgaggttaggggtgtgattcttcagcagttctagttagg

SEQ ID NO: 136781 - DNA, 2603 bp, Homo sapiens
gtcgttttagatctacaaggaatattctgaaatgagttatcttaagttgcagcttgttttgggttttgttttgggacagggtcttgctctgtctcccaggctggagtgcagtggtgcggttatagcttattgcagcctcgaacccctgggctcatggcggttcttctgcctcagcctcctgagtagctgggacaacaggaatgcaccaccacacccagctcatttttaaaatttatttttatttatttttgtagagatgggtctcactatgttgcccaggctgtgtttttatgtatttttttaatataaaaacgtcatgtcttttctactttttcaagcctgcatttctgtgaatggacatattgatagaaaaacacataaggcgatctctttggatttaaggttatgtgatgaacactgtgggaatcagggtacttaaacataaattctgtgtaggtatacgtaagtggggtgtgtgtgtgtcagggggtacgtagctattactgcttttgtgtcatagattctcacaaaatgaattgcagctatagagacaccaaggactagagaagagatattagccaaaaaatggttttattaaacatttttctaattataaatgattaaatgtcttctagaaaacctgaaaaatgtaaataaaaaacatgaaaaaggaaaaacaaagtcacttatactagccagagagatccaatacatttcgagtaatattatgtcatttcagtctggttataagtgtgtaaacgtttaaaattttaaataaaattgggatcagctaattttcaagtgctacatttccagcccctacagaatgtttttggcttataattgtggactgtttataccacaggtggaaaacgtgaatgcttatcttttggcaaatgagagaatgaaaaggcttcatctgaagtgggcagcagctgtcctgggcaagctggtctttctatcccagtactcccaggacccctgattgtacaagagaaaaactagaaatctgtccacaaagagctaatttaaattagtctgtgggcctcctgatcgtaacctgtggtttacacagatttagcccacttctaacatttcctactctaattacagtaatttctagttgtaatattttaattcactcttattttaaaatcattattattatagaattaatacctattcatatttttgaagtttaaaaatatagacaggctaacaataaagaagagacaaatcattcgtaaccccacttcttagagttagctggtgtttaatagtctaggatcttcaaaaatgtctttctatacatatatttttatagaagttgaatcattctgtcttataacttgctttttttttttccactggaaagtaatgtattaccatggccatatttccattttgttgtatagtattctctaccactttcaattactctgtaatgagaaattgcaaacatgtttgatgaaaagctaattatggactatcaatgaatacatgtttgctcctttaatacaaattaaatatacatttaatcattatatttctaaaattttctccatactttagatgtggtgataaactcaaaactgataatctctcatgacttgtgacattgggcttgtgacatcactcaattttgaattataacagaattttacagttgcaggggattttagaactcatttattgcaaactttctcttttatgaaatcaactttcaggtataatttttatataataaaaggaagtcatcgtaagtgtgtgatcaattccagccccctttgaaattctgtttcttgctagcccaataacaaaccacttgcaagtgaactaagtgttgaagtttgcttttcacctttcagagttaatatttccaatagttttgtaacaatcaaacattcgttgggcttttatccaagtggtgattcatcagataacatctcccatttattgcgggcctattgtatgttttccacatgggatgtgccagcaaccaacctgcatggtggatggtatcaacatccacatttcacaggacagcgaagccaggctcagggaggaattgatcagggctacacagctatgtggggctacacctggatttgtcctcagttttctgttagtactttcactgttctcattgattttatttactaggtaaagtatatttatgttggttactacatacctgctacacgtatataggaattgatagttttacctatgaatagtaagttacttgagtggtatttctggaaatggtatggtgggtcctaaacaatgggcactcctttcactgttgcctggcacatatagaatgattgttatatggctacatccttttttgtttgtttgttttttgagacagattctcactctgtcacccaggctggaatgcagtggcacgatcttggctcacggcaacctccgcctccccaggatgaagtgattctcctgcttcagcctcccgagtagctgggattactaggcacccgccaccatacccagctaatttttgtatttttactagggacggggttttgccatgttggctaggctggtctcgaactcctgacctcaggtgatcctcccacctt

SEQ ID NO: 136782 - DNA, 1849 bp, Homo sapiens
ttaacttattttttttaaacataggtgataacatgtagtgtgttggttttgctctctaggaagggtctttcttcgccttgattgacttaattacagttggatccacatctatattgtaatcaactaataacagatttgcttttaatagatgacaatttgaggggcacatgataccaaaagcgaccacatattgagcaccaaatggtgccggtcacttacctatttcaactaatcctttaaccctccaaggtaggcaggcttgctttaaatttcaccgccagtagggcgcagagccctaaaattcaaaacatacgctaaggccattcgacattgttgcctctccagactcctctttctgtgtgaggcccctgtactttctggtcctctggaaatgccccagtttaagcgatttctcttttttccttccctccccttcccctcaaaagtttatgaataggctctgcatatgagtacccaaatatcattcagaactgcattttactgtatcaaagcctgtcatgcaatccctgaaaactggaaatatgacgctatggtgatttatgtagatgggccaaagtaaggaaaagtatatgtagttatttctccagggtttattcatgtaattgaatgaggaacaaaggtgttttgttctttttgtggcaggagctgatagccagcaaccacacttcaagaaatggaagacagctgtgaatgcttcattcaggcccaagtaaatataggaagaggtgtagtggtgtatagcgtactgcgtttaaagaaaaaacactctgaaataatgggaagaaggaagttatgatatattagtcaggcagtagatataccttaagctgaaatgaaatacaggtatcatggatatgagatctgtatatgtagaggaaagagtaatggaaaaatgtcaggggcagtgaaagcaaatgagaagtgagatgatttatatttattgaactaatgtccggtatctctttgacagagttgaataataatcagttgtcggtgtcctttctgtagtgttccacattggatgggtgaagaagtcctgatagtcgattattgatcacataacaaggtcaatttatcataactgaagtgcgatcgatttgtgggtgcaaagaagaaacaaattctggaaccgaataatgtttatattgcttttctctttggaaacaaagcagaaaggggcctttctgcttgtaagataaacatttcttcaatacactatggaagcgctttgaaataaagattccgaatggttcaaaagcaaaaatcatgttgttgttattgttgttttcttttttcctgttttcttgactactcattgtaaatgctaaagtctttctttatgttttgtgttttagccacgagactcaaacaacttgctgggaccatcccaaaatgacagagctctaccagtctttaggtaaggacatggccatgtttcctccaagttaaatgacaggtgacctttaggataaagtagtttgcagtgtgaaagttacttgctatataaatacatcactagattgtttcaagggtgaaagcagtggcaccttcctatccaaaattgacagtcagctttctttttatcagaggttccttaaaaacaagttttagaagttgattgattcctaaaaattcaatatacctgagagggcctataggtctttgtagttctctttggtgcctaaaatgatggaaaaacagttgcaatttatggctatttttttttttcttcccacgaagatagaaaactgtttcaggtgcttgttgatttcttccgtgtgaaaccaagacaacccttttgccaaaccacaaatgttgtgtaaaggaa

SEQ ID NO: 136783 - DNA, 1020 bp, Homo sapiens
cacaccgtgtttttctatatcgtctgcatattccaggtaaatgtgggctcttctcatggagttactgagaattctctactgttttagaaggcaggcacagagtaagaaacgaagctgtaaaatcggtattgatcacagacaaaaatgtggtttgtccttcaaggtacaagatagatatgagttatgcagatttgtgcttacagtttcatccagtccatattcatagttcctatctattttggagggttaaatgtgtcccagtggggctctggattcatcacaggtagaaaataacaagccgtgaagtgaatatttggttcgtcatatagttaccaaagaatctgaaggttttttggctacgttgccaagcatttttagcattaaatgattaaaagactatttttctcgttttaagaattagtcacaccctttattcttttcttctttccacttgtgctcacttcttttgcttagaactgatttgcaattgaagtgaaactaagactgcaaaggtgaaatctaaatctgtttttctagttcttttgcattgcttagaaataaaaggtttgtgtgttgaaggtgagaaaggttagcttctggaattgtttgaggagttcatttatctatgttattcaagtcccccagaatcacagataactgggagaatagtacctatcaaggactagtatcttaactcacaaatgggcaatggaattgggggcttagaatttcctccttcttccagtaaaggagattttcagttttgccgaggactgatggattaaaaaaaaataatttctaaaacccttttcataattttaaccttcaaaataaattctttaaaaaggcaggaatgtatgtatgccaacagtcatgaaatttctttagaagatggggagctccatgaagccctcattcattctatgtgggattctcctgtaaattgtacacactgtttccctttccttttagaactgtgtttggtacaggtttatttcttgcctatgttcctctaatttg

SEQ ID NO: 136784 - DNA, 1044 bp, Homo sapiens
gtaggaattgaaagtagtataattttgactttttttttcctattgtaggtttatattgcaatttaagtgggtactggtatagttagtgctgctagcaattttacctaaatattaggatacctagattgtttgtctaatgaactcagcatgggctggcaagcactttggaaataagagtaaaacatattttcataaaaatactgaagatgagagaaggaataaaccttatgaattttaagaggaaggtagcatgtaaagcagaggttctcaaatttgatttcaagacacagtcaagaatgagggtttaaggagataggggttatatctggcctggaagatttgcatcaatgccatagaatatccctctttgatcagcactgtaatcttaaaaaaatagggcttactactgagattgtgaagatatatatatatatctgtcagctgtgtctcagcagggaacaaagttgagatatataagaatgctgaagagcactgaaattaaactcaggagatgtggggttgggtccagattctgccactaaacagctggtcaagcacgcgatcatttaatcttcttggtattattattattacatgggaaggttgatgtatttgatctatctgtaaaatatatgttcacttgaccaaaaaatattagtgcaatacctaccatatgctagtcattgaattaaagctagacacacctggtatttggcatgtaaacgtaggaaaagggtatatatagactttatgatgtgacagagtcatgggaagaccagtaattatggaacagcatccaattctgaagcccacaacagaaaaatagtatggaaaacacttggaagggtaggaggagggccacagagacgttaaaaatttgagaaacagctgttttgttgccagaccatggggactcatctgatttaagatagaaaagaaaagtgggaaggagattaaataacagacctcaaagaatgaacactgtcgaaatgtacagtaagcataaatgtatttttcctattcgaataaaaataatttagacag

SEQ ID NO: 136785 - DNA, 1053 bp, Homo sapiens
gggcctcagattctgtgtgtctaacaaatacccattgacatcaatctgtagactacactctacagcacttataattattgagacagtatatattttcttcattagtttattgtctttctctttcaattacaatatatgttttatgaaaggagagacttttattctatgctgtactcgcagcaccagtatgatgctcaacacatggaagttaataaataaagtggatgaattatatatgttgctggaagtcaaaactggaacttccaatgtatttttcttataaacattgttacatttaggtaagttacacgttaaatggatttcggcgccctggttttggagccttcctaccatgtgtaacgtggcttatatgggacataaactcatgagttcagagtttaacaaacttataaaacatcattggaacataatctcttcatggagttacagagtctgaggctgaacctaccagagacagccagaaaacagacaccaataaatgataacataggaacaaactatgcatatgcgctgagggaaccaaaaattacagctcataaaaacaaataaacctgacacagttgagtataaccctgatacagcaatttcagtgtcccagattgacaaaaaaaaaaaaccataatgcttaagtctccaaagtcgttaaatctaactctgatgactgccgagtaatcccagagggcacatgagatgcactgtccccagattgtagggcttcttttaatccaagcactatttatgccttctaatgaattatgattgtgctaccccagctgtgattcttccagttcagtatttttctacttgacataaaataaaaatcaactttacctgaagaaccagtcaccatgctttaatgcttcaatcatttgatctttgaaaagcagacaaggcaaaaaaaaaaacaaaaacaaaaaacaacacccaaagatgtttttagttctgcctaattatggaatggtacagcaaagaagttttctggcctctttcccctgagagtcaaagccagcattaacattgccatgagaattt

SEQ ID NO: 136786 - DNA, 1046 bp, Homo sapiens
ttccactctcaggcagcagccagcccctggccaatggctggctggatcaggaatacaagggccaggcccactgcctgcaattcaggacagctctgcacagccagcccagatgtagggctcctgcgagactggcttaggcctctgctgcagacaaatcacatttcagactctcccacaatctcccttgtgctcttctcttccttgtgggtgtatctccagagaacactccccatatcccgttgtcatgcaacactttgaatcagagtcaatttccaaggaatgtactctaagactttttgcacagtcaataacacaaaggtttatctctatctttagaattgaaacaaattttctctctcacccagtcatcacttcatagttgcacttttgaacaaatagctagagccaaagagaatgggatccagtatacttacaggctccaatagtggtcagtccaggagctaggtcaggctgctttgccctcagctcttgaagtaaacggtttaccgccttccactcagagctcagatcttctaacttcctctttaacagaaaagcatacacattacttattcgattaacactttgaagataattcatgaacatcttaatccatttggtgaatatattattggatttctattatattttacttctaaattaactttagtgggtagaatttcttttaaaggaattataattattttagccaaccaccctacaaatatttatcaattgctccatacaaaaaccctttctccaggcataattttatttaaaggaagtagagtgcaaacattagtgaaaacaaaccaacaaaaaacagttccctctcagcaactagcttaattcttgaagagtatctattgtggttgcatactaaaattatccagataactttaggaaaatcctaatgtactggctcacccccagtcaattatatcagagtctcttaaagggaggggctgcagtggacacgggaatatgctactcagagcccccttcaaagaaagactcttgttctagatgatggaaatgatgtcagt

SEQ ID NO: 136787 - DNA, 2981 bp, Homo sapiens
ttaattaagatctctctctctctcttttacaaaggcacaaaagtaaaagccaaattacatgtacctttgtgatctctaacaattagtgacaaaccttaattcatagtcatacaccataaggcataaagtctttgaggatcaacaaagagtagatagaaacgtatgcaattgtccatttgtgcactgcatggcttgctacaatgaaagtcaccatattaactgctctgagggctggctttcttcagaacatcaacggaaactctgaaatttgctgctttcaggactttgcctagctcttccaactaaatactgagcacattgttagcttatgaaaaatgattatactgggcttgaactggatacaaactacttttctagatttttggagtggttgcaatatatttctgaataaaagtatgttgatatctacagagaaacctgtgattttcagtgtctggtgtttggacattaagctcaggtgcaaacttcaactctacctaaggaaaagtctcttgtaagctgtaaggaaaacaaacaatcttctagaaatgaagcttgggccaagcgcaagggaaactaagcagcgaccttagagacagaatctaagtcatggtaatgttgtttgcaaggacaaactggttctgtataatgaggttattgacctgaactgttttcaagcagttttaaacatgaggacgaggttcattgtatccaagcctgcaacattaactgagaaaccaagactgatcaataaacagccatgattacaggatctcaggaaccttcatcataatgggagccattataattctggtcaggtacagagaatcaggtaacctactgctaacgtatatttagcactggactctcatttgcaaatggaagccattgattagctattttttgaaaactgacctggctttccatctccctccttatgtaatagcctgtgaataaatgtgacctagacttcaacatggatatggagaagaaaaaaaagtagaaaggtttatcccaggccagctttttgccaaagaaataagcaattacatgacatttcactaaaaattcttgacccaataaaatactgaagcctcaatgccgattttactcttttataagaaagagcaacaaagaaaagaaaggtcacggaccatattgtgattctttacagctgttggagacagacactatgatgcagtagcttgatttgaattaaaccaaacaatatgaaaagcatcaaggctggcaagcaaagcaataaagccccaaagaatttaatctaccttgaaggtgggactacttttgtattgatggcagcacaccaggacagaaatgagtcctttaaagcaatgactcgttaatagccttaagatcacaatatataaataggatatgctgatcaaaaagacagctttgcctctgctattacagtatggccagtatttccttacaagttatttcactgattataaatagtccacgtcaatggcaaatgtacaacaggggaagcataacccattatgaggtaatggatattgctagaggttgcttcattaccttcactggctgagtggctggtttttccttgtacaaatgctgccctttagacaaaatctcttccacatccggttgtttagcttgaactgctatttcagtttcctggggaaaagaacccatatagtgcagattaacttcacagttagcaataaaattactaaatttaaatatacccttggagactccacatgtattgcagatcaatttctgcctggtacataagggcacaaaaatgtagcttttggtgcagagaaaagaaacagagatgtgaaacacattaaacttaaaaaaaattcatccaatatcttcttgaattatataatactcatatagaaacacaggcattaactacttttcaaaaaagtaaaatgcaataatgacaatacaatttattaacataatttatatgaataaacactagttttagctacaataatctcaataatcctaatgttcattttactttatacacttattgttttacaaaattctgtgtttagtattggatataaattttgttttgaaataaatatcaaataattatttctacatcactgtcaaaattattttctttccaaagggtaaacacttaaagcacagtatcaaagcttattatttattaatgagtcaaacaggccttctgaagaacgattaattttgtttattatttgcttttcttcagtctggagaaggctgaagcatgacaaaaaaaaatccttcaggtatatgaatataagcattttgttactgtctgctgactagctctcttgatgagacgacaaaagaattgtgcagaaattgaagctgaaggaagtgaagttaaatattacagaagactttttggatggaacacttgttaaacactaggatagagtatcaattaatcaatgtcaggcatcagtcagggcctgggcaatcttccccagagagcagctcctgattaacccgtatctctcttcctccctcccctaccccggagcctcccagcactgctgtgtttaagtgtctccgtgccactgtttccttcgtatactgtgtttgtacctgttccctctcagttcattagtaggaaatcccaaattactataatctcatactgcccagtacagtctcttgcaatttacgggtgctcagcacatgctcttgagatagactatttttttccagttcttattataataaataccagcagcaaacaggcactttggtcaaaattgtacataactaacctcatgtgttaatggttatgtatgcaaatttcacttcctttataacagtagtttagctactttacatgaagaactattaattgatggtcttactgccccttgccaagaaaacacattgttccctgaaaatgcagcacccggaatgactgtatgtctttgctagaggtagaaatagctctgatctcagatgag

SEQ ID NO: 136788 - DNA, 1022 bp, Homo sapiens
ctcctacaaagaaagttttatctaatttcacagatgctgcaattgagagagattaggtcaattatccaagaccatgtggcttgcaaatggcagagttgagattatatccaggaagtatgtgtcaccaaatctctatttccttctttctgaatctgttgtgtatactgtgtgtgtgtgtgcatacacgcacatgtgcatatatgcttattatttctttccaaaattgacgtttcttaatattatgttaattatttctcctcctcttgaactcaaatacattctacaatattcttccagaatataaatgagagaaaatcctgtcccttctcacaaaaaatgaaataaagttttacatagccttgtaatagctctgagggtttctcttagtgggtttatgattgccaaacctctgatatccaggtcagagaactggtttgagcaaaccttttatctcgcaaatggcctcacatctttatatgatttcagataaggtgaagaaggccaccactaaaatggaaacatagctaattatagtggccggcttgtgtaaggagaaagtgttcaacttcaaagaacattcagacaagaaagtcgtcatgggatttccaccaaaaagtctcatttctaataacagaacatttccattaaggtttttttttcctccatgccttattcttaatgtcccctccaatgcaagattgtgtaccaggtgttaagatccttatgatacgaggagagtttgattttcttcatagtattgatagttcactacaatgtcaggtataattttaagaaaataacttgtattaattaggtaatagggagtaatggttcaataacagtaggagaatttcatggtctcttctgaaatccagccctgataggtttttgaaatggagtaactctaagcacctttacttttatttatctcttattaaatggcattactaataatgggcagttgctgatctgacaagcagtgaagcaaagattagtgatgaaaagaggtagaaaaaaaaaac

SEQ ID NO: 136789 - DNA, 1085 bp, Homo sapiens
ctatcattgatgataagggccactattgttatgtaaactaagaaagccaaaaaacaaaaaaacctacactttgtaaacattatctattgtacgatatatctcaagttcagaggtgttgaaatactaaaaaatgcatttgggaatcaatgaaatcctaagacatttgtggatactatggttgatttgtcagttcattattattcatttcctctcttaatatggctgccctgcagtgaatatacttcccttcccattgactttgggcttgactgtgtacctttgaccaatagaccatggacagacagaagggactgtgtggcagctcttagctggaactttaaaggcagttcaagatttgctggttccccttgttcttatcttccatcatgagagaataatatgccatataaaagctgctctttccgctagggtcctgggatgagaagacatttagagcagatccatattctagaatgaaaagaccttaacttgattcatagtgtggagtaaagctgcagctgatctgcagacacatgagtgagtaataaatgtttgttgttatatgtcactggaattttgtcattgtttgttactgcagcaagagctgacaattacaatattatagtaaaacaaacaaacaatatgtgatttctgggacaaaaaaaccaaagtaagcctttaatataaatgtgccctggtcgcatatattgactgcactatctctcattccatacagaaactgtttgctaaaaagtgtagcaagaaacaaaatatgaaatggaatcaatattgtgttagagcctgatttctgcagtccagattgtcagtcagactctgacaaatgaaggctgatggatggaaaaacacaacattgttcagttgagtttctttgtctttcctctcatgttgggtgactgttcttttacttaactacaattaggtttgctagaccactgcaacacagctctctttcactataactgcatgctgtcaagtacgtgccaacctgattgacaaagaatgacaggttctctcttcccattttgaactaatcaagggcagctcaccaaagggagacttaaaaa

SEQ ID NO: 136790 - DNA, 1009 bp, Homo sapiens
gagacatgcatctttaaattattttttagataatatattattatcatttggtaatttttctcaactctcaaatatgagtggaagtttaaattggtatgagttcttgagatggaaactgaagagtgaaatagctttatttaaaatagatacttctcctaatgctaaaacttaaagtataataaaaaaaataaaatagataattcttaaagtgttctttttagtgttcaataatttatatatatgtattatatacattatagttataatggcatatacagtataatgttcaaataacatctgttcagttttgacaaatatatatatttgtctttttctccccattgggaaataaagtaacaaagattatggccacagtttatcttgcttttgtttttcctcacagcacctgatagagagttctacctgtaaacaccaagttcactccctcctccactaaatgacaatgtaacaagtggcttcaagttgctccaactttttggaaggcatccttatacataatggataatcacgcttgtttttagaggtatcataattacaaatttagaattctaagtgttcttcagcagtaactcagagatttaagaatccctttagtaactgatatagtcagcagagaaccgtatttcctgatgaaaatacaagctcagagccacaaggtcagcagggtagagacttatcaggcagacaagaggcactgttccagagagcagagggtcagaggagactgcaagtacctgcatagagatctcaggtcatgtataatgcttcctcatctgtcaacccagctgccattttggagaggagcaggaggagagcaaggaaatctaaaagactggtcattatccatgaggtcccaacccataaaaagagactggtgaaatcactatttcagagtgagatgataattttttctcactgcccagtatgggaaagggttatgaagatcactgagaaataaatgaagaagttttcattctgagaatcaata

SEQ ID NO: 136791 - DNA, 1033 bp, Homo sapiens
ggaatctttttgacttgctgccctctggactcaaaaactgagtttgcagtctgcttcaaccattaatcttcgtcttccttctaactttcatggaaatctccttcatgaaatgtctgattactaccaagtgtcagagttcgttcagctagtccttcaacaacagaaacctgctgaaatgaactagatgaactggcgttcctaagtttttcaatgggaaaactggtttcccttgaacaaaatggagggttgacaaagaaagctttaaaaataccctgagtttgactacatttgagacagatttcttcctgactttagacctgaccttccttttcttagagcatttactctagaaaactttatatattatttctctacttttttgagacaaaaatattctcctagcctcttgccacttttatacctcaggaataaactttctcaaggacttgggagctagcactttgatatagaatcatcaaaaaagatagtgccccaatctgctagtcttctgttgggaggataggaatctaactttgataagtgccaatcagcaaacacagatggcctaaataagcacattgactaacctccctcctgatatctagtactttctcactaactcatctcagcacttagaggctctcctgccttttatttcagcagaattgagttcaatctgtctcctctattgcaaaagttttgaacacagtctttcttgtctgttgtctagtgctatttttctttgacaacactcacagcaatgtgaacacacacagtgttcagtgactttaatggtcagtcactacaattgagtcctttggtagtttttagtgtggatttgacattatgggcaattatgctccttatactgcaaggaagagccagcagagccacatgtcatgtttatttataaaccacagaaggaaagtgattcttgaggggaggaaaaaaccccctccctgtgattaagatgaaagtatttcagtcactaagccttaacataaaattatgtgtcccgccacacctcatattt

SEQ ID NO: 136792 - DNA, 1020 bp, Homo sapiens
caggtggagataattgaatcacggcgggcggttaccctcatgctgttcttgtgacagtgagttctcacgaggtctgatggttttataaggggcttttccctcttttgctcattctcctccttcctgctgccatgtgaagaagaaggtgtttgcttccccatctgccatgattgtaagtttcctgaggcctccccagccatgctgaactgtgagtcaattaaatcactttcctttataaattacccagtctcaggtatgtctttattagcagtgtgagaacagactgatatatttcattccatacaacaccaaccaggtctcataccaggtcttgtagatgataccaaataaactctctgaaacatatttttcctaattctttttgtcccattgaattgtgaaattgtacactttcatctacagcaaatattggaaagtttctgcatctggaagattttgaaagtgaaaagaattatcttatattgccatgaatgacacagcccttgataaatgagtaggaatatgtgagatatttactttaaaattgtctttaaaggcaatatccattctattattgacatcataacattgagtgaacatattatcagccagatttagtaaaactgtacagtgaattttccagagatatccttgtataacataagtcatctagtctccacagaaatgattgaaattccttgactagactaagcagctccattggttacagtaaatccaaacaatttccccctccaacctcaccttctactttatgctcacatctacttttgtttatgatctcaatttcaggtccatgtcttaaatgtagacctactaaaataggacatttactccaaatttcaattccttccctggttgcagccatgttttgagacaccagaatgtaagacacacagaaacagaaaatactgtggaaggaagaatcaacatcttttcaacttattgtgatataaatttgaaaagctatgacatggaattctgattcaattgatatccatg

SEQ ID NO: 136793 - DNA, 1008 bp, Homo sapiens
tcacacggatatactgggtacatttaacatattgcacacactgtaaagagccatttgagtcattaaaatattcgcttttaatttgtaggaaataagatgctgaaaagctatttggttgaaagctatttggttgggggtggggtctgaatttgtaagaagccaaagttaaagaaaacttaagagacaacagttgtcttacaaggaagcgcatagagcaatatgaattgctaatggagactttcaagaagaggaccaaccaggcctactttaatgaattagataaggctcatttctaatcaacagcgtgtatttgcatgcaaacaatgagctaaggtctttaaacaataatttcttcctttaagtacatttacgaatgcctcccattatcttatttacaccattaatttgcatggcaaaccagcatagattatatactagtacattttggtttaagaattcagaagtagagaggtttaaaggagtagtaacttaatgaccgtacatgaagtctcacacaagaagggctttttaacatgtctagacttacttttaacttccatgtattctgaaagagatttgtcaagaatcatttccaaggtaatctgaaaatattatctcctttgggactgcttgccagaaaggtgcacacattccattgagaaggggctactacccagatgtacgtttctacgtactattcacctctaaaagtaaccagagttccttgaaaaaaatgggtaattctaaatctgggataggcaaagtccaaggtgagcctgggacaattgagcaggaagctctgggcaagaataataactgtaattcataataatatattgaataaataaaaatttatgagtccattttgacataaatatagaggaaaaaccttttttttttttttttttcaaacagaagaaagccagctggtaaatgttaagatcatgtcagattaggaaaacctccattttgcaagccccagtgtaataactgagttagggaaggatc

SEQ ID NO: 136794 - DNA, 1058 bp, Homo sapiens
actgataagataaggaatagattcatctagatactaaagaaaacatccaaaactttcacaaacagatgggatgtttcagcacagtgatggaatctgtaaaatgatgcaatggaattgctaacaataagcaataatcaactcaaaatgttaatgtagcaattgcaaaattatttctattataaaaaatgttaaattacaaagagaataacagtaccttaaaatgacacataatttaaaatactacagatgttaatattggaaaaattgtttaccaatgttcacacctgagtactcaatcctttgatggaaggtatgacactataatgatttattataaaaactccttaagtggccgcgcagcctgcgcatgcgcgccggcgaccaagcctaaatagctaccgcctctgcgcgtcgccctccacggttaccccggctttccgcccctccttctcgcggggctcgagggaccatggccgatcctcgcgtgagacagatcaagatcaagaccggtgtggtgaagcggttggtcaaataaaaagtgatgtatgaaaaagaggcaaaacaacaagaagaaaagattgaaaaaatgagagctgaagatggtgaaaattatgacatcaaaaagcaggcagagatcctacaagaatcccggatgatgatcccagattgccagcgcaggttggaagccgcatatttggatcttcaacagatattagaaagtgaaaaagacttggaagaagctgaggaatataaagaagcacgtttagtactggattcagtgaagttagaagcctgaaacttttctcgtatggggtggtttttgcattaaatcctggggtccattttacaatccattatttttgaccactgcggtgtgttcaagtagtatgagaatgtgattgtttttatctggttacatatatatttctttgtctaatttaatatgtcaaataaatgagttcatctaaaaaaaaaatccatacgtgatgtgtggtttatatttgtaactgcctatatgatatatattcttaccccaaccccatcccatcatatagata

SEQ ID NO: 136795 - DNA, 1036 bp, Homo sapiens
tgaaaaatgggaagaggacagttcaggaagagatacaacctgacatttttatagattgcaaatttcactacatttctacctaaaaatggtaccagtaccaaatggcagtaattcctgggaccactgaatattccgagctaactcatttgccttattgacttatttcacatttgtgactagggaaacaatacatcattgtaatttttcccttctgaatttcctcttacaatggctgattgttaaagaattaggacagataagtgctacttttactcttctaaataatgaccaaaaaaagcccataggctaatgtatcacaataagatattagaaggagaaaaatcgattgtcagtaagacactttgtaataaatcttacaacagtgaccttgcttggctgctatatactgtataaagaagagaagccaatcaaaactgcatgaatgattaatgcatttcatacaaagctcgatgatatccttagaatatatttgctaaggtgctgcagtcataagaagtcaaacaaatgtgagagctcaagtaaggagtttcagaaggagttcttaagagagacacatgcagctaatttcttagtttctgttgactgtacaaatggaagtactgatatcagaatacatgttgtaaggaaaaaaagacattcagattgccgtttgaagttatgaaaactaggggactacatagtagatttgattactgagaagtcttataagaggattctgcattttgttctgttgacattaggtttaataacatgattttccttggtcaaacaatgcgtgccattttgcagcacaaattttaagagtgaatgtgtggttcaccatatctttttttttcttcctgcctcaatgtatagcagagttgcagctgctaggtatgtagaatgactgagcctctgagatatttaggttgtttgtcactgcagcatagcataacccatcctgacttatgcaagttattgggcattaatattagtagaaactgaatttggggaaactgaggaagaaggaaaagaa

SEQ ID NO: 136796 - DNA, 1047 bp, Homo sapiens
agcatgaggcatttaagagtgctgtattttacacactatatttaagtgtagcaggaataagaatagagtcttaaaaatatatccggtcaagacttgcttcctcctttctccacaatctttaaatgcaaatacatgcatactgacagctctcagaaaaataggcctaatgagaactctccctttcccaagggatgccctctgccaccatctatttatggaataatagctggctccctacttcattcttacatagtacttttaaaagagcaatttccatttttgaagtattgctgacaggaaataagtaatcttttatcacagtcaggaaaggtcagcaagtcagtaatcctccattcgcttactgaaagaaatatccacttttcttccacagcagaccagaaaagtgatttatctgagattggcattaatacataaaatggccaatgcacctagctatgccagagcaatctcttacatggtccagaggcttcttttattacctgctaaggctgtgaattgaatctgttggagcaagcattgtagataggatttccaatctcctcccaagcactcttccataatatcaaatcctggcaaggccaagacattttcataatgaagatcgactcagaagctgtctttgctcttgtgtcctgatattgaccttttctttgcattcggttgtatacacacacacacccacacaaatttacagaagtttttgtgtttcttacaactgtatttcatttcatatgttcatttttcagctctccaaccattcaacaagttttattgcatctttaatatgggcccaatactgtacaaggcagcaggacattactaaaaatataatcttagacttctagggtcttagaattcaagttgggagtgcagtatgcacatagaaataattattccttatattgtggtattacttacagttctcaaagtaagttcactaatcttattgcaacctgatacttttactaacaatatagagtatgtagcaagattttgatcaaatttaatgtgtgcttaagcaaaatg

SEQ ID NO: 136797 - DNA, 1031 bp, Homo sapiens
catggaatattttgagttactttcccccattgttcaggcttgagtaaaaataagttttccctgtctgtctcagacagtcaataaacattagtacatatttagccaggcatttgagctttgaggatgttacaagtatgagccaaaatacagcaaactactgctaccaatgattgcatgacacctttgaatcagaaatgctctaaaagatgagacaacaattaagccctcttatgctcattcaaaccaaaagtgctgcttggcttcagttaggcttgtttgactactgtgctgtttggatggagaaatcacttgtaatatgctattttcctgaagttgggctggtttttattcataagtataaatatgtataaattgcatacatttatatactttgaatggtttgtatagtatctattttgaaatgagagcacttttaaaattgtttgtaacttatggaaatataaagagtaagaactgggggaagttatttaataggaaaaggaagtcaaagatttggatcttccaagtgctgccatttagtcatgattgcatgctataagagtgcgcaggtatgagaaaaagtagaaatctggccgaggcgggtggattacctgaggtcaggaattcaagaccagcctggcccacatggtgaaaccctgtggtaaaaccctgtctctactaaaaatataaaacattagccggacgtggtggcgggtgcctgtaatcccagctactcaggaggctgaggaatcacttgaacccaggaggcagaggttgtagtgagccgagattgtgccattgcactccagcctgggcaacaagagcaaaactctgtctcaaaaaaaaaaaaaaaaaaaaaaaaaagagtagaaatctgactggttgatggaattgattaactttggagtttatgctccacccgtaattatttcttagagacaaacagaagatttggcaggcagtcacatttgtaccacatgaccctacacccctggtcaaagatgattacacagagatagttcctgccttta

SEQ ID NO: 136798 - DNA, 3927 bp, Homo sapiens
aggagctacttatacggtttattagtggcacaatttagtttaactagtactacttgccataataataatgataattatatttttaaggtgaaaatcactactttgtatgctcatataaattattatattgcactaattattttatctatactaataatgatttactaattaataggataattcttatatattgggaaaaggtatttaaacaaaaaaattattagtattttaaagtataccatctagaacaagccatctttaaaatttttggcttttatgtatatttgattacaaagttactctcatacatatatagttacatatttatattattttatttgctgcaaataacattttctaattttgatttgcttttctttcagttgttttacaggtttgcagcctggtcctttacccaatcaagttcattgaaactgtgagcttgaaaatttaccatgagttcaactggggttatggcctggcctggggtgcaactatattttcgtttgggggtgccatcctttattgcctgaaccctaagaactatgaagactactactagaaccaatagtctcaaagtaaaaacaaccaccaccatccaacaaaaggattacgtctgcatcttttctaacttactattttctaaaacacttgtggagcatcaagcagtttgctcagttgatttaatcttttttgccttttggctgtcaacatcataaccagcttttacatccattttagaaatctgcacaaattaagagagctgattagacataggcaaatgctgcaaacttccaatatgttcatatcgtttttcttgacaaatgaagggtctatatgacagcaaccattgtgagaaactagttggaatgagatttgcctcaatctcctattgcctgcaggggagcagttggcataagcaacatttagaagttcctttgcgctgacaaggattccactgttagagcccttaccgcctgcttatcctacccaatgactacattggctgttggttatttgcttgagtgagcccttgaaaaatgaactgcccttcagcatctaatgggagttgtgaatgtaactggttaatgatacacattccaccttcaggaacactctttttaatgggaggttatgctttggcaatcagcgtctccctgggaagagagtcaagacttggagacatgtgcttctcattatgtggttagaaattggtgcctcagccctatctagactggggaaaaattgaggatctctgtttttcctggggcaaacagaaagaaatctgcatgagttgcttttgtaccctttaaatcatttgccaaacattgcagcaaacaagtgtgcgtatgtaacaagcttcactgtttttatagaaggtgaaccattagtataaatggtaataagttgttccctaaccctccacatacatttgcctatcacacgtaaaattaatatttactctagtgaagtggtttgagcactaaccttgtacacattgttaagaggcttagattggtattcatacttatttaccatacaaaagtatggtaccttaaagcttttgctctatgttctttactgtttcactggaaagtgtcaatagagttgcctaagaataaaaattgaaatggtgttaatctgaaaattaatgattctctgtaagcactgtagttgaaaagagagtagcaattaggatgatcattttgtgtaaaattcattaaaatagaaggctgctattttttgcaagtattttaaatgtcttcatttttttaagaaaggaatagcgatagatttatataaatatctaaatgtctcagtagaggagtagaattcatctggttatcacctggtcctctgaagttaactgatgggctaaccgatttgtgcacacacttaggatggatttatgttaagggaattacttactgactgttcaatggaaggaagtattaataatagggaataagtttgcaactaatctcatgctgcaaacttgtgttaattctgtttaatatacaaatttggatagcttaattataaacatatttttatatcaaatatacagttctaatataaaagttataaataattatttttgttaacaaagacactaaaacagtatgttctggttttggccctcttgcagaaagaagcattagaaaaattactttaaaagtagctatatgttactgtattgcaaaatctgttaagagcaggaccacatcgatagtatttaataatttgttttacctcccaaaacacagttcttctttcagcttgtcttaagaatggttgccaaaaacaacagccaaaaaaaaaaaacctattttattatccaaatgctagaaaacacacatgaattttctataaaatcacgaatatgaagtaccaggtttagtcttactttagcaatgatagacaaaagcgaataaatacatcacagacagaaacctttataaaaatatatgattctataaagaatcattagaaattatgagtggaaattctccagaaagatagtattatagagtcttttgaagcaattttttgagaaatagtaaaatctggggcagagtgtcttgcagttaattgcatattgtcagagcagcatgagaaatatgatatttggatagggatttcagcaactaaacattctctgttctgagatctctttattcctgaataatgaaagaatagtactttggtgctgacaccaatgaggcacttctcttggtcctagtagaggatgcagtgtactgttaaaccaatatcatcacatctcgagtcttatcaagttttcattctctgtcaatatgacaagctcaaagtgacagaatatgttataggttgaagcacacatatttgcagtttactgaaaagtagatttcttatgtgacttttttcccttctcagcaaagagccctacactagatttctaccatcactaatatttggaagtatttcattactaacaatctcagtacaacatgaaaattgttgcttctcatctaaaatacaattttgtctatcagaataaacacaagtgaaattttcacctacattaacattatgtctttgcagctttaggtttgttagatgtgttcttaagcataatttttagccacaaacccattgttagatagatatctatggatatagatctacatctatagatatagatatacacacatatatatactcacacacatatagcataaaatactcagcagggctagttattccgatttcttgcacaattatttagctttttgtaagttcaacatgtaaattttaaagacataaatatagagagacttatgtgtttgaatataaatgatatatatggattagcatgtacctgtatattattaaacatgcaatgaactgactggtaagtgacgtctaattgtatggctagcaatgtaatttattcagactgtatttttgtacagagcagtgcactctaacctatgcctctgtgtcctctttaatgcctaaagctgtgcctagaaatttcatctgtcttaaaagtaaaatatacttcatgctgtttatgctattagtttctgtactgctattctatatttattatttttaaatatatgacatgtttactacttaaacatgaattcatggtatcctggttattttttttaagtcatctgggggaaaacctgtttatcactccagtgattttgagtttgcagtttcacaatcagttcttcatttcatgatttttgtagttgacatgaagtcatctatgtggaaaaaaataaaaataaaagtgatttcacggatgtggtttgaatttgtgtcgtctctgttgtgtaaactctttagacaacgcttctaaattacatatattcattacattttctccttcaaaatatatattatttagaaaacatcttaatatgacatgct

SEQ ID NO: 136799 - DNA, 1026 bp, Homo sapiens
tgatctaaaagagcagccctcatccctgtgttctgtctgctttcttgcatttcttgtctcttagcaatatgtgacattatattctatatttgtttactaatggactgactacccatgagagtagcagctttgtctcttttgatagcataatgccttaaactgtatcgctttagaaacattcagatatttattgaatggatgcatttattgaatgagtaaatgaattactatacctaacccacattcttgtttcagtcatatcctggtaggatcagtacagatttgacgagtgaacagagtatagaaacctaaggagaagtgccttttttttttcaaatgtacttggcaactttggaattttcttctctgtagttatggttgatagtaattgacttcttgttagttttaagacatttaaaacatgaaagctcccttttcctcacaaaggcaaagagccaactgggctttttttaaaattaatgcacattttagcacttactaactggaaatagatgaagtgtgggtcatacaatatgccgtcagctgagtcctaacaacaaccaaaaccttttctgagaaggtctgatttctattttggatatcagtagggtatcctcttatacaaacttacttgtgtatccactctcagtagtaatggtaggcaaagtgctgactcagcagtgttgtgctacacggcagaaatgttgggtgtttttatatctagttctaggtcggtcctttgacacctagccagagccttatagaaagaaattttgaggaatcatttcctcatgaatttgctgtatttcatcagttttatgggagagaaagatgactgttatgtagactttctaggaatcttcatcatactggtaataatcttttacatgggctaaaaatagatgagagtacattttaaaacataaaattccattttaattaaacactctatccatcctagtgttcttttttaaaacatataagcgatatcaaaactatttatgtatatagttttactatgtcagt

SEQ ID NO: 136800 - DNA, 1048 bp, Homo sapiens
attgtttcttttatgtcaattttatatttagggaccaacctggctggtagggcctatcaacctttgcctttaaattatctcctaattttgtacctttttttcgtacaccatcattattgccttagtcgaggccacaacttttccctaaatggaacgtctcattccccaaatttggtcttcccctactttattttgtttttctatggcaatatctgactgttttaagatgtttatgtgactcctttattttgccttgttgagtatctagtttttcagttctttcttttagtctttctttagattccctgacttttctttcccactgatgacaccttagtcatcactgcctacaggtccccacacactgaatgaccttctaggggcctgtccttctctaatctcttccccatgtaatctgtcttggatacaacacatgaggtctccttgtgacataaacatctggtcttgtcacttgtccctttgatttcttcagaagcaaaccctgagacgagaaatcaagtgcatatactttatttgtaaggtagaagaagggatatgataaagagtatggaaaatgagacgggaatgggaaagcagccattaaaaggttacattatcaagccagttgtcactcgaagcagctggagcttaatcttcttggggaaactttaaaaaccggtgtagaacacgcacctcgagaataatctcattcagaggactacggagctggagtattaatgcaccaaatttggagcgtcattggttgagaaatgtcggttataatcaagggagagcagtgttaattttctggacctggcctgccccataggcagctgaagaggctttagtggccagaggtaactcaggcaaagaaatacaggtgctggcaattggaagtcagggtagcatgtactgaagtggggaagataaaaatatatggataggacaccaaccgcatatacaattacaataacctcgcagatggtctccctagagaaacaaaagtttattactttatgaaacactatggtattatagtatgaactaa

SEQ ID NO: 136801 - DNA, 1049 bp, Homo sapiens
accaactcaccacctgtttttgtagattaagttttattggggctgggtgcagtggctcacgcctgtaatcccagcactttgggaggccgaggcgggtggatcacttgaagtcaggagtttgagaccagcctggccaacatggtgaaacccagtctctactaaaaatacaaaaattaactgggcgtggtggcacatgcctgtaatccctgctactcgagaggctgaggcatgagaatcacttgaacccgggagacggaggttgcagtgagccaagatcgtgccactgcactccagcctggatgacagagtgagactctgtctcaaaaaaataaataaataagttttattggggcacagccagcttgtttacacattgtctgtggctgctttcacactatcatgcagagttgagtgggtacaacagagaccataaatcataaatccaaaaatatttctcgtctggccctttatatggaaagtttgcttatcattttctaccttagtctgtctttacaaaatgcaaaacgtgtattttagctatttttttgaggatatttaaaatagagaaaagtgatcaaaattcattcctgtttgaattatggctgaaagtgaagagtcaaatgtgtggcattttttttcacactgagctatgtgaaagagctaatcaggaaaaaacaatctattgcactttcactttaagatattttatatgggtagatatttagttacattttgatttaaatgaatccaatgctttaaagtttttacttatgtaaaataatttagggaaagttgctaacagtaataatcgttctataagagtaatagaccaactagaacatatggagcataggctttcttaatcaaactctccaggaattgcatagatggatggatggatggatggatggattttatttttttcattgtacacttttatataattaaactttgatttttttaattcagaaatttcaatttacacacctgtttttagaaggatttccatcatgccaaagtgcaatataattgtgcacttgtgtaaactt

SEQ ID NO: 136802 - DNA, 1095 bp, Homo sapiens
aaatgaaaatacaagtgccagtctgacaaatgtgagtgtgatttaaaaatcagtgttttaatttgtgatgagaatgatagaaaagcgagaatcatccataaaaacaacggaatacattgaggggaatactacccacctaaacagtaggacttctgtttatgaggttaaaaacttgtttttccattgctttttaattatatctaattttctaaaggaaataggcattatgtgctcagggatttacatatagtagaaagaatctcagcatataaccagtagctacagaggtaaataaattagccagtgtttgacaagtgaaaggtttctaaatgaggtgagtggaggcagaaagctttaggaactggttttgtgcattgcccttggctcaaaaatatcgaaaatgtatccttgttaaaattttgtcttttctgaaaattggaagtgacttttgatcatgaattccctaagggaatgataattctccaattggacagttataatgtggtccatagaattttcataatgcagtggcgatttcaggccagtctcatatgttacaatgctaaaataagtcagcacaattctgcagaatactaaactgtttatagacattggaaactctgatgccagctaataaaaataccttgaaagaggacttgaaatcagttcctgagttgcatgttaatgttaaacttgatggtgtagtatagggactgcccgatttttatcttgtaactgcaaggggaatataacattatgtgtatgtattttcctggagtttttttttctttttactttttttttcctgttatagaaaacactagtagagaagcatacacttatcttgagcctccacttctttcggtgcagtttgaatgcccccagtgtgtcactgtgtcaattttgccaaaattcttttgagagaacctgacacgtaacatggcagcctgatttcaggtttggttttcagatccaaaacatgcctcccatcccattcgagccctcaccaatttatcaaccaaggatgtatgttatttcctcaaaactgattatcacctgttctctgtggtctcagaaaccaaactcaggtttcca

SEQ ID NO: 136803 - DNA, 1080 bp, Homo sapiens
tgccagataggaatagcattgaatctgtaaattcctttgggcagtatggccatgttaatgctattgattcttcctatccatgagcatggaatgttttcccatttgtttatgtcttctgtgctttctttgagcagtgttttataattatccctgtagatctttctcctccctggttggctgcattcctagatattttattttttttgtgtggcaattgcaaatgggattgccttcctgatttggctctcagcttggctaacaatagcttaattttaagttgaaaaagaatttccaaattttgtagaagtcaaccatgtatgtttcttaaattgattaaatgaatattaattttcattcaacaacttaattgcattctggctttattaaaagtatgtattaatttatccaaaaagattgaatgttctttcagcagaatttcaacctcacacattaaaggcactgacatttcaattttactaatcttttcaaactattggttcacctcccttgaaaattagacaaggacacctttccttaatgtttttactcctaagtttgtgtgtgatttgggtacacttgtagatcatcaattttctattctaatcatggacactgaagactctcacttaaaaaatgtacaacgaaacatccatggtcttccaaagaagtgagaaaaaatatctataacacctttgtctctatcagcttgttgactgttatgaggtttaaaatgatattttaatgagccatgtttcaagagatcacatatttatactttctgttcaaaatttctgtttattaggcaaaaccatgttaaaaaaatagaagtcgagacccctgaattacttattctctgtacataaaaagggacagacacaaaagaactaaaattttcatcaaagaagattttattgccatcatgtttaaggtccctaaaccaaatattcaccagaatgctgtcatgatgctctgtgaatgaagcctagaatctattcttagctcctctaggtaacttaaaggggggtacattcgaatgcttccctctattttcccatcttctcacatatactcaatgagtta

SEQ ID NO: 136804 - DNA, 1881 bp, Homo sapiens
atgactttctcttaatgtcttttagattttcaggttccttagatttacttttacaaaggacattttaatgtgtgaacagatataatttctcttttgctcacattcatagaaggattataattcccagggagccacttagatcagtcttggcagctaagggatttgatgggtgtgggaaaagcctggcctttcgtaaaacatttcaaaacaaaacaaaaacaaacaaaagaatatctcaagcaatagattttacttgctgtcgggaatacatttcaagaaatttcctgcaagtttttgtttaatagtaagaccacttgcagagaccatagatatagtcagtgctactagacatgctagtgaaaggaatatagatgcttcaaaatgtgtctctggaatacctaacctaaataccacagcagggagctctctgaaccacttctggttctgagggctaccccaaaataactaaccgaataaataaataaataccacaacaaacttccatgtgagctatgctaaattgtaatgtaattctgtatcagagtagagtagtatgttggagaataaatgagacattggattctaactgacctgaacttggccacttaccaatcatgtgacctcatacaacttaatgtcctcaaatggtttatcataaagattaaatatatgaaagtgcctgtttgttagtgttatgtttcttcctggttacgtattcagaaaatcccagtgatacttttttcaataattgaagatttttcccctttaagtagtaaaatctctgcattgcataatgaattgcataatgaagtactttgtcaatttcaaatttaaattttgatatgcattacctaacatttaacaatgctcttggtagatcatgatcacaaaactattatccttttattcagtcctattacaagccagacacctcagttattcccaatgtcacaataaacttgcaaggtagctaaagttatccctatatattattgaggaaactttggatttttgttaagattaccaaggtctcaattaactagtggtaaagatggattcttaccaagagtattccagttgctaatgctgggaaactaaccacaacaaaagttagtcgtgtaaaataaccattttattatactcatgaattctgtgggtcaggaattcagataggacataatgaggatggatgtctggagcccttgtggaagataacttgaatggctaggaaccagaacgtctggaactgtagggtcattttccaaatgatttcgctcacaggtttggcaccttggtggggaaggctgtgagatactgggcaaagctgtgactctccctggaatgcctacaggtggcctttctagcattgtggtcttaggatattggaattcttacaaattgagtgggtcccgcaggacaagagtcataagagccagaatctctctgaactaggctgagaaatcacacatgtcttctaccacattcagttggttacaaaggagccatatggccagcttggatttaagggaaggagaattgaataccaccttttgatggagcagtggcaagttcacattgtagaagagaatgtgggataggagttgctgttgggccgtgtttggagcacacagtctgacactgagtctaactgcaaatctgcattctttattgcctttgaagaacaacaacaacaacaacaaacggccaaccagtttgtctttgctttgtagcttctgtacttaagaactttgaattgattatataaataatgtctgactgggacaaaaccttccctcagccagcatatggctttaatgactggttacttgtactttggatatgagatggaatgaactcgagaacctaacttttccacaaaca

SEQ ID NO: 136805 - DNA, 1082 bp, Homo sapiens
aggtagctactgaggctaccagtcccagggggctttactgctttccgccctccctgaccctccagttgccttccccggcgccccagttatgcccttagcaaaaatcagtcaacttatgatttctcgctacaaaccccttcctttctaattttgattcttcaactgctggtgtcagcgaagagaaagggaaataaagagagaggacctgccggcgattttctttctttctctctctttctctctctctctctcacacacacatacacagactcacacacacacacatagacacctgagaaactcattacattccttccagtttcatgtcttctctgggactatttataaagctttcctggaaacgtttcaagttgtaacaaagttgaaatagcacaaaaagccacaaaaatctgattttcttttgtctttggtttcctgttataacacaggaaaatttgaccaagtttcttctgtaaatttaattttgtgtttaaaaaaggctttttctttgatactacctcaaaattcccattgaagggtttcctctttgttggttaattcactgtggagggaactggttggcagcaggaggtcaacatttaggtccttcaattctttcagggttggcagtttacaactaaagataaaataaatcggcagaatttctttcttcggtaaccaggggatccaaataaactttggcgaaaatatctcctttcccctcttcaataataaaatttatgtaggaatgacagctactgcacgactccttggcaacgtgaatgttttgcccctttctctctgtctcctgaaataatagacccctgattgcataaagacttttcagataggttagagaaaccagtttcaactcacatttgcttttcaagccagtacccttttttcttggccaggaatgtagggaatggggagaagccagctcgagtttgcagagcaacatacagtgtttgctaaccttttcttaattgcctccatacccatttatctcagcttttttcctctctagtcaaggaaatatggagacgcaagcctaatgcaaatatagcggtaatagcactctg

SEQ ID NO: 136806 - DNA, 1056 bp, Homo sapiens
ggcactgggctccgcccgcgggccagaggcggggtaggggcgggacaggcgcgagcctccggcactgggaactggagccgaagccaccaagtgctggccctccgcccctccccgtacggcaccgcctcccgcagcccggggaggggccggggcggagcgagcccggccgagccgggaggagcgggcgcgggcgctggcagagcgcggcgcggggccggcggcgaaggtccggggtggaatcgacgtcgctgcggctgccgacgacccacacccggccggccgcctccgcagacccaccttggccgcgcggcagggggcgcgcagagccccgagggagcgagtccccgcgcgtggcagctcggcggcttctcccttcgggaggtccggctcccggctctccggacccgcctggcgtcctcgcctgcggcggggcggacgacagcggcgcccaggaatggcttcggcgggcagcggcatggaggaggtgcgcgtgtcggtgctgacccccttgaagctggtcgggctggtgtgcatcttcctggcgctgtgtctggacctgggggcggtgctgagcccggcctgggtcacagctgaccaccagtactacctgtcgttgtgggagtcctgccggaaacccgccagcttggacatctggcactgcgagtccacgctcagcagcggtgagggcctggcgcgccgcgacccctgcctcccgccccggactgccccgcgccccactgccaggacagtcaccgcctgtccccacgtccccgcatcctctgccctggcccgtcccaccccgtccaggcccttctcggatcctggggctcccgccacctccctggcatccacccctcttccctccccatccctggtcgccaaacctaaagcgacagcccacgccctctcccttccccgtggccattcctcctgttctggagtaacacgtacgctattttgggtatttgttatcatttgaggcgagagccatgtggctgtgtaaaaaaatgcgacgccttccacacccccgttaaaaaagaagcaggcaaaaacgcc

SEQ ID NO: 136807 - DNA, 1077 bp, Homo sapiens
aaaatacagtgctgaaaagaggatttcagtcatttattctgctcctgcgtctcttcttctttttttttaaatttaaaaacaatcatgaaactatagtttctctgtctttttttctgccctttgttggggggtgggtgaggggttattggctttattttccccaataagaaagcaaaaactagtgaataggaatttgaaaagcatttgcccagatagcttggaatactttacccacacacatatatttttacattttattcacttttaaaatttataggcagtagaaatcatacttgttgtgcattcccaataatttgataaatgtatatgcttgagtaacaatgacaagaaacaaaatccaagagttctgtcaagcccacaatttcccttatgctgtccatttaaattcaatctctgtccattcaccagcaaactctgatttttaaaaaaatttaaaaatgtttctatacatttacatttaccaaaatgtcataaaaataaaatgatatagtatgtacatttttttttagtctggcatctttcatttagcacaatacatttgagatttatcatgttgttgtatatatcaaaagttctttctttttatagctgaatagtattccattgtatggatgtatcagtttatccattcattagttgaaggaatttgagctatttctaatttttggtgattgtgaagcaagccattataaacatgaatatgcaggtttgtatgtgaacataaatttgtatttatcttggataagtacctgggagtgagattgctgtattgtatggtaagtgtatgggtacttttataagaaactaacaaactattatcccatgtgaatgtacctctttaaaaattcctaccagtaatgtctgagatttacagttgctctgcacctgctccagaacttgttgttatatttgttgctcttcttaaacattttaatgggattatttgccatctatatgttttccttgttgaatgatttattaaattttttttagttttattattactgagtttgagagttctttgaatattctagatatgagtactttgtgaaatat

SEQ ID NO: 136808 - DNA, 1054 bp, Homo sapiens
aacacgcacctgaacaaccaataggtcaaataggaaatcaaaaggcgtattagaaaatatcttgttcccataactgcgtgcgctctcccctcccattctctttccgccatctttccgcattgccacaatggtgctcatgaatgtcctggctgatgctctcaaaagtatcaacatgcagaaaagagaggcaaacgccaggttcttattaggtcatgctccaaagtcatcatccagcttctcagtgtgatgatgaagtgtggttacactggcaaatttgaaatcactgatgatcacagagctggaaaaattgttgtgaacctcacaggcaggctaaacaagtgtggagtgatcagcccagatttgatgtgcaactcaaaggtctagaaaaacggcagaataatctgattccattgtgccagtttggtttcattatactgacaacctcagctggcatcatggaccatgaagaagcaagacgaaaacacacaggagtgaaaatcctgggattctttttctagagatgtaatacatatttacaaataaaatgcctcatggaaaaaaaaatatattgagacaaatggaaatgaaaacacaacaaaacaaaacttaatgggatgcagcaaaagtagtattaagaggaaatcttataatgataaatatctacattaaaaaaggcagatctcaaaataagccacttaaattatatgaactagaagaaggacaaactaaacccaaagttagcagaagggagaaaataataaaaaataagagcagaaataaataaaatagagaatagaaaagtcatagaaatttgacaaaacaaagagtattttaaaaataaattttaaattgacaaaccatgagtgagattaagataacaagagagaatactccaataaatcaaataagaaataaagggggagacatttcaattgatttctcagaaatataaaggaacataatgactattatgaacaattatctgtaagcaaattggaaaaccaagaaggaaatgtatatatttctagaaatatataacctaccaagattgaac

SEQ ID NO: 136809 - DNA, 1162 bp, Homo sapiens
ccgcggcggaggtggggccggggccagggtcggctggagcgcgcagggcgggggaggggaggccgccccacggcggcccgcggggacccggttccggcgcgcgcgggaggcgcctagtgcggaggcggcccgaggcctagtgacaggcgcgcggcgaggaccccggaagcccacctgtcagagttaccggtctgccgggcgggcgccgccagtgtccggggtggacgccgcgagcctgcacgttgcgccaggaccccggggctgcgcccagaaaaatcatttttcttctctgggaaggtgaacatttgtagcattgattttccggatctggtaacatggcaaaagatgccggtctaattgaagccaacggagaactcaaggtcttcatagaccagaaccttagttccggaaaaggcgtggtgtccctcgtggccgttcacccctccaccgtcaacccgctcgggaaacagctcttgccaaaaacctttggacagtccaatgtcagcattgcccagcaagtggtgattggtatgcctcagagacctgcagcgtcaaacaccctggtggtaggaagctcacacacccccagcactcactttgcctctcagaaccagccttctgactcctcacctcggtctgcagggaagcgcaacaggaaaggagagaattgcaagggcctgcggcatttctccatgaaggtctgcgagaaggtgcagaggaaagggaccacttcctacaacgaagtggcggacgagctggtagcagagttcagtgctgccgacaaccacatcttaccaaacgagtcagcttatgaccagaagaacataagacggcgcgtctatgatgccttaaacgtgctgatggccatgaacatcatctccaaggagaagaaggagattaagtggattggtctgcccaccaactcggctcaggaatgtcagaacttagaggtggaaagacagaggagacttgaaagaataaaacagaaacagtctcaacttcgagaacttattctacagcaaattgccttcaagaacctggtgcagagaaaccggcacgcagagcagcaggccagccggccgccaccacccaactcggtcatccacctgcccttcatcgtcgtcaacaccagcaagaagaccgtcatcgactgcagcatctc

SEQ ID NO: 136810 - DNA, 1015 bp, Homo sapiens
aaaggctggcggggacccgcggtggctaggagagacgtggcggcccaacggctgactacttgggcccgcgccgagccaggctttctccacggtgcgtgtgggagtgcacagaggggcctcgacggcttttctgtatgtgttataaataaaccccaatagtggaaagctccagcaggatgccctgagccctgggtcttcccagcagaagcggtggaggatccgcccctcgtttcccacccccgcgccccaccctgttcccgccccttctctcttaaccccgccccagcccagcccccgcctctttccacctcccttccagtccgctcccggttcctggctccagctaggctcggcagaaataggagcgcgcaggcgcgacgtgcggctcgcagaacggcgagtagcggagcgggacccgctgtgagtgtggcggccgcgctgggttcctagctggggaaacgtgatccaggcgaagcgccccaggaaggattggggtgtgtgggggtgacttcggttctgcgaggagaaacccgtcagatatgcggtagcgttggtagcgacgctgcctgtgggtgtccggccagggccgcgtggggagcggagtgcgtggtagcgggagtgggtgagggtgggtatgacgagaaaaaaaattgaaggaatggggtttacaggctggaagtccgcacacagactgggcaggaccgcgaggcttgccaacggtgctggagggtgtcccagcttcaagttcagtcccctgcttggtgcccatgagggacgtcccaagctcatcccttcctccagcgctgctttctctggtgcagagttgctagaaacattccccgtcggaggggaaaggatttggaggcggtgggctgtcggcccgggctagtcccaaggagggcgtggcgttcgtgtgactttcctttacccacccccgggaatgtgtccctcttctgatccattgtgcccgtggacattttaacaaaggctatgactgttttgtaggcagtggcgg

SEQ ID NO: 136811 - DNA, 1001 bp, Homo sapiens
agctgtaatctaaccagttgtattatacttcttttacatcttaaagtattttcggcctttggctaatgggtctcttcatgttacagttccctgataggcttggtctaaccatttctgccaaactgtctttgacatctctcttaactccaccaggatcactggccttccagttacctctggctcctaacaggaattatcttccccctgttcctcacctccagccttcttctcctgaatggatatatgtatttgagaaaataccatgaacaaatgatcacttactttataaaagaatggaattggttctttagtttaaaaataagtcagaattggctacctgcttagtctagccttctgtgcctgcaaagcagacagagaactatgagcattagtaacccttatttttcatttctcccttattcatctaaatgcaaaagcactttttttcatttcacttttaaaaatagcattagtcattgttcctaaaacacttcaagttagtctctttttttgactaaaactcaaaactcagggaggaagagtagtagcatccataaaacttttttaaagttctacatcatctgtggacctactgactgaaaaaatattccaaaccaaccattgtgattataccttccttcttaaaactttcctcttagacttccttctcatatttctgattttttttctctaattctttgaccggttaacctcagtcacctccacagtcttctcagggttctgttcaaaactctttttctcactgtatgcacaagagtcaagggcatggaaactggagaaatcgaaaattggaggcaagacaagaagttaaacttttctttccgagcattagtttcctcacttgtaaaaatgataattataatacttacctgataattaagatcaggtatatagtgatgtgacgcataatgacattttggtcaactatggacaacatgtgtgatggtggttcccataagattataatggagctgaaaaac

SEQ ID NO: 136812 - DNA, 1052 bp, Homo sapiens
taattacttctcaagatgtcattgggcataatgaaatgagaatcaaagtgccacagggctggggtaatcatagctcttaaaaatgctcaaggccgggtgcggtggctcacgcctgtaatcccagcactttgggaggccaaggccggcagatcacgaggtcaggagatcaagaccatcctggctaacatggtgaaactgcatctctactaaaaatacagaaaattagccgggcatggtggtggtagcctgtagtcccagctactcaggaggctgaggcaagagaatggcgtgaacccgggaggcagagcttgcagtgagccgagatggtgccactgcactccagcctgggcgacagagcgagactcagtcaaaaaaaaaaaaaaagctgaataattgctattctttctccattattgtggggtaataattggtatagttattttcaacctcattcaaataccgatgatgagtttttgatagcacttgttatcttcttgaaaggcttgcaaattaaatgcactagaattaaaataacaatttcacaatttgaacttttaggtacattttttcagtgcctcagaattcgtaacctattatttctttgggagaacatgttatattttaatctttgagttggagtaagttgtctgtggtctatttcttcccttctttcaaaactgtgtctgagatgtgtgttgttttctggagtcctagttaacaaaacacctcctttttcagtgacaaagccttgttactgaaagcactttatgttctgtgaatctcctccaatctgtccccagtgtgcttgttctttgtggtttggtttctaatattatgcattccaattttgtaaaaaaatctatatgagtaacttgccacagtaatcctctctgacatgtttgcttcagggaaaaagcaggaaaagtcagaaacgtaagcctaggtttaaaatttgctgtcgctgcaaaaaagtgaatagaatatattccaagtttctttttctgtattagtattacctatgggaccagaataattattttggcaaggatata

SEQ ID NO: 136813 - DNA, 2035 bp, Homo sapiens
gctgagttggtcagcattcagcttacagctcccaacaaacttctagcctcctttttggtataggtaaatcttagttgctatataataatctgttatctgtctgtccatatctgcatttaaagaaatgtgattaaaactcattttgttggaggttctccagccagccagggttaaagcagagtatttcagagagcactgacttgatcttattttatagcttatgttctagcactttcttgggtagatatttctcattgtagtgcctctgttgttttagaaccattgcctttgatttgaccagaagcaacagcattattttcagggagtattaccagaccttaagggtatccttctgtgggaccaagagtgtgtggtgaggtagtacaagtgcttccttcactgtgcatagcaatatcctcccacaaataggtcccctgcttcaggggtgcctgtattttgagtgattaattgcattagcctttatggtaggtgacaggatattctgttcaaaactttatgcttaccctactccactaccactttcttttaactaattcaagtctcagccgagactgcaaaaattttgaaattaaatgttattctagtacttctggttcaccaaaaatcaggtaagttcagcatattacagaacagccttgctgtgcagcactctgacaactttgcacaacataatataggatatgggggcaatgcttgactgtagtctgacccaattcttggtgaaatgccctgcaattctggctagagcaaggaagataacaagcctggtaagctgctgtgagacagtttctcatccctgtcatgtaggaaactgccataataccatttctcacccattttctagtttcagttgaatgcagaacttttcaccttataccctgtgtgggataagcctatgaattttcttgggtttagtttagagatggctcttcaacagcaccatgatccattgcttggaccatttgttatctgtatcttctagtttggtgtcatgatgtgagactagggacttggggaactgataccatgctgatttagctttcgatgtctgtgtaagtaatcagttgtctgaattcatctgggccaaatctcctttaccagccaaatcaatggaagtgtggcaagccaacctaacagctgtatcagtaatacttgtggccctgttagccatcacattgctgctttggtaatgtttaactgtgtaacaaagtgggactcttactgaccaaacacccagctagtatatgtactatgggatattccttgagccttctacttgtctctgggcataatggagcccccagtttggcaggtggacagaggccagagctgtatatcagaattactctgaattgcttttctcacattgtcagcccaaggaagataccaagacccgctcattggaaagtcttatttacacaactagaagggccataccaattctgaagctgccctcacacacacatctacctgagtgtggtaagaaaggaagcacagtaacagtgtttgggcctactcagaatggtgcactttgaatatgtggttgcctcctgctcgtcaatcctgtggtctcctcagtctatggtgttttgtgtttcaaagaaaccaaatgtttgaccatataagcatctgtaaaacatttctagtttggcataatatctggaaaaaatagaaggcaacatggagaataatctctaaagtatacatttttgtaaaaaaatatgcaatacttgattttgcattatattcttttctaatataggcatttaaggcatttttgccttctaagcactattttaactgtgtttgtagattttgatatgtatttttattatatttagttcaaaattttgtctactttctcttgtaatttattctttaattcaatgattaatttacaattgtgtttttactgtccaaatatgtagggttttcctggttttcatgtaggtaaatttgagaggaaaatgttaacatagcagatctgtgttaacattcagcagatctccttcat

SEQ ID NO: 136814 - DNA, 1054 bp, Homo sapiens
tggaaagttttcaggaatatttccttgcgggcaaaaaatctctgctttactgaataatctcttagcaaccaggaccatgtgttccttcagtaacttttggtgaggtagaatcttgtgatgtcccagcctcttgatttccatataacagggagtaggggagggagacattgtggagataatcagaaacctttggaggctatgagcaacctatataatcccacctccctcagttatactgaaatttgagtagcttttcacagaatctgtaaattttttattaacctagttaggacttttttgagccaaatgctcatttctactgttcttaatacaatgcctgtcacaaagttaggtattcagtaaatactagttgaatctattaattagggattcaccataaatttctcgccactaataaattacctaagtgtgaacgttttgtttatctcggaaataagatgattaaataaaaatatttgcatatttttcatcttgcattcatgttgatacacagccaatatatttcaagtcattttaaataaaagattaatctgtccatgatatactttgttagataaagctatttaaatgaattgtttttggataaatcctgtaatggtgttttctacttcttctttttaactcatttgttgaaagacggtagggaatagtggaccaggtaattaaataaagttcatgttgtagtttctgcctcatatgatagccaaagtaaatgagattattaacatgaacactttaaagatgtgtatcaaaattaggaggcttatagagagtctcaagtaattaagtgtgtagcgtagcaaataatgactttctctaatattggggttaagatgttcagcagagtatgaattataaaatcctcaaaatacaacttgaaagacttttgacttttagcccattatcctcttgttaatgcacatgtaagagattatgtggggtttttatgtcattatggcaaattataggctgtactataggtgctattcagtattggatacgaatgagttccaagtagctttgttgatctttc

SEQ ID NO: 136815 - DNA, 1105 bp, Homo sapiens
ctgtgagaaaatgaagcattatgatatgaattggtttctgtgtatgtatgagtgtttttttttttcatcttttggaaacagaatttctgctcccctgtgtacaccctttctctgtaattgcagtgtatgttttttgtttctccaaagtttctgttgtcagtagtttatgatcattggttcatactgtttattggaaataactctgtgggctgctttgcctcagggctaatttgattagggatgctgttgttttacaccgtttgggaaaatgttacactttaaagggtattggatttgtcacagaatgatattgaagggaagccggagacaggaaagctagtaacttgctggcctggttattagcattggaccttttgggatttttgtctgccatttttgttgatactgctgttttctgaagagataagtgtgtgaccaatttgaggattgttatttggcacacgcagaaactagtaccagataaagaaggtcatagtaagttgatatagagcccctgcttccagaatattgtgcttctgtcctctgaggttagattttctctttgtgagggagaaaacatttatgtaagggagaaagattggaatgtactgaaatgaaatgctcacattgaccacatcagctgtactggagcttatctgatgtagccactcagcctctatcaatctgactgtgtgtatgtgctctgttttgtacagggaatcatcatccagggacgtgccagaaaccacaagaaaacatggggaggggtaagtttctcttcctttttaagtaattcagactgtctccatagctattatagtcaggaaattaaatttctaactcatagtatatttgtggacacctaaattgtatttcttgttagtgttagaaagtttttgtctgaagcagggcttttcagagaaagaccatcaaccacatttattcactggatctttgattttcttcttttgtagagacctcccagtatagggagagatggatcaagcttgatactatatatatagtatatactattttatatatataactcacagatactatatatatacaccttccccaaacccagcttctttataagtctttt

SEQ ID NO: 136816 - DNA, 1050 bp, Homo sapiens
attatttttttctcagtctcttagacttcccactcccactagctcaatcctgcaacttccaattattttttaaatatatgagctttttaatgggtttcagttccctcattcctgtgtaaacatatactatatgctatactaaactctaagtttgcaaaaactggttgggcacatgagtaccaccatacaataaattctgaattattataaacatatcagctatgaaaagttaacttttaattttcagaaatagtttaacaatggtgaaataaattgggacattgtacatatttccaccttcctaagtaaaaataggaggatgatttaaatagtgtctttttagtttgcttaattttgttttttagtaagtgaaatgtcacttcagagtataagactttgatttcctaggaaaagttgtttccatcagtctgtgataagaagtacctatttaacacctatttcagcagaaaaaaaaagtttgaaggcattatatgcagacacaactgaataatagtatcaaaatgacttacaagcgagaaaacaaagaattatgagtttgacacttcataagatgtttaaaaaataaagctaagcacaggattgggtggaatgggtgcttttttgattttctctgtttgtttgtttattattggtttgggatatggtgattgcttggctggaaaattgtgtattaatatcccaaaaggattcggatccaatacactactcccacttcctgaaattctttccaattatagaactctttatggttacaactgaaagtacttaagaaatcatatccaacacctttgcttcatcaattaggaaacacgttcagataaattaagcaacaaatgtaggatcaggtagccagtttactgccagagctgcaacaggaatccatatatcccgactacaaattcagggcctttttaccataccacactttttccttatcctatagtttcacttgcctcaatgcagggttggtgaaaatggttaatagatattggctctcttagacttcaacaacatatctcaaaaggcagc

SEQ ID NO: 136817 - DNA, 1040 bp, Homo sapiens
aaacatcttattttttattttttatattttattattattaaaataaaagcatcttttttacatggtttcataaatgtattttgaatgtttatatgaaatgcctctgtaaatcatgcagaagaattttctttttctaaaggacagtgaaatgaggttgaatgtgttaaagcatcacactatatttaactcaagtacatttagaacaaaattattattaggatttccatagaatgaatcatggccaaatttaacttctcacaatttttttttacctattcttttcatacaagttagagctctctgggtttatattactaggtcaactgaagtgttatttatttttaggtagagggacaaagactgataatctagagactggatttgatttggctgctgctgtctgtcagcagaatgccttggggtatctacttacagtaatgagtataagtagtgctatcattattagtatatttaaacacccatggtttgcaggaatgtgctgaagtctgaatataacatagttaattatgtcactgtccctgcccagggcaactgctattgaaaggacatactcacatcatgaggaagatagcagatacagtggtttggagctaagtgttacttcattgctgactcacggaaagaggtttaggatgttggctatgttttctaaagagcatctagcagttttcatctggtatatcaacttgccacataggttttttatacttatatttctttttagttttcctcacgggagaaaaagccaattccatattaaaacgctacccaagagctaatgggttttttgaagaaataagacagggcaacattgagcgtgagtgcaaagaagaattctgtacatttgaagaagcaagagaagcttttgaaaataatgaaaaaactgtaagtatgttggcaattaaaaagttgcacagatttgcctacctttttgatgtatatttgaaatctgcatccctgaattatgtacattgctagcaattaaaaattcctttgttaggaactcggaaaatggcatc

SEQ ID NO: 136818 - DNA, 1542 bp, Homo sapiens
tagggatcatgtgatgagaatcttgtagttggatatggagagtgatgatatttaacatattttaacagtaaattatttggtatagttagtaaaggggaaaaccctcattacttatttttccctctaaagtatcatagctgaaaatataaataactccaagtctttaaaaacactcttggattctgactgaccattttagggaggatccagaaggagcacagttatgtatttgtaatttcttgtcacatggaaaatatagacttgtaggtcctttgattcagcaaatttggttttgggtttttgttcattatgttcattgaacccagacatttattcatctggtattttccatcttttattcatactgattttctatttattttgtattgtattttcagaaggagttttggagcacctacacaaaagcgcaacaaggggagagtaaccgaggaagtgactggtttcagttttaccttacctttccgttaatctttggcctcttcattatcctccttgtcattttcctaatctggagatgcttcctaagaaacaaaactcgtagacagacagtgactgaaggccacattcctttccctcagcaccttaatattatcaccccaccccccccaccagatgaagtgtttgacagcagtggattgtctccaggctttctgggatatgtagttgggcgctcagattccgtctctactcgcctgtccaattgtgatcccccgccaacctatgaggaagccactggccaagtgaacctgcagaggagtgaaacagaacctcatttagacccacccccagagtatgaggacatagtcaactccaactcagccagtgccattcctatggtgcctgtggtcaccaccatcaaatgaagctgcaaacttctttttactctaatcatttttaaaatactaatggaagaactttctagcactttaccactacataaatgttcattgacttattttattggactcttaccgcataccacttcacacttgttttattttctttagttttgtttcttgttatagaatcattatccatgctcatttttgctaggggaaatatatgaagagggaaaacatactaatgggggtctttctgtgatgtgatgagacatacatgtaagtgtatatatgtgtgtataggcatatatacgtgtgtatgcatcaacacagtatatgtaaaactgtcttaaaaatccattaacttctacctaaatcacctggaaggagagcattactcaccaaaattgcaaaacaagggtatcaagaatttgtgtaatagccagtgacatgctgtagatttttgcaaactggatgtacttagcatgttttctaattctgactggcttttgttaacttgataattcttcatctaccttaaaaagaaaaaaattacacatagtcattcttgatgttataaatagagaaaaagtgtgtgtgagcaataatgcataagctactgataacttgcttacagcagatagcaataaggtatttggtggcattcggcttgttttgtaat

SEQ ID NO: 136819 - DNA, 1046 bp, Homo sapiens
ctgtagggtttttacttttttcttggagcagagagaacaggctgtaaatgggttgccaacataagctggctgagaaataaaagaaaacaagacagttgttcataaagtttcattttgtatgcactgatggcaaattcattaggtcagttaagggaaatatttgtaccacttccaaacttttcagcgttggataaaatgattgatgaggcaggcagaaggaatgtaggtttcaggtgtgtcatttcctgctgcttccagctccatccctacagactcctccccgagtcctgccctggaaccaaaggaaggaggaacactgaggggaatcctgaagtaggagtcagatgacctgaactcagatctccctctatcacatgcttgccaccactgtaccttgagcaagaatcatatctgaccctcaacctcctcaactctaaaatggggataacatcatttgtcctgcacttctctaagggctttacaaggatcaaataagatggtgtgtatgtaagaaatttgtaaaatgtgaagagctatctacactaagttcgtaatgttattattattgtgcttcatggagaattttcccctctgttttcctaaattgtatgagagctttcacacagtgagaaatagagcaggctgccccataaatgggtaacatattcctaatctgagtgtgtgggctgttagagaacccctgccatgctctggtctgttctgaaactgtgccaactgaaagatgatagtccacacagcacaaacaggtttaagcaaatgatagaaagggaagtaaggcgtgtgtgctagttaataggtttagtagcttttatggactaaaaatgattgattgtatcttgaccctggtctcagaaatgacatttttacttttgccatgagtacacatcagatatctttggcttctatttaaagctaaaggtagaagtgtttgatccagtgaactgtgtatgtatgtgtggggtttttttctttatttttaaatgaaaattaagacaccttttgtgtggacatgtttttgtctttaa

SEQ ID NO: 136820 - DNA, 2015 bp, Homo sapiens
attagaccagcagttttcaaagtatggccaatggacccctgggttccttgagagcctttcaggggggactatgagatcaaaatatttttattataatgtgaagacattgtcttttcactctatctcaaaaaaagtgttgcaaatgtaaaacattgccatcttctcacaaatctctttttttgtttttgaaaatatggccatttttcataaaatgttatttgtgttagcatgtaatgggtttactatgtttaaataagttaatactttaaaaattttcaggtttttttagtatggtgaatattgatagatataaacctcatgaacaaaagtactttggcatccagattctcaataaatgttaagagcgtaagtgtaagggggtccagagaccaaaagttttagagctacaggattagacataggagcaggatattctgttagtgtgatttcttgcaactttattttacattttaaactgctgatattggatataatgctgctttttagagacacctaaattgcagtatcagaatgaatgttgatgtttgaagccaaaaagccaaatgcttaaactgatcaatgactgtagctttttagactgttggtcaaagaacattctacttcacagtaatagctctatcagccacagatctcatggtggctgttgcatgataatgataggataaacaaaataccactgtcttcaagaaacattatcttaggtttgtttgtttggtttgagtttgatttggcttttatattttttaaaatcccttttgctaccccatctggttttataaactgagtttcttagcattcgttaaaattaaggggtttgtttggaataatatatattttttatgcttttgtctttcttacctgattgatattacattcacctttgattgttttttaaaagtttatttttacagaatatatttagtacctttcttaaggagtaactgaattgaatcaaccagtttgcatttaaataaaagaacaggctcagtggtcttcctgtagaatggtttacatgcctgcatgtgcagtagttgtgtctggaatcctagaattggcactttctgcctccttgctctaaatgtcacaaaaaattatacttccttaaagtaaatgtaatgatttcttcttttcctattgaccagtacagatagatatgttgtgtttgcttcatttttaatgatgacttcaagattgatgatgtgatccaataactgtggaggtagctttaacttggttctgtgtaaatagtatgtattttattataatatttctcattttaagatgcttggtttacattaaattatggtatttaactatttttatgtttatactaggtagggtctttcttatgtttctgtgtttttggtatgctaaataaagctatttttaaacccaagagattttttttctgccatgtgttaatcatattatggttaggtggtaaatacgctgcatatgttcttattaattatgttctttttaataaggtaaaatggttatgtttcttttttcttacggatttagggaatataggtcagtaaaaacaacagaaatcatctgatcaaaacctcagagtgttctcagcataagaaagaactttctatactacttttgaatgactttggcatgatacaaaatggaaacaattgctctaaaggaatagactgagctccctgcatagtgtagtttgtcaagtcctgggaatagtgttgtctatagacgccaaggagcctgttgtttcctgcttagcagaacagcttgcatttgaaaagaaagcacaagatgaaaacattgtgaccaaagggcatcttcctatgtgtagagctcaaagactaaaagttggtttgtcacatcactaaccaagaacatgagttgatatggtaacaagaattaaaattatttactccatattcaaggatgaattttaaatataaattataagtctaattttataagcaaaagtcctcaaagagttgttcaaatagtctttaaaa

SEQ ID NO: 136821 - DNA, 1055 bp, Homo sapiens
cccacatcagcctggagctccacgcatcctatgtgtacctgtccatggccttctacttcgaccaggacgacgcggccctggagcactttgaccgctacttcctgcgccagtcgcaggagaaaagggagcacgcccaggagctgatgagcctgcagaacctgcgcggtggccgcatctgccttcatgacatcaggaagccagagggccaaggctgggagagcgggctcaaggccatggagtgcaccttccacctggagaagaacatcaaccagagcctcctggagctgcaccagctggccagggagaacggcgacccccagctctgcgacttcctggagaacgacttcctgaaccagcaggccaagaccatcaaagagctgggtggctacctgagcaacctgcacaagatgggggccccggaagcaggcctggcagagtacctctttaacaagctcaccctgggccgcagccagaaacacaccagagcccagacaggccccacagccacggggtgccttcccctgctcgcgccaccaggcgggacgtccatgttcccttttcagaacattctcttcatttttctcctctcagttttaccgttgttggcaataaagttatctgttctcaaagcaataaaggtgtccagctgatgcgtatctgcagcactctcaccttttaggaatcagggcacatccccatgcaggtttaaagtaggtattcagcagtctttccattcagccctgccccatctgcatgcagctcaggatctgcgggggtggaagggaaaggtattttatgggcccctggaaaatacattagtcttccccttataaactttgagggcatgtgggatggggtggggtgaggtggggtagggtggggtgagatgtgtggggtgggtggggtcgggtggggcgtgctgtcttgggccatggtatctgtgggtgtgtatgcatggtatggtataaaacatggtatggaattcatcctagcggttgcctctggagaagaagggaagggaatgagattgggcggggataaaaataatagtcttt

SEQ ID NO: 136822 - DNA, 1041 bp, Homo sapiens
ttaaattgcttttagttgcatattctaacacttgcaatgaaaacatctcaaatgataccctcacttttttcgtctatgaaactgagattaatttaacttccctgcctaactcatattcactgaccttacattgagtggtcatatgtgccagaactgggcatgcacaaacgagcaaaacaaagacccacagccacccagagtagcccatgatgaatcactctctccattgcaacaaaaacttacactcattgtgaaagcatgaaaaacacagataaatggaaagaaaaaaagtaccccatattctcgctatctcaggacaactaattgatattccagtgtatttcccttcatactttctgaaattttgtgttttctgtgtatgtgtgtgagtacacacatgcaaaaaacagatgatgttgtgccaaaagtttataagcttatatcatgtaaagcaccacatacaaacataaaaagctatcccttcaactccctcctcacaatattcctctaagaatatatgaattaaagctattatcattagattagttcataaaatacagttggtccagaaaacagcaaaaaattaagtaaggttttttcagaatctagtcaacgtgtctggccaaagtagatctctgggcagcgacctgatcaaatagaagatgattgcatcaggttatcaaagttcagagaactgtagtataaaattagacctatgaatcctagcctattcagcctgcccccaaatacagcagaagtgaaattgcaggattgagttattaagagtgctttcctaggaatccaagagtcaataaacacctctgaaatcactaattcaaacaccctatcgtgaccaccaccttctatccatctgacttgcttgcctaagagctactacaattgttttttttaatttttaccaaaccctccagtgaaataaatcctctattttcccacttctagctaagaatacttggtgtaaaacttcattcattctcttgcacaaacctcaaacatgcttacccttcaattctgtcacat

SEQ ID NO: 136823 - DNA, 1048 bp, Homo sapiens
tgatttaataatggatccttagagtttggaaatttgtaaccacacatacatgtataagtaatatacaaagtatatcactaatatgttctgctttacaatgctccattgaattagcctctcaggaaaaataacttagtgcaattacttcccagtcaactcaggtaatggtgtttctaccttttaaatttgattagtagattccagtctttccagtgaatgacatcattaattaaactcagtgccaaaagactatgagaaaaactgatgctttgagtaagagtgagcttctctcccaggcaaataaataccaaagcttcagagtttttatgtctaattatagatgtttttccatttattcgtaaataggaaaaacctttattcctatacattttaaattgtacatttagatagagacaattatgttacatggacagaattacatagaattgaattttaagaatcaagcatggataaagctacaacaatcaagacagtgtagtagtggcaaaagaacagacaaatagatcaatggaacagaatagagagcctataaatagacccacataaaaacagtcaactgatctttgacaaaagaacaaaaacaatacaatggagaaatgataatttttaaaattctagacacagaccttacacccttcacaaaaaattaacctgaaatggctcacagacctaaatacagaatacaaaactataaaattcctagaagataacataggagaaaatctaggtgactttggatttgatgattgctttgtagatacaacaccaaaggcatgatccataaaagaaagaactaataatctgaacttcattaaaattaaaaattcctgctctgcagaagacgctctcaagagaataaaaagacaaaccacagactgaaaaaatatatttgcaaaagacttatctgataaagggcttttatgcaaaatgtacaaagaacccttaaaactcaacaataagaaaacaaacaatcaagtaaaaaaaaaaatgggccaaagaccttaacagataccttgccaaagatgga

SEQ ID NO: 136824 - DNA, 2840 bp, Homo sapiens
atggagccttgcgctgcaacatcctagccatcaaaatcaagtacgatgagtatgaagtcaaagtgaagcctctggcctatgtctgtatcttcctgtggaggagctttgagattgccactcgagttgtagtcctggtcctctttacctccgtcctgaagacctgggtggtggttataatactcatcaacttcttcagtttcttcttgtacccctggatcctcttctggtgcagtggttccccattccctgagaacatagagaaggccctcagtagagtgggcaccaccattgtactatgctttctaactttactctatactggtatcaacatgttctgctggtctgctgtacagctgaaaattgacagccctgacctcatcagcaagtcccataattggtaccagctactggtgtattacatgataagattcatcgagaatgccatcctcctcctcctgtggtatcttttcaagactgacatctatatgtatgtgtgcgcacctctgttggtcctgcagctgctcattgggtactgcacagccattctcttcatgcttgtattctatcagttcttccacccttgcaaaaagctcttttcttccagtgtttctgaaggctttcagaggtggctcaggtgtttttgctgggcctgcaggcagcaaaaaccctgtgagccgataggaaaggaagatctacagtcatccagagatagagatgagacaccttctagcagtaaaacaagtcctgagcctggtcagttcttgaatgctgaagatctctgctctgcttaatgggacccaaggtctcagagcacaggcatattattttctgggtttgatactcgttattcatacaaataatgagccctacacagggaacaaggcaggaagttagctgttaactccttgtgagctgcttctctttatagagctcttgggtatgtagaactgtatgggaagaagccaggaaaacctctgagtgttgaaggggcaacccaaggcatcacagttcacaggtaaccatgttgtgttcttctaggcattactggccttttcactgacaagttacccctgaaatctgagttgtactggttagattcattaggttgaatgaggagaggggcttacctgttctctagttttccagactgctggtttgggtaacctgaagttttatgatccctgaacatagttttcacccaagagctgtcctggtgaccaaaaaagattactagggttttgccatcagcaacatcattcctgtcagagctttcagggagggctgttcaagtttggtttttgaatagacagaggtttcattttcatctcattagggcttttttgtacatagccaactgtagccaccctggcatgctgtctctaattgattcaagggcctagatttggagactttgttccttagcatccatggatgcagaaatgagtgataaatttggccatgaaagccctggaattttaggaaagttgtgattctttgatatgttgatgaaattctggatcaggaggggtgttaaaacatcaaaatgatggcgacttgtataagtagaattcttaccatcttactcctgcctccccattccttgcctgtcaggaccattttagaagagttaccttggttaacttaagggttttttagaaaaccccacagaaatctctcacccagttcaggtgtatagggaattttcattttcattatttcaaggaatagagttttcctcactaccacttgtaattagagattgacttcagaaactttttctaaattataaagacggaatgaccagaaaatttttgtctttcatggaatgcaatttgacttggcataattgtgagttaatttgataaagatctccagttgtatcctctgacaccctttaatgttctatataatttttcctttaatcggagaccctatttgtttcattaaagaggattgggtagcatatcctcaattatcttggaaaaatgcgtagatctagtgccattatttctaccattaaaatcttgaaagcgaaatacttgaaaagaggtgaccataaagatcacaccaatttagaatgaatattaaagtctgagaaatttacaaaagggactctatggactcgattttaccatatggaatagggatccacttctctgttaacctacaaaacgtatttatctggccattgcacttcggataattttcatttttaattcctcttggtgtcaaatttttaagtaatttcatgcacacaggagaaaatgcaatttgataatcagtttccactacattcggaggtcaagaaagcagtatatattctttcacaaggcatccatactgtttaatatttatagagttcatagaaatacatcaataagctcctaaattatagagcctcaattttggtttttctcatttgaaatgtttttgatttatcaatatttgtggtttaactttgtgggggtgtccaggcagtagatcattttttgtctatttttaaccaaataagaataacactcaagactatgttctccatcccaacacatcacttaccacttgcactattcttaataggcctaaaatagtgagcatatataatcaaaataatacttcatacaacatatacttccatgcactcttcatgtaatcacatatgtgcatagatacacaatcgtattacataaaacacccttgaaaatatatgactttgaataaaataaagctaccatgttaatacatcattttttgtttcttcctaattaacaaaagggctctataatgattaggagagctgtaaggccattctttagtcattccaagtgtatatttgtatcaca

SEQ ID NO: 136825 - DNA, 1086 bp, Homo sapiens
accctaaaacttaaagtataataaaaaaaaatgtggaccactgggcaatcactgggcagtcataaagataaaataacatatatacatgaaagtgttacgcataatgtaaaaagcttatagaaaaaataatcatttctcaggtatgaagctacattttaataacctgaaaatattttaagtaatacatttattatgcatatattttcaaagacaagaatgatgttattgattatggtaatatgaaggttacctcagattgttaccactttcaacctgctcacaatgtaaattctgttatcaataactaataatagaaaagaacatattattatatattcctgttaaacttttcaaatatagtacacgtaactctgtgaacaaatcttccctctagggcgttccctagaaagtcctcgatttagctagcagtgtttgcaagtttgcattttctctaacaattcttaatcaatcaccatcatcatcatggtcatatcaattgctaaacatgtcctgtgactatgtgatagtccaggcatcaatctaaaatctaaaaagatttgtgctttacaatccacagtgaaagaataaacaaggcaatgctttaaatagagtttttttttaaattaatcttttctttatatcaacttggatataattaggcaaaaattgggaaaatatgtgtcatatctaatatcagtttctcacagtgccaaattaattaactagaataatggtgattaaactctatagactacttgattattgcagaggaatataatttttaatttaagctttcaagaataaatcttagactgcaaaatcagggaattttctggatttgggtctacttctcttctctcatttttttctcaaccagagatgtttgggatttcaatcacaagtgtgaggatattggacattactgcataatgggtatggtgagtacttccttatgttcaccacagtctagtttgctactaacagcttaggagagaatgaaagccaatgagggtgggagaagataaactgttagctaatgcatacaggttcagttttcttcatctccatgtctagtcaatgcctttc

SEQ ID NO: 136826 - DNA, 2068 bp, Homo sapiens
caaagtcaaactgcactttttaaccaagtacttatttaattctgattaaattctgaaaagactatcaacagtattgctttgtacctagtaacaagtataccttcagaccgatatgaaatgtgaaaacttaacaggttgaaggaaataagatattaaaacatgtgaaaaatgtatgtgtatatatatatatatatatgtgtgtgtgtgtgtgtgtgtgtgtgtgtgtgtgtgtgtatatgtgtgtgtgtgtgtgtgtgtgtgtatatatatatatatattctctgataatttttatgttttgctggtatttcaaaatcctttttttgtgtttcaggaacctgtaccgtaagatgggagaaccggaccatgaactgtattgtcaacgtttttgccattgctattgttctttaactgactaaaaatgttgggctaaagccattaacttaagaatttgtcagtgtatcctttccaaaaagagtaatagttgtttactagtgtgctagatgaaaagcgtgcaatatgctttaaagctatcaacaaaaactgaatattataagcaagcaatatcatagtaattggcagattagctcatattctatacagcatcgtttaaataggaaaaatttaatgctagcaaaaaataaatttagaaatatggcatgacatgaaaatacaatcttatatttacaccagcttttcactaatattttgtacctaaggtgatggggaactccattcagataataaaattctctttcagctagagaagttaacaggaataaatatatgaacaaaaaagctgcaaggataaatgtggagaaaatgatgagaattagctaacatttttaagtttttttaaactttcttcccctcagttgtacttaatatttagtggaaagtaataatttttttaattttctatcaactaatagtatagtaacaactatgattaacttgtttactttttctgaggattagtaaatcaattttttttaatttcaaatttttggatttacacttgagggtaaattaaatctggtaaactgaatttcctagttaaataaaattagttgcagtatatgatgaacagtgtatgactcaaacagctgccttacaattcactcattccatgtggaacaaacatttatcagatgcctattatgggcatatgtctctgctaagcaccatagttgtcaatgtgctgtgcaaatgctaagttccttttagcaattgttcagttggaagacgtattaatatttggggaaggaaaagaaagtagttgttttacaagggaggaaaaaagtgaatctggttacacatatggaagtaagcaaaatgaaaagcacttattgctttctgacagaattatagatgtaattttaagagttgctcctagcaagttaaaagtgcatataaaatatgcaactcttagttaaaggccttattatcagtcttacctatacaagtagtaaattttgtcattgctttagttacaaccatctgtaaataacttaaaagacttattatgtggggttcaaattgagtggaataaagtatagattaaaagtatacaatccttagcacgttatctcagggcttatgaaatgtaattaaatttattaagaaaatagatgaaaaattagggtacacagctggccaccaaatgcgaagtcaatctgctacttaaccctgaaaacaaaatcagttttgcatattaccactaacactaatacatatagagagcggaaccataactcattgaattttggagaggaataagcttagcgttaatattgacaatattaaggcaatattcttgtaggaatactatgtgcatgtttgatattttgccaaataacaataattaataattgttcaatgtttaagaataatattaacaaaataaaggagtttaatgcagtgatctttgtttttggcacatcaaaaattctcagtcattattcatgtttctttatgctgctggcttttgtgccctggaagatcataatagtgaccaaaatatacatgcagacttgttttttattattgttgtttaagcataatttaa

SEQ ID NO: 136827 - DNA, 1040 bp, Homo sapiens
ctagcatgtgagccctagttcaaatcccagctgtttcaaagctacttgttaaccaattgatagcaccttttaatttccccaccataatttttatgacataatttatcattagtcttccttgtgttatagatattcgaatttttttattagcttctctgctagattaagttatttacacagaagccatgacatatttatctttatatggcccatagtatctcatagagtgagataatgcaagtggaaactctttcaaaactcttaagcaattagagacagtgcataatcaatgtttaccaagtgtatattttctaagatgccttattgagctataagtatattttatgttttgaataaatttttactgcaatttgtgtaaaaattgttctttttgaacaattttactgactaaattaactgccctctgtgcccttttagtgtgtagatggggttttaggtggtgaagattataatcacaacaacatcaaccagtggactgcaagcatagtggaacaatccttaacacacctggttaagttgggaaaagcctataaatatattggtaagtatcagtatccttcctcactagttcacttgcttttgtcattgtgattttctctgaattttgagaaggtatatgtacaatagacatttaagttggatactaaaagggtataaaggacttctgatttactcattcaaagataatctataataatacttaaaagatgaagatctttcactactcaaaggcagtttgagctacttttctttggtagcatcaccctttgcatttccatcagttctttctttccactgagacccccccttagctcaactgtgtttctttcggtagtcccatgcctctttacctgtaattccacacagcaactgtttataaagtggagtatttcctgcatttctgtgtctgaattctgcccatggtacaaagcacagaatttgactgatatttttcctgcaatacaatcaccaatggtaatgacaatggtcagaaaaccaactgaatccagtggggtcaa

SEQ ID NO: 136828 - DNA, 1045 bp, Homo sapiens
catttcacgttctctaaagctgagtaaaaggttatagtaaaaacacttagagaagtatattgtatattcttatatagggagaatataaaggaagaaagaaatctctgtctgccccatattcatatgccaattccctttgatctaagtatcctaaatacctaaaaggtgatcatattaggctgatacattgtaaactcacccttgctctttaaccctactcccaccacaagctagaatggttgtctgcagtgtctggtctgggacacatgtcattaactgattgatagaagacatttccacaaaacgaaaaggctttggatatagatgtatttatttgtaaagtgccacttgtaatattggccacatgaaacctttatttgttctcctctatttttcttctgaagaccttgttctagctaaatatttgctgaaacatttttgtaacctttttgtgttttaacttaataggcaaagccatgctgttgttgacactaaaagcacggaaaagaattacatttgggcagtattttaaggggtgcttttaaattaatctgggtgagaaattaagtatacctcgtatctgtatagataatatctgaatccttgactggttaccagtaaaagtaggagaaaatccactggaatatatatatgcttctgaagagcatatggtctgtgaacattcccaacagtggaacatgaccagagcatttactgggaggatcaaaagatattctgatgttgccaggatgctatttggcccatgtggatttgcgcattcaatcagtaggtttaatatcctttgtaatcaatgaaaaaatctgaataagaaataatagtccattcagctcacagggaatttgtgataaccactcattattattgttatttcctgaagtagtttaccttgtattttaccaaaaatatttgggacgaggtctgaaacttctgctcaccaaggtgccaaactggcatcaagacttcaggccatggaaaatctacctccacagatggagtcaaatctgtggaggtagcttttcctcct

SEQ ID NO: 136829 - DNA, 1049 bp, Homo sapiens
caaaatagcagcgtgaataataacctctcccaacttccaattcatagggagtttctcaaaccagcccctcagttcttgactgtgtgatgtcttaactgctaacttttatgggccatttgttttaggagggtggtcttttaagcctgaatctctgggaaatttgggtttagttctgaaatagaatcagtttctaccttttctaataaatcctgggctctgcccagagacttatttttaaagtgaacactgaatgatgaagcatttatgtgcttgggagaccacgatgaagaaggtatgcaatttcttctctctcgtagctttctgtcttgtggggaaatagagacatagttatttcaggtggtcaatgttataatacaattggattgacaggcccggggagcacagagaggagctatgtgggaacactggaattggttattgaagaatgatgctgagacttgctggtgcggagatggtggcactaaaggcccaagaaaagtgaaagtagaggatgtgtgggcttctctaagaatgttttgaaattggagacaaaaatctgtgtgagtgtcctttttctggggagacggctctatcccgattcaaaaccactagttactagagcaccttcatgaattctatgagaaaatatgcacttaatgggcagaaaaatcaacatacagagtaagatgaaattaccacagtaggtaaactttgattgaaccagtgagcaggtggcctttccagttacagccagctgtatagtttccagttattttcatttaaaaagcagtaccaagcaaaacagatgtaatcgtaaattgtaattgccttcaggcctgggctggtaacttgctgtacccccctgccccacttagtacacagtgtgacttgggggaggatctttagtcagtatttgtggattaattgattgaagtaattgtgaatcaaagtattccatttcaaatctcccctgtaggatttaaccagaatttccaagatgacactttcctgagaaaacggattgcaagatagctaaatgtcaaaggaaa

SEQ ID NO: 136830 - DNA, 1152 bp, Homo sapiens
gtgttgatggtgttgaatgttagaccctgagaggtcttgttttagggtggaatcctgactgccttttggtgaaaggaaaaactctaacagatgctaagaatgcaccatagtacatgtggtgccccataaagagatgacaaaatcatgttcttacgtgttgaaaatgatatcccctaaatactgttaagtgaatgtttcacttatggaaatgaatatttgtgtgtgtggtttttttcctagatttttctgttcaaaagagtcccctcaataaatcaaaagattgtcaagaataacaatgagccgctcccagagataaaatccataggagaccagatcattttaaaaagtgataataaagatgccgaccagaaccacatgagtcagaatcatcagaatatcccaccaacaaatacagagagaagatcaaaatcctgtacaatactataaatatatatttatgttttcacagtcaccaagtgtattgtaatgtatacttgaaaaatgttataacttatgaagtaaagtttctgatagtagtctttaaaagatataagacttaatatgttttattcagcttctataagtgtgaccagttttgatatttatttatgctaatatttttaacaagtcatttcaaaatatgtgtatctcaaattctccctaaagtgttgtggccttaactgttcagtattgcaataaaaaatatatttttatatgtggaaaattgaaataagatatttcctagtttttactaaacaattttacttctttataattttataaggcaatatttgcaatcttacgacactgtaacagtttttgatgtatttacaatttttacaaaactgaggtaaaattgtttataatgaacatattttaataaactatatctggtcagttccactgttaacattgataagtattaataaaattaggaggtacttggcattagcaattgacaaaatgggggcaaaaataattttaaaatatagaagtatgcaaaatgcatttacccctgagtaaagaaaatttcagtgcaactgtataaatggtacatctgtggaaaactgagtgcagaagtttctttgcttcccagcactcctttctttttttggagatggaagctctctctgttgcccaggctggagtgca

SEQ ID NO: 136831 - DNA, 2847 bp, Homo sapiens
attagagagaaagagagggagtgcacgagtgtagctgggggtggagggggagagagagagagcaagagagccagagcgagcacaagtgcgcatacgtgtataaccaaaacagaagccataatgctatcacaattacatctgctttattttactggctgtgcacatacggaccaacctggtataatgggcaagggaactacacaagagtatgaacaccaggacgttgtaggtcattggggcccttcttaggactagctattacagtgcttgatacctgggtagttatttatcccaagggaatagtgtttgcctgttcatatgaatgaaacaattgtaatctaattggtgtcaatgtttttaaactttcacaaagattttaaaacctatgtcattgtgaatgaattcttttcaatttccctgacatgaggttaaaggacttttagtaaaattatacctacactttatattatagaataatttctgttttctgtccagttgcctttcacttttctgttgaaatctggatttcctttttcccatttaatcattcagattatttgctagatgaaatgaccaaagaagcagagatagataattcttcaactgtagaaagccttggagaaactactgatatcttaaacatggtaatgatttcctatctatttatctaaatatgagtttgaattttagttcattgtgtatgtgaatgtgtgtatacttcctatactcttatatgcatgaaagcgtctttctcgtttcttactttattttttaaccaactatattgaggtataattcacatacaataaaatttgttttgatcctcacattattagtatggcaattgagagcggattctattactatctgaactgttttcccttcattttatatatatatatatataaaaaaatatatataattgaaaatatactatatatttgtactatatacaaatatatagtatatatactgtattctttttataatatatattttttatttatttcagacacacatcatgagcctgaattccaatgaaaagtcattaaaattatcaccagttcagaaacaaaaggtataatatgaagatttattttcgttattgttggtgagagcagtttaagttaattttttggatggtttttggaaagaacacaagaaacgtaagcatttacttactttagaatttaaaagacagagggatacaatgtagataacctccattttgccttgttctgatggtatgtattttctgtaaagaaacaagagtggaagcattttattgctgaaatttgctctttgggatcattaacttaagttataatagccatacttttccttctgtcaagccataggttatgattgcagttcttatgtataggaaaagactaccatttattgatagagtggccctctgactttggttgagtatgactttgaattaattactatgctgactttactgaatgatattaatatcttttttagttttaaaattttgtgattttagtgaaaatctttgataaccttttccaatatttggttgggctttaatttatcaagaaattgatagcataaaaataaaattaaacatttggaaattagagactgttcatgggtaggaaagagagacttttaatgaataacaaattgcaaaagaagggaataggctgtggttttcacaaccatagagagataaaggcctgccctgaaatcctttgcttttcctggctttaaggactagtgcaatgaatgaatgagggattagaggattaggaaagtaaattggagaaatgtaagttgagggaagaagtctataaaaaatatttagtttctatttatagtgtctttgacatgttttcaagtttaaaactcttaaaattgaagtcactgaagtgcaagagaatcatactaaattgttaaaatttagagctagtcctcattcgttctatctataatactgaaaggcatggtgaataacagcattcctttgaatatgggagagctgttcgaacacagttgtagaagctcaatgaatattgactgatttttgactgaccatacttccaagcagacacctttcttgtgtctttccttcctcttcccttagactccaggctctccctcttctgggctgctttattgtgctagggaaagaaaggcatgtgcctttagaaatcagttctggcaactgggccttcctctcttagggctcttaaaagaatcatgactttttaaagagcaatagcaagaacagccagaaacggaaagcaattccttttaagctgacatatattttatactttctatagtctttttaagtttaggccctaccaggcctactttagtaaatgagaaaagatttattatactatttctgtgtattaacttgttaatttttaacttgtcatgttttaataatttctttggcacaataggaacctcttcctaggcctaactcatcacaatttataaaatttgaattagtgaggttttactatccagagacccaaattcattagatatttgcatccattagcttgtttgtagaatttagatcaacaatttggttttgccttattttgtccagcaggaaattaattttgtattgttaatgtattattcaaatgtcagtgtttgatttcatagtttttgtacaaatcttacattttacacttaatattctttccttagtgttctttcatttatagaaattattgtaattaaataatataatcaatgcaaggaagaaggtcaaaaatttgaaaactcatgaagattttgtttagaaaagaaaaatatattcattattatttagtttatagataaaaaacatctcatgtg

SEQ ID NO: 136832 - DNA, 1048 bp, Homo sapiens
ccaaagtgctgggattacaggcatgagccaccacgcccggccaatggcaaataatttttgaaggagacatttcttttctgaaaattactgtaagtttcaaaacatatttctttttttgaaggttcatagcagttttatttgtaatagccaacatatttctctatttgataggggtaggacaagaaaccaggaccaggagatcagaaagtaagcagtaaatttgaaattaagaagataaacctgtcatcagggactaagaatcagggactaggaacagataatttgtgtatctttgagatcaggaagctaggcaaagggttgaggtaataaaggattgggaactcaggtaagaattgtgggccatgggaatgggatattatatataactaggaccttgataatgagctgatttcttgcacctgacccacaacttttgtatgttttcttttgaaataagatcaatgtctaatggtactcttcagccctggacatggaaaaagtagtagattctggcaagcagtatgtagtgtgtacaaggaaaaaatacatttatggtttagggaaaattgtttctcagtcccagagatttgaatgtgaaaatatgcatgattttgtagctagatcaaaaggaaatgccatctcttgtctttttgtgactgctaacactctcttaagaaaacattttggaagttgtatctaacatatactttaactttttctaaatcattcacagacttcaatctttataatggaggaaagtggatcaggatatatcttactaaggagttgtcatttaagctaaaggataagaaagagatggctacacagggagactagatgtatttcaggcaaagaaaataatatagacaaaggtttggaggcagttaagaagaaaaggacaaccagtggggctagaaagtgagggaaagggtaagataaagcagtattggagaaagagatggtgaaaaattatttacggttttataggccgtgagagacctacgtgatatgaatgtttttcttaagtgagatagaaagtcattaaaag

SEQ ID NO: 136833 - DNA, 1033 bp, Homo sapiens
ttatgaaaaagcatatatggaaaagttgagaaataccccatcagtgttttgtagttgttgttaatttacatctcctaagtaattttttgtttcttagggagtgtagagaaaatgcacacacacttttccctggtcatgtgaaaaataaagcttccaaattgaaatttagagcaactaagatacagagacaacagagcaaaatgtttttgagcctttggggattattaagaagtaaatgttgtggagtgttggcatactttgaactttctcttaaatattttagcaacttttaggaaagtttatatcaatattaaatatataacatcatgaaatagtttgtttaacctgcttattttaaaggagaggtctccagattctttttcaatgaggagaacactacctccaatagaagggactcttggcctttctgcttgttttctccccaattcagtctttccacgatgttctgagagaaacctccaagagagtgtcttatctgaacaggacctcatgcagccagaggaaccaggtaacatttgctactctgtctgctctcaggataaatgtgccttttattcctgtagtttttatgtttatcttaagatgttttctccagttatttaaattgttctctccctggttagagcctaacatcactcatttgaactcaaatccgggaatatccttacaagtagaaagcaccatcagtgctcctaagactgccatgtaaccacagcagcatatctttatagagcagtggataacagttatagtacattccttaactttatcccctttaaaccctgaaaccacttgatgaacttaggagggagttatagtcttcattttagagatgagaaaagcaaggcttgaagagatcaagtgacttgcccaaggtcactcagcttataaacgaagtggtcagaatttgaatacaggtcttctggatctatgtgaaattctgtatttaggcagtataacatagcggttaagagcatggactatggagttaaactggggtcaaaagccagtt

SEQ ID NO: 136834 - DNA, 1018 bp, Homo sapiens
ccatagagagtgtggaaagatcaatagagtaaattcaaggcagaatttgagggggataattataattgcagtatgagttaacatgtttatctgtttacaaatagatccatacaagtaacacttttataattctcttcattatttttgcattttagatatcggccttatgtatacttttggagatggtcgccacggaaaattaggacttggactggagaattttaccaatcacttcattcctactttgtgctctaattttttgaggtttatagttaaattggtaagggcatcacatttccctgtttatattttcatattactgtatttgagtctttcagtatttcatagaaaataagtaattttatgtttgtatggaagagtatcatatatatatctaataaatatacttgtttcctaaaagccaaatgtcagacattatgccattcagaaaatgtgttgctcctaattttcctcctttagcctcttcctttttgctgaaatcttgtctcttctgcttcattctcatatatctgttgaaagctgggactgtgccatgcccgcaggctttgtatcttgtgtagcacccagcagagtaccttgctcacaatagtctttaataaatatttgctgaattaaatgttagactctcaaatcctgcacaacagaaagtctgataataaacaaagcgttttggcagggcacggtggctcactcctgtaatcccagcactttgggaggccaaggcgggcggatcacctgagatcgggagtttaagaacagcctggccaacatggtgaaaccctgtcactaatgaaaatacaaaaattagccaggtatgatggcacacgcctgtaatcccaactacttgggaggctgaggcacgagaattgcttgaacccagaaggtggaggttgcagtgagctgaggtcgtgtcactgcactccagcccaggtgacagtgagactctgtctcaaaaaaaataaaaaataaagagttttgaagatacggttttttggct

SEQ ID NO: 136835 - DNA, 1004 bp, Homo sapiens
ttggaggaagtgccatctaaatgggtaaaatctgctatcttaagatttacttaacatatttactgcacacataagtgagttttctaaaaccagtttcatataaagcaattattcattcatttattccacaaatattaagtgcttgttctagacactgctaggttttggggataccatagggagcaagacaaaattcatgtttttatgggagctttaagtaagtaaaagacacaagatattcttcacttttgtgaaagcactaaagtaattttctagttgtttattagtagtggtagtcatgaatttttcatgaaaatgattggattaaaataatcaaggggaaaagaaaatctagctttatttctttatcatacagtaaaaatatctcaagaaaggtcaaatgtattaagtgatccttgtcaaaacttttttttgacggtaagaccagctttttgttcatatgtatgtcatcactaatcactatacttttccttcaatagcagatggtgagctatatgtgtttggagaacctgagaatgggaagttaggtcttcccaatcagctcctgggcaatcacagaacaccccagctggtgtctgaaattccggagaaggtgatccaagtagcctgtggtggagagcatactgtggttctcacgggtatgtgtggagtccactgttctgttccctgcgttctgtggtggctaatgaaatttttttaatgttcattttttttatgttcatttttttattgtggtaagaatactatgagaactaccttcttaatagatttttaagagtataataaagtatttttatgtataggcacgaccattgtacagcagatctctgaaacttatcttgagtaactgaaacttcacgcccactgtacggcaactcgtctttccggcctcccctcaattcctggcgaccaccattttattattagcctctatgagtttgactcttagatacctcgtgtcaggtggcctttgcatctctttc

SEQ ID NO: 136836 - DNA, 1150 bp, Homo sapiens
ttaaattataaggaaaaaaaatgtagtgaaatacgtttcttctgttcttttttcaaaacatcatttccacagtgctcccaagagcaaggtcttccaggcttttttgacctgcaggtgtctaatgtgacctgtgctgtctttcagttcagttgcaggtaggctgcttggaaggaggagaacatttctgtttagaaacatcagaatgggaaagggtgattgtaggaaagggcattctgtctttgctatcgagataaaaatatggtcaggacttaagtgatttacaatcaggctgttctgtgttctttatcattatagaagcatttcacaatataaattgaactcttaagtagctagctggtgtaaatgtcttagtagtactttattgttaagatacataatttttatgaactaataaaataaatggtcttttggaagtataatagcttcagagcctggctaccttttaaaaccttttctcccccttttatttttctttatagaggatggaagactttttatgtggggtgacaattccgaagggcaaattggtttaaaaaatgtaagtaatgtctgtgtccctcagcaagtgaccattgggaaacctgtctcctggatctcttgtggatattaccattcagcttttgtaacaagtaagacacattttgaagtcatcatgttatctcccacttctatgttgttattaaattaataatgaaatgatatagtctctggttctatagaaataatgccatggttgtccatgtaatgaaattattttggtctgttttaggtcacagtatttccccatttatataataagagttcataatttcaaactctgtctgacatgatcactttttaggtgaatatagagagctcagcatgggatatagtttcctttggtgggactttctcagcattcccaacttctccctttcctggacccactggcaaccttttctgtcttagttaaaatattggaaatgttgggctctagctgttatagtctatatctatctacactagtaataatagaggaagtgtgattatgactttccatctaattgatgggatttttcaacagtaaaaacacctagaggaaatagtttatggaccctcttagacaaatctttaaatatttattttatac

SEQ ID NO: 136837 - DNA, 1022 bp, Homo sapiens
aaattaatggacacatctcttttaaaatagatttgcattttaaactagtttggaagttactttccttgtttttactctgaattaataaagtgctatattagcaagaaataaatacgttccatgcattctgttcatttcagttgctagttacattctagattgatttctaaaatctcacaaaaatatgtggccttgcttgttttgctttattttgacgatgaaatgaagttgtctcccaaataataggatagtgatagctttcaactttcttcactgttaatagaggaaatcgctgctatacactgacctgtctcataaaaagggggactctatagtctattgacgttttcttttccatgtgcagaaggaggcaatgtatatgcaactggtggaaataatgaaggacagttggggcttggtgacaccgaagaaagaaacacttttcatgtaattagcttttttacatccgagcataagattaagcagctgtctgctggatctaatacttcagctgccctaactggtgagacttgtttctttttcagtctgggacacattcctttcctgtagatcaatatatgccaactcagtaaaccgaagggagcattgctgtttagttttctttcatcgactatctatgtgctttcagaaaacatttaaaatataactttaaatcttgacatactgcaattttatgcttatttatgcttattttatgcttatttgtgcttatttaaatatacatttaaaaagtaattggcaaataagctctaagctatgccgtctgtctactcctttagatattcttaaatattatttttgttgtgtgctcttaaagttatacttgcagttttaactgaagttgctgtcagaaacatccacagaaatctgttgcagcatatgttgttaaaatgtggtttgcaacggtcattgtacctctctgccctccctaccaaaagcccatatgagacatttctttaaaatttggagccaagatcagcttgatcttactgaagctgctg

SEQ ID NO: 136838 - DNA, 1039 bp, Homo sapiens
tttttactttgctggagaattcttcacaaaataagtcatcaagagcatcttttaaattttaagtttccttagtatatttaagtatgattttctatacacacaactttcttggaatgaatctatttcaatataattttttaaaaaaacctgttaccgtataattttagaaactcttttccacctaatagaaactggttatacatagatgaacaaggtaacttatttcaacacagaaaagcagtgacattttaaaagtatagctttttattgctttgtggtgacctcatcttacattatgtgaaaaatgcttcaattgattatttctttttccctcctaccaggaaataataaactttacatgtttggcagtaacaactggggtcagttaggattaggatcaaagtcagccatcagcaagccaacatgtgtcaaaggtttgggatctttttatcttttcacaaactgtataaagtatttttatgttgactgtgtagttctttaatgtcataaataataaagcttttagttctttattttctgacatttgcttgaatattattagcatttaacttatcttttatatgatattcagaactgcttttatatgttagggtctaaaaatcagattgattttaaatccagggaccacaaaggaagtaatgattttacagtattgcatttgaatatcccccatctttttttgtttgtttgttagtttgtaaaactacttacatattactgttattgtatatacagagaacaaacatatgttagaattttgagcttttctcatttaatacagttgtggacattatgcttctatttggttgctggttttataaaacatacttatcctgctttatatagtgactaggtgaagtaaacgaaacatcgagactagggattgattagtactagtgtaaaagaacaacaggacaaaatatttgaaatcaggagtgttccagaaaatattagatatataatacccttacaaagctttctggatgttatatgcaaaacctctgtttgggtataacct

SEQ ID NO: 136839 - DNA, 1588 bp, Homo sapiens
gcagaaacgtgactgatgggcagcggggcacccataaacttcccatagccaggtgcaggcatacctgcaaatgtaacgcccaactgtgtacaaagcagaaatctaaatgccagggcggactgggagaggttcccgtgacctctgacccggcctctaaattctcccattccctccccactgtcctgccgcgccccgtgtcgcctcgcctggcctcgcctggcctcgcctccctcctccgctgggggtctaagcctgcgcagtattgcgaacgcgggcggcgtttcccgcatgcgcagtcactgcccggcccggctttttcagtaggagccccgcgcggtgcgcgctcacgcacgcgcacggcctcgcctgcgcgctcacgaggcctctcgcggcacgcgcccccgccccgcgccgccccgccccgccccgcctcttccccctcccgcgcgcccgcccgccgcctgccgccgccgccgccgccgccggagctctgtagtatggcatcgaggagaatggagaccaaacctgtgataacctgtctcaaaaccctcctcatcatctactccttcgtcttctgggtaagtgcccacgccgggccggtggccgagtcgctgtccatcggtccgtatgatgatgctctgagaaaagaagtggggaggaaaacccaaaccaaaaatcaaatctgggacccctctttaaggagacaggcgcggggtgctgggtcggggctgcaggatggcagggtgcgggtcggggctgctggaaccctagacctcgctccgcgcaggctgcaaggggctgcggagtgtcggtgactgcaggttgtcgaccttccaaaaaaaaaatgttaatgcattagtttcttttataatctcccgggatagggtcagctcctggggaaagttgcgggtttattcgtctgttttcctcgctgtacacctttctctcccttcccctaccagccggttcgcggcgcctcttggagctaacctgtggcgggctaggagaggacacgggagcgtggggtttaatctcagattcccagttattcctgaccccacggggctgcgggagggaggcaccagaagcaccgtgcctgcctggctgggcaagggcgaccgaagtctcccaagcgcacgatggggagcaggcgttgtcaccgcgtggaggcgcacgaaagggagagggtcttacataagccgggggcatctttgaggtttcttggtgacccaagagatgagtctttggattcctttcccacctccctgcatccttacactccctatctggtggttctgtcactgcatgagcacaatccgcagcgccctggcagagggtcccctccacttggtgatagagatagcgccccaactctactccccatctatccagtgctgccgccggtccttgaagctcaatgcagaagggtgacgtcacccctcagccagggccgcggggggctgcgtggtgcacctcgcggagggatgcgcctttctgcgcgggggaggggggaggaggaggagggggaggaggaggaggaggagggggctccaggcttgtgccttacctcatcctgtttggcaaatca

SEQ ID NO: 136840 - DNA, 1703 bp, Homo sapiens
aaaagcagtaacacatgctgattgctgaaacttcccagtagccattcctgggaactggtttagctttttatgtgtttccttaaatctctttttgtttggccctttatcatttacttgacttcctatttgttactggagtgaatcatattgggaggggggaggtatttttatcttccttaaaaataaggttaacagtgcacatgaagaaatattgttctttcagaatcactgcaagctggtaaagaagggggtcttccaggctgaggcttttcatatgagcactttaactctccttgcttacattccacccctatgaatctaattacttaatgcccccaatacatcttaaacaatcactgcattttatgtcctccggaagttccttgatgccttcattttaattttttctactttcaagattttcatagtcttaaatgttaacctggaacattttcaatagtttaaataccaaagccagttctggctttggttgttgtaatcatttcatacttacaaccaaaagaataagatctcttcggatgtgtgaggatattttaaacaagacgttatttttaagtagccttattgaggcatgattcatatgccataaaagccacctatttaaagtatacgattcagtgagttttagtataagtagcacatattttagtatataagtggtatatatttctgtatatttagtatattcatagatatgtgcaaccatcaccccagtcaattttagaacattgcatcatttcacaagaaacctgtttctttagctgttatcccgtttaccccccaatttcaacttcccaccctcatgcccaccccctgccagccctaagcaaccactactttctgtctctagagatttccatattgcaggcatttcatataaatgtaatcatacaatagttgcccttttgtgactgtttttttcactcagcataattacttcaaggttcatccatgttgtagtgtatatcagtacttcattcctttttatggttgaataatattccattgaatgattatagcacattttgtttatccatttgtctgttgggggacatttgagttgattgggtcatttagctatcatggataatggtgctataaacattcatgtacagatttttgtgtgaacatgtcttcatttctattgggtatgtacctgggagttgaattgctaggtcacatggtaattctaagtttaattgtttgaagaactgccagcctgtttcacaaagcaaagcactccttccctttgaccatgaggattccaatttctccacatccttgccaacatttgttattgcctgacttttttattatagccttagtaggtgtgaaggtggtatctcactgtggttctggtatgaatttccctgatgtgtaatgatgctgagtgtcttttttatgtgcttgttggtcatttgtgtatctttcttgaagaaatatttattcatatcttttgaccatcttaagatgtggggtttttttatattaagtagtaagagccctttatatattctgagtacaagtccctcatcagatacatgatttacaagtgttttctcctattttgtgggttatctttagatggtgtcctttgaagtacaaaagtttatttttatgaagtccagcttacctattttttctttttttttgtttatgcttttggtgtcatatttgagaat

SEQ ID NO: 136841 - DNA, 1032 bp, Homo sapiens
ttaaagagcaactcctaacattttaaagagtgtttgaatttgggcactgtattagtctgttcttaagctgctaataaagacatacatgagactgtaatttataaaggaaaggggtttaattgactcacagttccacatggctggggaggccccaaaatcatggctgaaggcgaatgagcagcaaagttacatcttacatggtggtaggcaggaaagcttgtgcagaggaactcccatttataaaaccatcagatcttgtgagacttattcactatcaggagaacagcatgggaaaaacctaccttcatgattcaattatctcccactgggtccctcccacaacaagtgggaattatgggagctacaattcaaaatgagatttgagtggggacacagccaaaccatatcaggcacatactttagtttatagttattcttttgcacatcaatacaattcagtcattcactgaatgtctattacatgtcaggtattgagtagtcaatagaatgtgtaccaacgtttactagctgctgcttttggcattttacctgcattttaaaataacacatgtattctatttctcaacttttcagttttagatgttatgtactgtcttcccactatggaagatgaagatttagctctcttgcccttttctcccatacttgtatcttccctatattgtagtagaccctaatatatcattttatcattgtcatattttggttagagtggtcgtcagtgatttcattatgttaatgactaggtaaacctagtcacagctgagccatgtagtgtgtatattatgattacttgcatagctttttgttttctctacagttaagaattgccttgtttggtcctttgctttttagttgcgtgctcactcctaatttatccctgtactttccccaagatctgtttcttcactcagtctgttcaaacacttcatgtgtcatatcagattcttgttctcagaggcatttctcccaaagctttctgatcttcaatctggactagtattttctggg

SEQ ID NO: 136842 - DNA, 2109 bp, Homo sapiens
tcgaaaaactcttactggaacctacttattttagctcccctttcctccctacttccaggtgtgcatggagctgctaacccctgagtcttttggggatgtttgggtgcaaatattttattttgtgcttctctcacagctgccataagattttgctttttctcagctttgaagagatcattgtggttgtctcctctctttgttattgtaggttaaaaacattcttttagtgtcatttcagtggagttttgggagatagccagggtaaatggatgtgttcaatccgtcatctttaactggaagtcctttatatctttatctctacatcagatggtactaattaaatacccagttgattgtgagtgattgaatagagcatctaaaacagcaatagtcgggctattctaataaatattggtacccagttttcaatttttaaaaagcttttggatttcaagggaagtgttctaagttggaacagacttactaagacacatcctctgtaaggtcgtctggtcatcagcgactggacaaatggaaatgaagctctgaaggttgctgctgctttttctgcccctcttatttcttcccaccagatgaagtcccatgtgtcttctgacctaattcggaccttgctggattaatttagtgtttatagtgtggtgtgtgtgttggggagaggaccttgatgttaaactgattattgcttggctgtttttcttttactacagtgataacccttcatggttattatgggacttgtacattataatctggagttttttcttattttatcaacttaatttactatacgcaatatacagttaggatgtgtgaactaccttttataacatttggggaacattaagtctttttcacttagtcgttgcttagaaattagctgaattttggtctaaatagaatgaaatactcttctccattctaatcacaactagagttcttgatttgaccttattgtgagttgcattacttattcagtgattgttctttatatactgctttaagtaagtacctcagaaggtgctgaaaattgaaagtcattgtgactgtgtttctttgtttaaacatgttaaactcttgacatagatgactaatgcactgctaaacccatttgaaacacactttaaaaatatattcttatgtatttttctcctttagttccattacagcagcttccaatctgagttacctcctcattgcaagcagatttttggaatgctgctcttaaatttcttattttggctgttattccccttgccatgacagaatgattttcattcttggctgaacatttttttcatcttactgcagaaccccactattcatcaagaaaaggatgtagaggaaaaaggagagggttttctttgttttgtttttccttttggttatttgatcagttaaacaggtaagcattttatttatttgtttattgccttttgaaacatttattattttatagatttagggaatacaagtgcagttttgttacatatatatattgcatagtggtgaagtctgggcttttagtgtaaagcatttaaaatagtttaaacatcacattttgactctggaagattttctttggtgctttctgcaagatatagtgggattttcccatcatcatctgtttctaggagaaattccaggtgccttatactagaggatgatgagatgagtcagacacaggtactggtgaacagacataggtactagatcagtgattctcaccctgtttgcccatagaattgcctaaggggccctaaagaagatacttagaccccatcctaagagattctgattcaactggtctggacagagtgccagaattgatatgctaaaatatgctcccaggtgattcagctgtgcaattaggattgagaaacattgatccagggagaactcagtagataatagtaggcttggttcacttgagcctcctggatctgcaggtagctacggagtatctaacctagtactggcaatattaatttggtcttcgttgcctgagagtctggaaccaggcctgcagtgtctttcagtaaaccaaaatggccttgcactcttaggagaccatgctaatcattcctgact

SEQ ID NO: 136843 - DNA, 1841 bp, Homo sapiens
gttgatattgactttgatcaccggggtgagataatttgtcaggtttctccaccgtaaagttgctctttcctcgcttctcatacggtactctttcaaagaaaatcacaatgcacagttcacacttatgtgaagagttatgttctacctccttaagggtggagtatctaccgttatctttattaacaaagatgattttcattcaacaaatgttaaaaccaacagtaagtatttgtttaaacaagtagtaaaatactaaaattatttgagccgatcagaaactggacagagattcttgtttaccattattatttatgacttggtttatctagcaaatgcagtaagaaaaaattaacattggagaaagagataaaattatctttttacagatgtagttgttgtaaactaaataacccaagagatgttaggaaaaaactactaagagaatttgataagatggatggatgtaagagaaatatacaataattaatttctttttattattttagcataagccttaggaaagagaggaaggcatttcattcacagcagcaacagaaatcataattacttcagaataaagttaataagaaaggcaaggctcttatatgaagaacaataaaatcctatcttgggtcataaaatgagatctgaacagattaaatgataccagatgttcttgggtggggagatttagtatcataaaaatatcagttttctaaaaatgtttttaatgtatttcccaatagaatactgacaggatttgggggagggggaggagatggtacttgataaaactgtattgtttacgtagaagaaaaaatacctgagaaatcaagagatattttcgggagggaaaggaagtatatgccttattatcagaatatactattgtggcaggtagactataagatgtcccccataatctcacctcctgatattcatgcccttgtttaatcccctctgcttgggtgtgggtgagacctgagactgtcgtctaattaatagaatataatgaagtgatcacatgcatatgactatgtgtgcatgattttattacataagattgtaaagtctatcttgctgaaagactctgttcctttctggctttgaagaatcaaacttttatgttatgaactgccctgtagagagggccacatgacaaggaactcagggcaatctctggctgacagctaccaagaaactaaggccctcagtaaccagcaagcaactgaatgctgccaatagtcaaatgatctgggaggcagattcttccccatttgtacctcagatgagactacagccctgtctgatgctttgatcgaagctttgcaaggccctgaaacagaagactcagctaagctgtgcccagatttttgacccacagaaactatgagataataaatgtgttttgttttgagcttctacatttgtggtaatattgttatggagcaatacaaaattaatacaactctaaaatcaattcaatatgatgtttgcttagaaatacataggtcggtggaacaataaagaatccagaaataaattctagtgaatatgatttaataaatgaaaaggagcattcatttcagtgagagaaactagatttaaacgatcctgatactacgggatatctatatgtgagaaaataaaattggagccctcacttagatgatatgaaaacttccaattagtttaaatgctcaaatataaaaataaaatcctatgagaaaatgtacataccatatgtacaaattaggagagagactgccttatgtaagctggaaatttggaagcaattaaataaaaaataaatgtggttataaaatttttaaaaattatgt

SEQ ID NO: 136844 - DNA, 1086 bp, Homo sapiens
tgtggggtggggggaggggggagggatagcattaggagatatacctaatgctaaatgatgagttaatgggtgcagcacactaacatggcacatgtatacatatgtaacaaacctgcacgttgtgcacatgtaccctaaaacttaaagtataaaaaaaaaaaagagacgtggttggtgtaggggcagaaggagaaagtgacccagagaagtagcagagacatgtgagcggtgaacagctggagttggaccagtgaactcctggtcactagactgtgtaggcccctggacagctctactgtagcccatgcttttcccttctggcctgaagagtggcttttcatagttgggatgaggcctggctgagtgggtatgattcctagccacctcatttcctcctctcttaaacccccttggctaaccaaaatgggtgatcaggtagatgtttgaagtggctagaaaggcaggattggaattaaaggagggggttggggtggagatacaaagttgtgaaaggccatatgttcatttaagaggcataagatagtaaatggtattcttttcaactgcacagtaagcccagagttctaaatgcagttaatgctgagttgcttgctgataataggtgtaataggtacagcaaagcatttggccggcagcattaatggatgcctacgattccagtagagacttgtctaagggataaaggttctcctacagggtaagagcaagttacttattaatctccttaacagctgctgctgtatttgggaagggaggctgcaggttgttttagtttatatccttcagagatgttttgaggacaaacaagtaactgcttggtatgttgtgtttttcaaaagatagccctggtatacagaggtggtagctagcctgagggttatgtaaatgacttagaacaggccgctctttgagtggtgcctcaatgagcactttggggggcttttttctcatctagatgacaaatggaggaaaggtacacttctccacatcactggaaattcagtcttttaaactaagatgttagaagtgaactctgagatatagcatgctaataattttgagaga

SEQ ID NO: 136845 - DNA, 1102 bp, Homo sapiens
tgagacttagataatcacataaaactgctcaaacaagagtcaagggagtaatttctaagaacacaatggtagagactgtggtccctgccatggggtaagtatagttgtgggagaagacccagaatagatactctacagatggatcttaaaggctgttttactaaaagaatttccatttaaaaccttgtaaaatttacatgaaataaatataaatgcaatcagtaattatggaaattggcataaaccatctaccatttaatttatccccattgacacaaatatttatcctccatgtttttcctctaacccagcataaaaatgttttatgtttttgtgtgtgttttgaaagatatactggccacatagcacttcattgaactgaattataagatacatctactggtaagggaatgattagctattgttgtataaaaatccatccccaaacttcgcagctgaagacaataatttatttgttcacaattaggcaagttggtagtatgggcttgactcagctgggatggcccatctctgttccacatggtgtcatctagccctcctcatgcatttggaccttagctggggtggcacactacattctctcccatcttccaggaggccagcctaagcttttcacatcatagcagatgagttctcaggaataatgaacaagcagtcttgatgcttctgtctacataacattggcccatgtctcactgaccaaagcaagtcacatcaccaagcccagtgtcattgtgggagggaagactacacaagggcttagatatggggaagtgtgacttactggggttgttaatgtagtcatctcccacagtggaccttttagttgctaaatgcttttaatataatgaaagcaactctactagttgctgtgatgaggtatgagagctgagcatgaaggaaaaccaagtttctgcagtagtatgatgtatgtgctttctgaatgagaaatcatagggcagtatgacaaagggattgttatgataagtgttttaagtataatacctaatcactttttttattcctggaaaaagaatgcatcaaaggcaatgaataaatataaatagactagtctccataa

SEQ ID NO: 136846 - DNA, 2028 bp, Homo sapiens
acaagaaaaaaacaaacaaccccatcaaaaagtgggcaaaggacatgaacagacacttcttaaatgaatttaatattttaaaagggagtagaaattagactaattcctttgaaaaatattaaattcttaagacattaatatattttatgtaacattaagtggagactagagttacaaagaggcaggacctagcccaacttggggggtgaaagagttggaaaatgtaaaagataataaaaacaagacatcagttgactttggtcttggtgcccagacgagccagagctacagccttctttaaggtattaggtcagagttttctaggatagtagctgatgtagtaagtgtgatctttttgtcttgggatcctgaatcttaagtccataatattggtgatttacaacctggaagtgatgaatgcaacaccagacacccacccccaacatttctgcatcaccagaagctactgctgtgatccccatgcctaatggggccccctttgtgaagttacacctaaattggagcttgaacttttttccagaggaagtatttttaaatgattagattttttataatgccaatttcattgtaaatctattttgattggacatttaagaccacttataacattgtttaatgaggaaatgtgtccagctttcaaacaaaggatttagaaatgatcttttggaaatgtaaattattttgtgagctagaactccctacatttcagagctcctctctgagtcttggtgtggatgtggagaaggacagcctgagaaaataagataagggactctagttcttcttttacattaatatatagtcaagttcctattctggcatttgctgctctgattttctgggaactactttagaagtctgcgcttagcttgttagatatgatttgcatgcagtcgacaccccagaactcgcatgtatgatgaatttcattaatctagtgatttgtaaaaagagtttgaattaaatgctccttcatgctccagagactgcactgggctgctctgtaatggttgccacagtttctccaagggtagtgatgtaaaaacgaaaagacaactagaaatgaaagataatccagagacctgcaggtacagcattgcagatcttgaaacagaaaaatagtgtagctttatttagatgtctcactgcttttttttcctctctctcgttttgtgaagataaatgatactctcactgtgcttcagcttcttactctataatagtagttttcacttaggtgagcctcaagcacctggagagctagtaaacatgcaggtacccggaccccacacgcagagctgctgattgagtggacttgtggtgggactggagaatctgcaattctaacaagcacccaagcagtactgctgctggtagaccagtgagcacacttttcgtagcattcatctataatatttagaaagccactttcaactctaattttctataattctgtgatttcatattctgacatctgaggcatctgtgtgagaccaaaggtgagcactgacgattgaacttgcccaaccatttttaggactcaccttcttcctgattctgcagaaaccaaaacatggctatgtttagtgtctgcagaaagactggtctcgggtctagttttagccttgaggaaaaaaaaaaaaaaaaggtgggaaagagaagaaacaattctgagttagaattaagattaccaaatgagtattgaatggcttcaaagctgtttcccgggcacccccaaaccctagattcccttgaatctttcctgattcagcctggtccctggtagggaaggaccccagcctttaggaaatatgggagaactggagaaataaagcaaaggggagggcggtggcagtgtggtaagaaataagtcgaagtaaattggggacacttaagctttcagttcctttaaacatctgtttcctttgggcaattcacacttccagaagagttcttgagatgccgtttaaagataaaaaaaagtaatgttacagctcttttagaatt

SEQ ID NO: 136847 - DNA, 1564 bp, Homo sapiens
aagattctgtgctcttaattacttagctatgctgcatggcatatgtaaacatacacactgttaaagcagtgatggtttttaggaaatgttagcttatattttcgacaggaggaaactggtcactattattctctaatagaccatatttcttacctttgactgcgcattagaatcacctggggagctttccaaactcaacccagaccacatccctgacctagtagctcattcttggaaggtgagacccaagcaccagtagtttttaaagctccccaggtgattccagtgtgcagccatggttgagaagctctaatctgggagaagagtcattattgatggccaatattttatcagaaacatctgatgaaaaagagtactgtggccatgtcttgatacacttcactgagttttctcagaggtgagcctattcacaatggagcaatcttcttcaagtggaggcagtttaagtctgagaaaaattattctttctgaagatgctgtttccagtgatattttagaaaagtcaaggtataaatccattggtgttaatgtaacgtagccagctgtttcactttattagtcaggtgagtggaatataatgctcttactcaaatcagtgcccagttgctttcgattgtctgcctctgaattttgagttgaattccaaaagaggtaagagaaaatcggtgggtagggaaggcaggccgcatctcagccagatggctaaacagcatgagacttgggctgcatcttcagtcctctgtgaatgctgtagaatgacttctttctttctttgactacacacgtaaggaaaatattcagcacatgagaatttggaaagagtttttctgttggagcagcttagtgaaatcgaatagcaagatgcctttcaagaaaagtgacttttagtcatggtggtatgcgcatagcatacatagtgtttaaggaaattgaccaaacatgggtcagtagttaacaataaacatttctgctgcttcatctgaatcatgctgggaaagtgaacctgttgtctggggtatttattttggaattgccagtttgttcaaacaagactaagtcacgttggggaaatggtgagaacaatctcttttggctagacacttcggtttcagaagcctgtcagcttgcaggaatccccactagttgaggtgcattagggcatttctcatggctgtatatgaaagctaattacagagggtcttgtttctgtttgttcctgccataaagtgtcttctagaattgctgttctgtgactgctgtcttgggccatattaaaggatcgtgatggtgggaacagactgtccactgctgttatggggaacaacagagacaaatggtatagattcttgtactctttgtaacataatctgtgacccaaatcatcttataaattgcaaaatgtattgtaaatacaaaagaatgtttagtagatataggtacaatataaagaataattttaaaattctaacgggcccacacccccagtttaagaaatgggaaaatagcagctccttaaagacctttcctctgttccctttcccag

SEQ ID NO: 136848 - DNA, 1626 bp, Homo sapiens
gaatctgaggaaaaatgggtctcctgataggcaggacatttgacaacacttagtgtggaactggtactgagcgcccagcaggaatgtggtgggggcacaggctgctctgcgtttcctactcttcagctctttgatgcctgcctccagttctcagaagcctgccttggagtgaaatgagagtcctttgctggttcaggcagtggagaagaacaggaatctcctcagcccacgccaggaaaagcaaaacagaagaagcctcatccagctcaccccatcattgttttcaggtttaacggcagcaggcatcttgtgatgaaagttctcagtgtgcccctctcttgagtcacattgcaccaatctggactggttgtcttcttttagtacacagctgtcatccggagcttcccttggcctctctcctgagtcagagcttcttttctttttatatcttctgttttgcttgctggttttagtggagcacttccagtaactttgtgagaaagggtacaagggaggtaagtttttcgaggccttgcatacctgaaaatgtctattctactatcatacgtggtgggagtttgggagtagaattcaaagctctaaaggaaaattaatacgttgatctgttgtcttctgtttctactattgctgtagagaagtatgaagccattctgattcctgacaggatacttaggacctgatttctttttctctctgcaagtttataaagtctttttgtccccaaggatctgaaatgtcacactaatgggccatgacatgggtttgttttcatccactatgctgggcattctatgacatactatgtgccatttcattctgacacctcaattcttcagttttgggaaattatttttgaaacatttattctccatttttcttttcattctgcaactaacactcaggagctggaatctccataacagttatctgattttctgttttctcctatttttcgtctcttcgtatttgctctaattttggagtaatatcttctaacacttctcttatttttgatttctcataataattttcaattccaaaagtgtttgtttcggttctttagtttcctgggttaaaaaaatcattttcttattttatggatgtagtatcttatgtctccaaggatatcattggtatatatttgcttaatttttctcctaggtgtatagtttctgttcccagtgctcttttgtttgcttattttgatctgtcttccttggtagaggcttttctcagatgtctggtaatccttggtttcttgggaactagaaagctgctctgaagctaagcaggttggtggagcttgttgaattttttttcactatagagtgatctgggttgggcatttgttgggaaatacctatgacaatatatctttagatctttcaccttgggttattagatgccctagagaagccttcaagtctcctgcaggaagggtaggtctagtgcttagtctgggagcttcttggggaaagaggacttgagggcagtctctctgcattcaggcttcagtgtgtatttggtcacttaatgaccctattttcattagaatactcatgacctgactatgcctcccaggataggtaccctatgttttaccct

SEQ ID NO: 136849 - DNA, 1039 bp, Homo sapiens
ttaaatcacatattctttaagaagagtcactattttattgccttttaaaggtattttctctcttaaaatgctaacatttaactacagaatatgcatttaaaattaaattataagaagtctggcatttactgtgtaggaaggaaagattggagaaagatctatctcacacttctcaaatcacattaagtaggagacatcttcctaagagctgaggctgattctgctttggaggttgaataacagtggttagaagtacatttcttaagcacttgtatgtttcaggcacaatactaagcactttagctatatttcatttaatacccactatacctctgtgagattggttatcctcatttacatgaggtaagggaggctttgcccaaggtcatctgttaggtattcatgggagctgggttttgtgcctggtcagattaaaagccaaagcgtgtgctcagtctttctgctagaggatttgtgtgtagaatcttggccttggatacttggtacacaacctcccagtgggagatctcaagtatgtttgcagcatgattaatgcccagagtgcagccccctctccaagaatttctactgtctgcagttctgaagagaggctttgaactttcacaagtgaaggttttctcttccaggtgtgtgtttgtagttgaagaacaaagaaaactgtgcgatactagtaatgcaagttcccttgggaaggcatgtatgttgttcttaactgctgaacctattattgcttatctttaccttcagggtggcgttgacagagttaactatgacgaaaggagtccaaacccctctctgaaggaagtagctgtcctctgaccatctctacccgatagcggagttctctctgtgatgcccttctctggtataccctaaaactgaaatcttagaaaagaactatgtgcctctttcctcctccttcctttcactctcccctcttaattcaccttctgatcctttctttaaattttgttcatgtactccttcaaactctcaccaacaataaggtctgaatttt

SEQ ID NO: 136850 - DNA, 1050 bp, Homo sapiens
gctggcttatgaactcctcttatggaagagttaggagtaaagggttgaggagaaagaaccttctacagacaggctaaagaggacattaaaggaaagcagtagtggagggtcagggctttgagtaactgttctgccatttagtggcgatgaccttgggcacgtttcatagggttattaagaagattgagccagataaagcattaaagcacttagcatagtacagggcacacagatagtaagcacctcagttgtacattttttaagagacagggaaatcttacttaaatgctgttcattatcttggctcctaaccatcagctacagacctcatagagttataggatattagagcttcaaattacttttctattagtggtgatggattagaaggaactattcccatgctttctcatttagtcccccttgtggccaaaagcagacatttatgaagcaatgtgctggattagaagcaattggctaaagcacaggtttttatctgagtgcaactgccagggccttacagtagtcaggcccaccatttagcctccttgatgcagtgctagtgagaatagactttatgcctccaaagctcatacttacttacctgcctgctgtcttgtatttggtcagttagcaaatatttaactaagcccctcctgtgagccggcatttgtattggccctggggatacacccatgaataggatgaataggacaaaaatcctgccctcacagaacttaacattcattttggtagacagacaaagtgagtaaggtaaatagtatacaaaggtgataggtgcagtggcgaaagataaagcaggagccccgtgggggagtggaattctggtttcaaatacggtcatcagggaagggctcatggaggagcagagacctgaaatgagagatcttggaattccaggcagaaggaagagcaagtgtgaaatctctgaggcaagagcatgccaagagttttgagggtgaacacagaggcctgtgaggctgcagcagagtgaaccagtgggggctgcaggtcaagtaggaccttgca

SEQ ID NO: 136851 - DNA, 2071 bp, Homo sapiens
tctcccaaatattagtgtcaaacactttcaccgcaacactgcatcacgattgtttatctttgcctaataaaactagcactagttcctcaatctttttctgatttaaaacctttaattctgtctttcatggtgaaggttctacaaagtagacaggctgccagggtggggaagtgtcaccaaactctagttgtttttactgacctctccccccatacaggtaaagctcacacttaccttatgcagtgaaaagtacagggaccattcttcgtcctgcacacacacacaaaaatctgataatggagcttgatggttccaaattacagaaagtattttcagagtataaaggagagaggtctaagcatcttcactggcccagccatttggttcatggtatagcatatatttggtggtggtcacagatattaggaactgtgtattgattgacaagggaaaccttggcaaggtgggtatggatttgtatcatgccaattctctccagttttctcaccttgactcctcacttgagtgagcaaactagacagggatccaaggcatttggtatgagacattaggctctagggtggggccaaactggagatggtctttcttggacacccaggtttctttcaagcttcatgcggtatcagaagtggtagcagttacaaggctgtcagtttgagttgctaagctattggtgacctgaaagaccagcttgggagatggttagagacataaagcaaccccagtggctttagcagctaaagctgccagggcgtgtggcctgcagggggtggggtgttaggcatagtatgcaccctggaatctatcccataaagtaaaggcctgattgatgcagggttctagtttagacatgctatagggatttcctttggactgatcagtgggatttggcaaatcgcattacagctaattccaggaactatgcagattcttctgttgttttatattgaataaaatattaagacaacacatcaatagggattcaaaaatatttggaatattttgtttttgtggaaatttctgcaataatagtcaaagggaatcactgtgttcctgaaaacattgtgcaggatgtccataaaatatactgtgtacacacatgccatcaaagagggcagctgtcattcttcatggggttatacccagcttggtgtcaggcagcagctgggggaaggctctcagacctgtcgtatgatgtgctttgtaaactgctttttaaaaaagaagttctttattgttggcttgacttctaattaacacaataattgcatatgggattgtgtaaggggcacgtttattggggaaaataaatgaagtgtctttatgatgattttagttaacactctctgacatttctcgttgctcagggaatcctacagcaagtaccgtcttattcacggaaacttgagtcttcaaatttggccacattgctctgtgctgattctcacctctcttggcaatagcttcacactctcctctccctctttcagatcactggggtgatcctgctggctgttggagtctggggcaaacttactctgggcacctatatctcccttattgccgagaactccacaaatgctccctatgtgctcatcggaactggcaccactattgttgtctttggcctgtttggatgctttgctacatgtcgtggtagcccatggatgctgaaactggtgagtatgtcacaacataatactgctttctcaactatatttttgtaaaaatataaattacatggaggtgaagtggttcgtcttgaggtcacagacaagaccttaacaatttcagtccagactctttcctaatccatcctttaatcccctagaggtaaaaacaaccccaaacacagcctggcacactaaatctagtcccagtccctctgggtagatgatgacaaagcagtggccagtgattgcagtagtccatttgtatcctcatgacaagatgccctgtttcttttcttttttttttttttcttttgagatggagtctcgctctgttgcccaggctggagttcaatggcgcaatctctgctcactgcaag

SEQ ID NO: 136852 - DNA, 1041 bp, Homo sapiens
tactgtgtccagtgatgaccaccaatctgaagaggaacatcatcttgcacacgtttggcttcttgggcccagatgggagggatacaattccaaatgaagcagttttgtaactgtttcatctgagatgtggttgagactactggaggcgtttgcctaggcagcaggttctcatcctggccgtgttcacaaacatgatgggctagcgttagagaaaagacattgggctggttcttatttcttctgaaagcagcaccaatgccagtgagtggaagttagaagtaggcagacttgtggccaaagggaaaggaagtctttccaacaattggaacagtttcaaaatggaatgggccgcagggaattggcttgcagaccgtcgtgaggaagttggtaaaaaaggacccccagacagggcagaatgtgtcctgtgaccttcagagcagtttggtttttttctagctcaaagattctagtgtaacaaatagtggataccttagttgtgaaagttccttccagatttctccaggtgagccaagctgataggcacaatgccagtctctcagtgaattctccccagcctgtgtactccaaaatgcatatgcatattaaacacacattcctagattgaggcttatgtgggtaaatttagagacgaatgttttatatttttttctaaactttgtctagggagtgtgaggacttgtctaattcccgctgattgaaagtaacctaccctgaagaagccctcttcttaatcctgatgtatctgactttgtctttgtgtgcttaattttcagtatgccatgtttctgtccctggtgttcctggctgagctcgtagctggcatttcagggtttgtgtttcgtcatgaggtgagtatacacaaaatgcagaactcagttaaggggtgtttgggaggaggattcttgaaacctcttgaaatgtgtaaagggtgcatataggctagctgttttcctcagtggtgttgttgttttccaaagatcatgtcatatgacctgaaattttcatgaaattctaaatgtg

SEQ ID NO: 136853 - DNA, 1050 bp, Homo sapiens
tggttttgcctcactcctatggtaaaacagggatcagtttttgaccaaaacatcagtcatcctgtccacccaagtggtttgtcttttatgagcctcctgtgtaagggcagagaaagttatagaaagatgggtattaatcaattcaaagaaaataagtagaaagctcatgcctgaggtttggcagctcaccatcacaggcctttcagaaatggacaggcccctccagtaggtcattcagcaggtcaggctttctctggattgaggctgaggggaacaattttttaaattccggagcttaaaaaccccctggtgaattttctgagcttttccatctcagaaaatggggcattgcctccctggcctacatttatacagagactttcagaagaggctatgttagggtagaatttggtaagaattggagtcagtttgggctgtggtggactgcaatcacatccctccttgtcttccatagatcaaggacaccttcctgaggacttacacggacgctatgcagacttacaatggcaatgatgagaggagccgggcagtggaccatgtgcagcgcagcgtaagttccagaggagatgagggtgtgaactaactatgaagtctaggcttagacttatggactgcctgtaggttggcccagtagttgctatttgttcccgttcttcaactcttagtccagttccattgccaagagttgacacccagtccttgtccaggctccagttattcaggtaattaatgtcaaggaggaccactcccttgagtgtgccttgtatcagtaagggttgcaagtatggcaaggacagctcatttgctcttcagatctgaacccttgtgaaggagttaggcagtgagtgtgtgacaaccttgcttagagttggctcccggaggctggctttctggaatcgatgtcttcaggctgggtggagagctcaggcgagctgcattcactggctggggcagtggagtgggcatagagtggacctagaagaaactgaggctctgttaggtatgtgaaggtggtgagctgcctgatgc

SEQ ID NO: 136854 - DNA, 1059 bp, Homo sapiens
agattaccagctttggctctccctttctgtatgtgcatctttttttcttaagaactatttatttacttattagtagatatcccaggggagagttttttgaaaccatatttgcctcaactcaccaatcaatagtcctgatttagtggatgagtacatctatatcaataggtgattgtgagttggacacagacgcactgctttgctttgtggaggtaataagaaagccaatgtgatatataatttagaacttccttcttggagatcaaacaagcatcaatatgggtataattgttattggagcttccattcatcttgactcaccaaagctgcacatgttgtcttagggcttttgcctgtgtttctcttataaaagtcacaaggcagtgattgaggagaccacatttgatctgccatttttttattcttttcctttccctgttaatagctgagctgctgtggtgtgcagaactacaccaactggagcaccagcccctacttcctggagcatggcatcccccccagctgctgcatgaacgaaactgattgtaatccccaggatctacacaatctgactgtggccgccaccaaagttaaccagaaggtacccgctttctcctggcccagatgggaccagtggtgaatgtttgggggggcttttttatttccatgaaattatgacaaatagatttgaaatagtagtcaagggaaagagaatcttactttgtggttccttgattgcctgggagaggcacttgaggctgctcacttctaaaagagaaagctgtgactcagatcagccttgtctttctctcccacagcaaggatctaccaggcatagttaggaaggtttagcaagcagttcctgttaaccctgatgcttatgtcagacagcgagtgttggctttcttcttttggggtgtccgtcttctgcttaatataccatctaaacatgaaattgtttgcagctgggtgtcagtttttgacagcaagaggggagtagagttgacagacagcatctgcttctgctaggagggtggcctttattttagggagtttact

SEQ ID NO: 136855 - DNA, 1050 bp, Homo sapiens
actcagactttgttcagaccaacagatcatgtttcaaacaaagctcgattaatgttgtctgagtaatgtctccacagctctcattttttattatttttttatttctttttatttaggacctggtgtctacaacaaaccacaactctaatttctacataggctatctcagactctaattactttttccctagccatctgtatctctggccctcctgcttagcaatgcagatgcactttaattttattccagtttgttcctaaaactttctaattgaaatgtggaatatacagaaaggtgcataaattatgtttacagcttaataagttaccacaaaatgaacatagctgtgtaaccctcgctaagattaaggaatagaactttagcctgatggtttgttttttactagacagccttagagaagtagaagagcttttcttcttaagcagttacaaaacctgtgagacattttatctcacaagagaacgtgggctcagccaacacaaatatgtttcttgttgcaatttcaaaactatcttttaccatgctttgttattttttgtttttgttttgcagctcatgaagtgaattaaaccctcaaccctccaacacatagacaaaccagagtggggtcacaaacaatgcaaattaactcagtctccagagacatttgaaaagtcattgctactctgaaatttcttctagttgctataatatttcaataataatactcagcaacatcactctaatgactgagggacattttagaggatccccaaaccctggtgactgatgcaaatgtgcaagatgcacttgacagccttgaacatcctgtttacttaacatatgtatgtgtagcatcatattgttaacatcaaaagggcgtcttgtgtttggcatttgaggagacctgtcccattggaggaaaaaaaaatattgctgaagtctcccctaatagctatcctagaaccataaagggagattatgctgatactgtacattaggagaagagagcctcaaagaacctggaatctcatgaatgaaacacctta

SEQ ID NO: 136856 - DNA, 1020 bp, Homo sapiens
accattttgtatcaaggacttgagcatcctaggattttgctatccttgggaagtcctggaaccaatctccaacagatactaagggatgactgtaatctgttctacctgaatgtgttatatacctctgacacttatttgatttttgacattatcaagtgtgttctggtgtttgttggttctggaaaatggaagttctaataaaaaagacaagctataaggttcaaggtcgttacactcatattttagtttctcatttggcagaatattctaaaggttacagccatggtatcttcagccacttggcagtaagtgcatgcgactatgtattttatggcaccaaatgatgttggccagagccttggtaggagatagaacgagtccaataagatgatgatgcctccttacctgaaagcggttatagtttgcatatttcacagcacaattttaatttgaaaaaggaagataagagatgagaactggaacctgcatggataggttaagagccaggagaatggagttcaggtgttgccctgaccaacagtgggacctgaagtggcagcaggtgtttcacctataagataagggtgactaggtggactggatgagcagttccctgccctggaagacttgttaaaacaccagttactgggccccaccccccagcatatctgattcagcaggtctggggcgagatctgagaatgtgcatttctaaaaagatcccaggcgatcgtgatgctcttggtcctggggtcacacttctagtgaaacagtttattcccacctctgatccagtaaaacatgcccagttatctaaggaggagggactacattggccaagagaaagcagcctgtagactcaagtgcacaattgggctcctctctaaagaatgctgatcctccagattcatgaatggaaattttcttttctaatgaacagaacaagatgtgcttaagggtgtcttgagagtatcacagtcatctttattagattcacttgtgccacagtttagatcaaggc

SEQ ID NO: 136857 - DNA, 2460 bp, Homo sapiens
ttctgaggaggtggaggtactacatcactggtggtcctgaggcccctaaaaaaactgggaggtgggccctgggtgtagatgagcccacttaggcctaagatatctacatggccgagagacagaatataaagccccactttcccctagcccctcctaccttttcataagccttggctttcttacctcactggtgaatgtgcctgatcaagaatagtgtctctattcttgcctcaaggaaagaactattattttgtcagctgggtatggctgagacatcatagtatgctgagaaatcttccaaatgcatgtgctatagatgtgaattaaattttagccttctagttaatatatcactaaattctgtgttccttaatttttttattactctcataacatgaacaaattttaatactccttaagtgtcaaaagttgttcttaaatggccagagtgagctacagctgcaacatgatggccagtttgagaacttccagttggctctgcagttagactcccaacagctgagatcccatggttgaaatctggttttatcttttgctctagtgccctttccccatttacatacagaaacacttggttgttaaaaaattatgtctagtgatacgcatatgtcaaaaatcacataccccataaatatataaaattattaattaaatattaaaagggtgtggttcggtgacttgagattctcattttcgtttttctccctggcaacagttaattggcatgctgctggcctgctgtctgtcccggttcatcacggccaatcagtatgagatggtgtaaggagaaggtaggtgacagtggggagtgtttaattttgaggggtcccctttgggacacttactacccttcaaatgtgcaggagtactccctggccattgagctacctgatcttggtggcacttgtccatgttcagaaatctcatttctgtggttctgggaaggaagtataattggttcttttgtggaaaatgtggaaatgcttttttcagcttgttatctttcaagtccttattactggtgaatcactcacatgttctcatttctctcttagtctttcaagaatgacggaataagagacctgttttaaaaaggaactgcagcaatctttgaaagacttccaaagaatgttagagcacagtacataatacacttgccctgctccctctcccccttaccccacaacgtgcaactgacactcccacccagtctctgctccacctttcagcccacgtcacgtgtagtgtccattttgtgaagccctgttgtgccacagagtgtagccaggtccccctgcagctagtcctagtgaacctcaccccgaggccctgcatgggccagcccctccatctgtacttggtccaactgcaactcatcatcggtgactggttatcacaccatcgctggcccctttgggccctgcatgtagtgtgggaggctcctgttagctcctcactgtggtaaatgccacacacctttaagtagataagcagacgatagttatctgttcttttgacttaatctcatttggtttgattttccctctactaaggctttcctaccttcttcaggctgcctaagacatgtaacgaaacacttcaataattgtccatgaggagaaaaaaagcatgtgtcatgcatgaaggaaactgaacttgaggtggcctccttgcttgttacatacctgggtatgtgtaggcagtttagtgcatctttgcctctcggttgaaacctgtataaccctgttacaaagctgtgttgttgcttcttgtgaaggccatgatattttgtttttccccaattaattgctattgtgttattttactacttctctctgtattttttcttgcattgacattatagacattgaggacctcatccaaacaatttaaaaatgagtgtgaagggggaacaagtcaaaatatttttaaaagatcttcaaaagtaatgcctctgtctagcatgccaacaagaatgcattgatattgtgaacatttgtgatatatgtattaataaatagagcaattacaagcagctgtgttctggttctgttctttggttcttatgaaagttttaaaacacatttcttttccatcttgctcttcaggacatcgcaggcaggtggaccatctcacacactgacacacctctccatgtgtgctcccaccccactaaaatagcatcagcagcagagaagctaaagggttaggtttttttaattattgttatggacacttcagaaactttaaccatttatcatgaacagaatacattgttgtctgtggaaatagagccttcatatcatttcaggcctctgaaatccttgggcctgaaatccgtgaaataaatacaaagatttcagctgagtttttaaagtctggatttcattttgttaaaaaggaaatgagcctctattctttccttcatcgcttctaatg

SEQ ID NO: 136858 - DNA, 1045 bp, Homo sapiens
gtgctgggattacaggcaagagccaccatgctcggcctacaagtggatttttaaggaaaaaaagaggcaggttcctaaattgcttaccaagaatttacattaaaataacataaattataggttgactatacattgttctttgtatcacaaattcgaggagcataagcataatgaaggaggtaggtagacaggtacaaatgactttaaaccagtgtcccccagcatggttgtggggtgtgggatgactgatgtcccatactaacgtctctgtgagcctgctaaactttgcacatactcagactgcttgagctatttttcttttttcaaaagctttaagaaaaaagttggaaaatcactgagttagattatgacactaatgagaggaatcagagctgcacaaaatgtagtctgaatcagcagtgtgggcaccacccgggagcttgttataactgcagaatctcaacccagagattctgtcccacccagaatctgaatctgcattttaacaagccctcctggggattcgtagtcacaaaaatttgagaagtactggtttaggatttaggccactggtttccaaacttagctgtactttggaatcacctgggagttggggaataggctgggcattgggatttttaaaggctccccagaggattctgatgtgcagccaaggttgaaaacactgatttaggccacagcctgagccctaatatgattgttgtcctaaaaatatgggctgttttgccattagagaaccaggtttatagtataagtcaatcagctaggaccctataccactaaggaaaggtgacagcagcccacccaacatcctcctagcatatgaaagctagtacatagtgaatggagaatggttattctgggaagtgggtggggcaagtgtcaagggcattgagaattcctttccagcagatggtatcacttatcaactggtttaggacagcaatgagatctcatttatatgcagcaattttcctcttcaccagggattaactccatagaaacactcagactagcctgcctg

SEQ ID NO: 136859 - DNA, 1045 bp, Homo sapiens
atatattgcctttattatgttgaggcacattccttctatgcctaatttgttgagagtttttatcataaaaggataattcaatagcaaaaagacaaaaaaccttattcacgaatgggctaagaacctgaatagacattttttccaaagaaaacacacaaatgacctacacatatatatatgtaaaggtgtgcaacatcactaatgattagggaaatgcaaatcaaaaccaaagtggtatatcagcttatgctgttaggataccaaaaaagacaagatataacaaatgttggtgagaatgtggagaaaaggaaaccctagcatactgttggtaggaatgtaaattaatacagccattatggaaaaaagtatgctggttcttcaaaaaattaaacatggaaccaccataaaatctagtaatcccacttctgggtatatatccaaaggagatgaaattggtatctcaaacaggcatctgcacccctgtgttcattgcagcattattcatgatagtcaatatatggaaacaacctaagtgtccattgacaaatgaataaagaaaatgtgattgatatatgtgtatgtgtatagatattccattgtgtatatagcatatattcatatttatatatcatatttatattattcagccataaaaaagaatgaaatcctgccatttgcaacaacatggatgaacctggaagacattatgataagtgaaataatcagacatagaaagacaaatactgcatggtctcaacttacatgtggactctaaagaagtcaaacacatagaggcaaagagtagaatggtggttaccagagtacgaggttgggggaatggggacatgttagtcacagggtacaatctataagatgacaagttcaggggatctaatgtacagcatgggtggtgatggatgtgttaatctgactgtggtaatcattacataatgtatacatatgtcaaatcgtgagtattttcccatgctatcatttcccatcatcatattttaagttatagtgaacattaataagcacttactct

SEQ ID NO: 136860 - DNA, 1073 bp, Homo sapiens
caaagacctcttgctttgaggctgttggcgtgctacaaggactcgaaagttatttgttcaacggatgacttctgttttctggaggcaaactgaattccgggcaggtggctcagcacctccagcctgttccagatcgggacagggaaggtgcctggggcaatcagtgaggtttccaaccttccttaggcctgggccagcccgctcccctcccatgtgaccccaggcaaccattttaatttttttacagccaagcgtagtggagaactggctgcgcgccggttgccagggacgcggcagccagcttggcggggctggggtgaaagaggacgctgcgtgggggagggctccgcggcttctgactggctggagcatcaggattcatttgcataatattttctgacggcttctgattggctgaagccagaggggcggtggtggggtgattccaagggcccagagctctggccggcggaccttttccttctggagtttccccggcgggtgtgagttgttgcggggtctgggggagctgggaggcccggtttgggaagttttgcaggcaggtgcatgagccatctttctctgaaagtgtttaagaaatgttcaagaacagcggccagagtcaagaaactgggggatgaagggttatctcgagactagacggaaggaaacgtatcaggggaggggtggaggccagaaggaaggagttaggtaggggccctctcccaagctggcgtttttgctgggtggaatccttttgctagatcccttggatttccgttttccgtgtgttatcacactgttggaactgggaagaagagaaaaagaggcaagattttggcatttagtaagttaagtctgaataccgagttttcatccgggtgcatacgtacttaaaataccaaatgggtccaggaagggggacaaagtacgctttaatttatgagaagatcagctactagaaactgtatatctgtttttctcgagttttcttcttgcagtgctctttcaatctcattggacatattttatattattttcctgcttaagcactgggggttgggtggaaggat

SEQ ID NO: 136861 - DNA, 1343 bp, Homo sapiens
tcattcctcaaagctttttttttttttcctggctggggggcgggaagggcagactgcaaactggggggctgcgtacgtgcaggaggcgcggtggggctgcgtggaggagggggccacgtgtgagagagaagaaaatggtggccggagatgggagggcccaaggaacctcctgggagggggcctgcattctatgttggtgggaatgggactgggctgacgccctgcattcagcctgtgcctttcctggggtttcttttctgttcttttcggaggagagggcccgagaaggggccataccagggcgcggcgctgggttgccacacttgggaaagcagcccggagctgggtgctggggaaggcggggcgcgtagcctcccgccgccctgcggttgggccggtggaggcccaggcgttgctaggattgcatcagttttcctgtttgcactatttctttttgtaacattggccctgtgtgaagtatttcgaatctcctccttgctctgaaacttcagcgattccattgtgataagcgcacaaacagcactgtctgtcggtaatcggtactactttattaatgattttctgttacactgtatagtagtcctatggcacccccaccccatccctttcgtgccactcccgtccccacccccaccccagtgtgtataagctggcatttcgccagcttgtacgtagcttgccactcagtgaaaataataacattattatgagaaagtggacttaaccgaaatggaaccaactgacattctatcgtgttgtacatagaatgatgaagggttccactgttgttgtatgtcttaaatttatttaaaactttttttaatccagatgtagactatattctaaaaaataaaaaagcaaatgtgtcaactaaattggacaagcgtctggtcctcattaatctgccaatgaatggtttcgtcattaaataaaaatcaatttaattgatttactagcaaaagtaaattttgtgttctctctggtatttcatggtggtggatattcatctgtgcaagtatttagctttgtttgggaactaggtactgacaaaatttacttccaaactttatttctaattcagtaccaagataagaccatacatctcaacaaaaagttcagaaatatttaaaatatttgggaaggtacatatattgtatctttcaaccaatttggctaacttattggagtgcgtaattaacattttgaattttttaagaagctcaagcacaagctaaagtgttttgaggcataaaaacaaggctgaaatttcacttggttactgagaagtgaaaattagaagggaagaccagctaatcctagtg

SEQ ID NO: 136862 - DNA, 1120 bp, Homo sapiens
cagtctccaaccccctacccaagacttactgaatcagaatctgaattttaacaagatcctcaggaaattcctatgtgcaataatgtttgagatgcactgatccaaaggattccaggtctgatcatatcacatacacgctcagaactacatcctgatcttatcttaacttcccatcctcagcttttatcattccccaccataccttggaatcttatgctctagtcttatgattgcatcatgtccttccatccatcctcacactgtatcctccagcagcaatgccctaaccatcctccatgcctatcaaaaattctcatggtcttcatgcccagatatcttctttgtgaagcctgacccaatcccccaatagaaatgtgtcattactattcattagtcactgattgacttgattatgtttacatgattacatctagcataacggttaaaaagatgaaattagaccctgatcatcctcactttgaaccccagtttcaccagttttaatctatgtgtggtagattagatcactattttcagtttttcactctctttctctattcaaattatacccacagccttctctatgtgactttgcagtttctcctacttgattgggtgtaaaatatttccctgcccattgacgttggtcttggttatgtgacttgaattggttaatagactatgggtgatagtgacaatgtgtgagttctgagcctaggccttaaaaggccttaaatggtattatatgtctctagttgtcccttggtgcttctactgtaagtatgatcaggacatgcccaggttagctattaggttgaaggaagatgagatatacatgaaaccgatttgaactcaacctgcaaccaagccaaggtgacacacgtcttgaagcagaactgccccagtagacccacagacccatgctaaataaaaaacaagatgacttatggtatgtcactgagctttgtggtggttggttgcaaagcattatttgtgggactacatagctgatacactatgcctctgagccacaattttcccatctgtatcatagatatgtaaatatatacctcatattgctgttgggatgattaaaatgtgttaatgtatgttaaccgag

SEQ ID NO: 136863 - DNA, 1057 bp, Homo sapiens
ctgcttcatgatactctgtgtttacagccctttgagcagcctccagcccagtgctcatctaggagttgtcaggaaccacctgtgtcagattattctggagcactgggtaaacatatacattcttaagttccacctcagattcacacctctcaatcataatggagagggagttgtaatgtgcattttagtaggtccccttaagtttgagatttcctggtcttgacttcattgaggtctttgtgaagtttaatatggtcaaactgcttccgctcaccaagcaatgtgccttctagtgtcatacttggagaaactagattttattatcacatgtgtttgtattttattttattacttggactctctgacatctcccttattaaaatgttcctgtatcatgcaactagtctagaccaggggttagcaaacgttttctgtaaatgttcaggtagtaaatattttccactttatgggttatatagtctctgttatcactactaaactctgttattgcaatgcaaaagcagccacagacaatatttaaacaaatggacctggctatgttccaatgaaactttatttgcaaaaataggtggctgataagatttggcctatgggctatagtttgcagacccctaatctaagccattagacaactaaatatgtatcaccttgtatcatttccttgtatggaaccgctctgtcttgtaatagtaaaatagttacaaaaaaaatggaatctcattcaagttattttaatggttctcaaacttgaatgtatatgataattcccttgaagggtttattgaagtatggattgctaggcccacccacagaatttctgacacagtagatctggagtaaagcccaagaatttgcacttccaacaagttcccagatgatactgatgatgctggtccagggaccacattttaagaaccactgccttgagtaaagtggaacaggttattgataggatttatgtgaaaattaggagttcagccatgaggccaagaacacaggatcagtttcgcaagggtccacccagagattggaagga

SEQ ID NO: 136864 - DNA, 1015 bp, Homo sapiens
gatggggtttcggcatgttggccaagatggtcttgatctcctgacctcgtgatccacctgcctcagcctcccaaagtgctgggattacaggggtgagccaccgagcctggcctcaggtagttcttcacagcaatgagagaatggactaatgcagttgctataagtctcatttgctataagtctcattgctgttgtgagcatggagacagctctatcctggagccctgggcttggggcacccagagaagacaggagggcttcataccaagggtggccttcccagcaccacatccagccctcctgctcactgcagggcagctgtgacacattcatccaatgaaagggtcaccaggggaaggtcaccattgagcagaaggtgagatgggggctgggtctctcacagtgcctcctttctccagcctcctcagcagagactatagggccaggaggaggtgacgtggtggcaactcagacctagtcccactgatcacatgatgctggggagcactgaatggttgttggagcatctggacctatgacaggaccttgtgacttagccctaggagggctgtgcccatgcttctgcccctttgcctgtcgatgatggagaactgtccagtgatcgcctgcacagaggtcggtctgccatcctcttgcaagattaatgcctgtagtcccactctctgctgcaggtgctgtcctctataggagccactggccacatatggctttttaaattgaaatataaattaagagtaaatagaacgaaacaatcagtttctcagtcctactggccacatttcaagtgttcagtagggacctgcggctgggaggccactatatcgagtagcacagatctagaccatttccattatcatagaaagttttgttgtatagtgctgagttagaggatgggacaggctgtttgacatttacttgctgatgctcacagtaaactggccaccccaggggtaaggcttgtggggtggggcagtgtgccatcagagaattctac

SEQ ID NO: 136865 - DNA, 2210 bp, Homo sapiens
tctgactgggcagctgactagcccatcattcccatttttttttatctttttttttctttttaagagatcagggtctcactgtgttgcccaggctggagcacagtgagtattcacaggcaagatcccactactgatcagcacgggagttttgacctgctccgtttccaacctgggccagttcaccctttcttaggcaacctcgtggtcccccgcccctgggaggtcaccatatagatgctgaacttagtgtggacacttgatcagcatagcgtgctacagcccagaagtccttggctcaagtgatcctcccacctcagcctccggagtagccaggaccacaggcatgcaccactatgcctgacccatcattgccattttacagatgggcaattctaggtttagagaggtaaagtaattttcacaaagtcaaaatgtaagccaagatttttctctctcttttttttttttttggctgagcacagggtactttattgatggtatatgacaaggtggggctccctaggcccctcccctcttcaaggggtctacatggaaactgtgaggaggggagattcagtgtggtgggggactgagtgtggcagggactccccagcagtgagggtctctctcttcctcttgtgctcttactggggctggtggtccaggggtcttactccttggaggccatgtgggccatgaggtccaccatcctgttgctgtagccaaattcattgtcataccaggaaatgagcttgaaaaagtggttgttgagggcaatgacagccccagcattgaaggtggaagagtgggtgttgctgttgaagtcggaggagaccacctggtgctcagtgtagcccaggatgcccttgagggggccctccgatgcctgcttcaccaccttcttggtgtcatcatatttggcaggtttttccagacggcaggtcaggtccaccactgacacggcagtggggacacagaaggccatgccagtgagcttcccgttcagctcagggatgaccttgcccatagccttcgcagtgccagtagaggcagggatgatgttctggagagccccgtggccatcacgccacagtttcccggaggggccatccacagtcttctgggtggcagtgatggcgtggactatggtcatgagtccttccacgataccaaagttgtcatggatgaccttggccaggggtgctaagcagttggtggtgcagaaggcactgccgacaatcttgaggttgttgtcatacttctcatggttcacacccatgacaaacattggggcatcagcagagggggcagagatgatgacccttttggctcccccctgcaaatgaggcccagccttctacatggtggtgaagacgccagtggactccatgacgtactcagcgccagcatcgccccacttgattttggagggatctcgctcctggaagatggtgatgggatttccattgatgacaagcttcccattctcagccttgacggtgccatggaatttgctatgggtggagtcatattggaacatgtaaaccatgtagttcaggtcaatgaaggggtcattgatggcaacaatatccactttaccagagttaaaagcagccctggtgaccaggcgcccagtacgaccaaatctgttgactccgaccttcaccttccccatggtgtctcagggatgtggtttggctgacgatgcaaaagaagatgcggctgactgtagaacaggaggagcagagagccgagccaagatttttctgacttacctgtctttggccttaaccactacactgtgacatttatgaatatgaaactttcagctcaccagcagtggtatcaaaaggttaagaaatgagtttaaaaggtggggagaggcagtggtaagggagaagaaagtattgctttatgcccctgaaaatacttctcatatccattagaaggccgttctccctgtttcaatggtctattgctgtatagcaaaccaccctaaaacgtggaggcatatgtaggggagaaaagatttcttttctcattcatcactgggttcatggatgaggcacctaaaacaagatcgattaacaagagaaaagcatacaaatgtatttcatatacgttttacgtgacatgagagtactcagaaatgaaaacccaaagaaatgggtaaacttgcaaatttttatgcttaggtttgatgacgaggt

SEQ ID NO: 136866 - DNA, 1038 bp, Homo sapiens
ttttaactctggtaaagtggatattgttgccatcaatgaccccttcattgacctgaactacatggtttacatgttccaatatgactccacccatagcaaattccatggcaccgtcaaggctgagaatgggaagcttgtcatcaatggaaatcccatcaccatcttccaggagcgagatccctccaaaatcaagtggggcgatgctggcgctgagtacgtcatggagtccactggcgtcttcaccaccatgtagaaggctgggcctcatttgcaggggggagccaaaagggtcatcatctctgccccctctgctgatgccccaatgtttgtcatgggtgtgaaccatgagaagtatgacaacaacctcaagattgtcggcagtgccttctgcaccaccaactgcttagcacccctggccaaggtcatccatgacaactttggtatcgtggaaggactcatgaccatagtccacgccatcactgccacccagaagactgtggatggcccctccgggaaactgtggcgtgatggccacggggctctccagaacatcatccctgcctctactggcactgcgaaggctatgggcaaggtcatccctgagctgaacgggaagctcactggcatggccttctgtgtccccactgccgtgtcagtggtggacctgacctgccgtctggaaaaacctgccaaatatgatgacaccaagaaggtggtgaagcaggcatcggagggccccctcaagggcatcctgggctacactgagcaccaggtggtctcctccgacttcaacagcaacacccactcttccaccttcaatgctggggctgtcattgccctcaacaaccactttttcaagctcatttcctggtatgacaatgaatttggctacagcaacaggatggtggacctcatggcccacatggcctccaaggagtaagacccctggaccaccagccccagtaagagcacaagaggaagagagagaccctcactgctggggagtccctgccacactcagtcccccaccacactgaa

SEQ ID NO: 136867 - DNA, 1016 bp, Homo sapiens
gtatggatgggactggggccggggaaggaggctggagtcaggaggagaggcaccacccaggccttactcttcatatgggtggaaccatcccatgaacaagtgggatgaggaagcctgaggagcttttggccaagcttagcctctgggggtgcccaacactgggcacggatagggctggggcacagacccaatattccagtacctccaagtcttttgtccggcacccaggctaggggccctgaagatgcttcactgtccagcgggatggggttggggaaatatttttgttctcttcagctcagtagccttcttccttcctttcatcaccttgtctaagactggccgggtcttttctcaaggtcaccccaggaaccagggttccttgggttctgtcgccagctctgggcacctctccaccatgggccacctggctctttcattttcttacttccaacttccaccttctcttctgcagcattgagctgcttttctcagcctctctggacttaaagcaacttggcccaaaggctgccagttgccctttctcaaccctccaatgcttctgtgccctctaccagggatggggctgtggaatccagagcacacccggttgccttccctaaatttccattcaccagcaaagatgagtttattttccactgtcaggaattcagagtttgaatgattttaccactgctctgttcttggtgcagctgggattctatttatcactgggttaggaatttcacttcctgccttttccatcccagaagaattctctcccctcccctcccttcctcttctctctttcccccttctctcctttcctcttttcccttctcctctgcctgcttttccatccctctccccttctcctctccttccccaccctcctcttcccccctttccattttgttccccttctccattctctcccttttttcttcccccctctcccctgcccttttctgtctcctctcctttctccccttccctttttctctcttccccctcct

SEQ ID NO: 136868 - DNA, 1256 bp, Homo sapiens
agaggcagaattttatcggcaggtttctgcaagtctcttgttctcttgctccaaagacctggaagccttcaaccctgaaagtaaggagctgttagatctggtggaattcacgaacgaaattcagactctgctgggctcctctgtagagtggctccaccccagtgatctggcctcagacaactactggtgagcaagctggacccaccatgtacagtgtgttatagtgttaatccttgtgcatatgtgtcataatacaactatttctgtaaagaaaggacactattacatatgaaaatatctcttctttatataagagaaattactccagtcagaaggacttagaaacatgtttttttccttttaaacttttaagtcagtttttatgaagttgttataatgtttctttacttttcaatgcacacatgctttgggatacgtttgtttttacttggaacatttgtttcttttcttttttaaggagaaaaaaaaatgagtaaaaggagctccacactttgacttaatttcatacaaagctctgatgacaggccatgactgtagagtggtcagaactgtgtggttggtttgagggagcgaattcggggaaggcacttggtgatataactttgttttgtttacagagtacctgctcgggccaggtaaatgctattggatgtaatccagtagtgtgtaatataaattcaaaccatatccacacacaacaactaattgtatgaaacttttatatcctaatttaaaagctgtgaaattagttttcacgcatcaaaccggattgtttatatgtttaaacattttatgctcttatttaaagaagactttgagctatttttttctgtaccctgtaaaatattgaaaactaacataatatgttgaggttgcttggaaatgtacataaaactaaaattttctgaatcgtgtgtttatgtttgaaatctgtgttttaactttgtaagtaaattctctgcctttgtatttatattttacaaaaattttcttaaaaggcaataaaactgttgaggaaaggagaaaattgaagtaccttgtgtcccatgtattcctaaagcattattgttgtccctgattcttcttaaatggtgctggtgatgtattccctatagataactttagagcaatttatagtctctggaaaccaaagcagactggaggattttggaggagttatactcagaatataatttggagtcctattctgaaagcccaattcttggacatatttc

SEQ ID NO: 136869 - DNA, 1019 bp, Homo sapiens
cacttgagcccaggagatcgaggctgcagtgagccatgatccgccccactgcactccagcctggacagtggagtgagaccctgtccacccccacccccacccccgcaaaaaaaggatagatttgggtttgagatttaggcctgaaatagtctcttcatctgccctgtaaagggttagtcatcaaaataacagtgattcattgcttgacgttgagccactcactgtagctcagtttccctatctgtgcagtggcggtgactgtgcacacctcctggatgaaatactgtgcttaggaggctcagtacccaaggtgcacatgtgcccagctttgcctgttgcttttaaaggagacaactgctttataagcaagtgtggcttgcatgagcataattctattgcgcctctcttcctaggcctctgcacgatgctgttgagaacgatcacttggaaattgtccgactacttctctcttatggtgctgaccccaccttggctacgtactcaggtagaaccatcatgaaaatgacccacagtgaacttatggaaaagttcttaacaggtatgacaaagttcaagaaatggtcttattcaaaaattagatgataactcgatacaatagatgattggaatttgactaggcagaaatcacaaaggctgaaactgtaaagcttttaggagagcagccgagtgtttgaacttttgtgtggtttgactttgttctagtgaagctaagtcatctattcaccctaatgttttaaaagatttcctaaagttattcccattttccacacatgcattcttaacttaggtatggctcataggtttacatcttgagtctgggaaaaatgactcaaaccttccatacatgaaattatttggacaggtttatggtgttaggtcatcagataacccattacttaagccctgggcattacaaagtgcctaaagcagaagcacaaggttttcatgagtgtcaggcacctgcagttaaagtccttatcaggcacttcctgccaaag

SEQ ID NO: 136870 - DNA, 1070 bp, Homo sapiens
tcctgaagcaacagggttaccggccagggttaccagcgtgcagccttaggttcacagggggagcatctagaacattctagttagtgttcaagtgagtgatcacctttgactgatgtgtcttagaaagggcataaaagaattttcagaactcacctcacgtttatgggtggctcaaatgctgcctattttaggttatagatgagttatttaagagttgtcacaaaggagagcctgctgtgacccatcaagctccccccttgccaagtggaacatgtgttgggctaccccacatgttctggctttccccccagtcttcagaacctgacagctctctgctggccatgactgctaggaaaacagtgtaacctgttgtctggtggcagatactgttccatgtgtttgaaaactttcttaatcaaggtaataaaacatggactaaattactgctctgcttactgggagcggttcattttaatgttttaacacgccaaagaagtgagattaataacagtgattctcatgcaaactgttgatgcggaacacattctgcaaagggggaagggaaggattgtcttacttagttcttgaaatgcgtaggttgtggtatgtggtgtattagattcctgtcattaacttaagtaaatatgaaaatatattgattcagccccaagtggggcggagagtgaagcaaaaagaaggtagggttattggaagcgttgatgtcatttgttgatgagtatgataccaacagaggcactgccgcccaggctccaactccgggtctttccaaggggcgtgaggaccagcctaaactcctgggcatcctcctctctgtgaagttgagaaacgttctccagctcatttaattgttcattatgccttgattggccttgcttttatctaaacttgtgtcgtcatccactactacctattggatgaatcgattgagtgaggaggatgtccttgtacttattcatgcgttgtttgaaacattagcaaccaaatccctctgtactcactgtgccaggcactgagctaagggcttgtgtgggtctctaattacagtttct

SEQ ID NO: 136871 - DNA, 1044 bp, Homo sapiens
cctccctgctgcagaaatacaccgacaacagcgagaagccatccgggaagagactgtgcaaaaccaaacacttgatccctcaggagtccaggcggggattgccactgacaggggaatactacgtggagaatgccgatggcaaggtacctcttgaccccggcttccctctggggcctgtgcgaacacatccccgcctgcctgcttcccagcttgaggggacaaagctttccttttcctggactcctcccccacaccacacgtcactcccctgtcctagaggagcatgtcttctgggtggcagcgaagtttcaaactagtaagaatgaaatcccttcccccaaaccctcctttgacaggcaccccccacccccaaaaaaagataaggaataaagtgcctctctccacgcaggtttgtcacgtggggaggaggaggggaagcagcggctgttagaaggacacgggcttaaccgtgtgcgctgcttggttttatgataggtgactgtccggagattcagaaagcggccggagcccagttcggactatgatctgtcaccagccaagcaggagccaaagcccttcgaccgcttgcagcaactgctaccagcctcccagtccacacagctgccatgctcaagttcccctcaggagaccacccagtctcgccctatgccgccggaagcacggagacttattgtcaataagaacgctggcgagacccttctgcagcgggcagccaggcttggctatgaggtgtgtccctgtgggcgctccctggggctgcaggctggggggcggggcctgcggactgtggtgggcgaggggagggacatggagagcagagctcagccccctccacatcggggctgggccggtgctccaacaggatgtttgtgttagccccactctcactgctgtctctttggtggcttgttcaatcgcggtgtggaaagaaaggcctctctgatgttcagttcgtgttcaggcaggtaggctgctacggcatcctccagtctcgctaacttatctctgatataaaatctgaca

SEQ ID NO: 136872 - DNA, 1027 bp, Homo sapiens
gaagggagaaggagaaagtcaggagtgtgacatgcacctcactctgctttacttgccactcgtcttcaatgtaccctccctctggaaagttctgtttctgagggttttgtgctaaccatgtgtgaggaccccagtctccaaagaagcagctgtcaatagcagattaccttgggcatggtggtcccacgcactccccagatcctgccttctcatggcgaccttcgggcttcattaatgccctcttgtctcccctcccccaggcgagtatagtgttggaaacaagcaccgtgatccctttgaagccccagaggacaaagatcttcctgtggagaagtactttgtggagaggcagcctgtgagcgagcctcccgcagaccaggtggcctcggacatgcctcacagccccaccctccgggtggacaggaaacgcaaagtctcaggtgacagcagccacactgagaccactgcggaggaggtgccagaggaccctctgctgaaagccaaacgccgacgagtctctaaaggtgagccctgtctgcttcgcccgcctgccggggggtgggcctttgcatgcggccacagtggatggacaggagatgtggatgtgcggcgcgctgcccccgtagacagagtcggtgaggggaagccgtgggggcgcagcagtggagcggacctctccattcccacactgcctcgtgaggttcccaccctggagcccccggggggagccgcccacacctcccctcccccaaagccagaacccagatggccaaagatgattaggccccttcccaaaagcagagaccagtgaccacaccccccctcccccaccccattagtgatgcgtaagacagtttgttcccccccggggggctttttgattaatttgtagttatttctccattagatgactggcctgagagggaaatgacaaacagttcctctaaccacttagaagacccacattatagtgagctgaccaacctgaaggtgtgcattgaattaacagggctccatcctaaaaaac

SEQ ID NO: 136873 - DNA, 1173 bp, Homo sapiens
ttgttgccacggtgacttgtaaatgttgccatggcgatgcttccaggaggtattgcaatggcatagccatggtaaattatgggatgtatgtgctgtgccttataggaccatgatgcaaggagaaagtggtagacggtgtaggactcagccatgttcacatctgcctagatctcatgaccaaaggcacatggcattccactcacagaagggctgtaagtagttgcaatggaagaggaccctgatggttaggacccctatctatcccttcatctctgtctatgcacccatctcctttgccctcaagagtaatttctgtgggtactggtaagaatagccccatttgagggaggtccaagtgaagtgtacaggaaagtgacctggagcctctccctcatagctgtttgccatacgtatcttcggcagtcaaggtgggtgttctttgggattattactggcccatggagggaaaccctagcataaggtttgggggccttcactgaggggaattgggatgtttgccttgagaggctcaggggttgaaggaaggacaataggcctcatttgcggaaagatctcgtttgcggaaagatcttcttgagagcggacaagaagcatctacactgcgtgtgggcaggcatgattgcagtgaaccccagatgcagcagtggagggctcccgataatagttctggactattcaggaggcagaagggggccctgtccggctgaacggggaatggtggggacttggaggaggcatgtgtgtttcgcaccccttatcctagcctgctggcttccccatgaatggggagcagaaggtggtgtgtgcaggggagccctccccacccccactgggcagcttttcctagatggggagccccagagaagacagatggcaagacctccccatatctaatgggggtgctccctagcagagagactaggtccccagttagtcactgcctgttgatgccagtctgtgaaataagtgattacaagtcttctaggtggttttctgtggacaaaatatactggcagtttgggcataaggccaggtaggtgagatataaactcatttcactattaggaagtttgcagtgaaggtcaaaactccaatggaaaactttctccctgagaaagatgccttagacttggttgagattgttacaaatac

SEQ ID NO: 136874 - DNA, 1108 bp, Homo sapiens
ccaacaggctgtgttcttggagcacccaggacagggccctgcaagccataagtcaccacgtagtgctcctcaggtaatgagccatggcagggagagcagaagaagagttgggggaaggtgaaggctgctttttaaatactagggccaaggaagagctggggcaccataggtttgtggttgatcaagaggaggaacctagaggaaatgttgtccttgctgctgccactgccatctcatccagggtacagcatgcgctggatccgtttggcttcaaattcactgagctatctcggccatcacgtctcttcatgggtgtcactgtggcccagagccaagctgtgagcatatggaaactggggtggggatttggggcaggcaggggtcacaaagagggtacaggatgcctccccgaagcctctcccctccactcctacagcaccagtagcttctgagatggcaggtgccgcctgtgcggcctcagctgcctgcgtgtgggtgcatcttgttgggagggcttgtttaaaaaaactgaattaactggacaacaccgtggttaggattttcattgactcttagtgatagtatgggttgctgagtttttcatttagaaattgaacaaatgagttaggagtgtccccaaactcctaaggaatgataagtggcattttgaagatggggtagggaacacggaggtgttgggcccttcctttttgtttttagttttattatttttattgattgatttacttttgttgatacatattagatgtgcatattagcccttccttcttgaatttgggtgtctgtctcccttggtagccacttggcttgtgtggacctaggactcactcagtggcaatgcctgagcgggagctggagaaagcgttgagtgaaagtgaaagggtttcatgggacttcttggctcaggaaacttctcttccaggacagcagcccctatgtactttgtaaactactttgagtttgggcagacagatgactaccaatgcctctgctgctggagagggtagaagttataacatggttggcctctgctagaggtgatgttgcctgcagagggagtagatgtcatgggcagtcctcaaaaatc

SEQ ID NO: 136875 - DNA, 1182 bp, Homo sapiens
gataacagtctaatataacgcagtgtagcagaggtatggcagtaggaaattaggtgcagggacaggttatattttgtagcagtggaatgacacttcccagccatctcctgccccacccctgtggtgacagtctgatgtggaatgaagagtccttatattctccctccaaaggcatagatgttgttgaagtaggatgaacatggtgaagtcaccataaagatgagcgttacgatttaccgtggggggtgggggagaattggccacagaatcccaaggcagcctggcatgcatgagggggctcttcccaccggacagagggcagcttgcattttggagggcaagtgatgtgaagagaaggctagtatcttcctcagtacactccctttggtccttacagcaggtcccccaccccaccaacagggttgactttgggatttgctcacgagtcttctagggtgctaagatgtgttggcagcaagtggaggtcttcctctttatttcttaaatatgcaagcttgaagctttaggtctgcttgcaacatgagaaacctcactgggcgaaggggaattagggtgtctgggtgaactaactggaggagtaggtgcaaagtcctcctgacacaggacacttggaagtgttgggtatgtttgagagctccccaccatgggccgtcggaggtttgacattcacaacacagttcatcggtgcctgacagagtttgggaagaatgtgtgatcagggagagtgtgcttcttgatactcggagcgcacacccctccctccacttccagctcatccctgggagcagactaaggccacctgccaggatcctgggtaagctaaaccaggactgatttgttgtaagtcattgctgaagaaagtagtttctgctgctaataggtggtggccttactcaagtggcagggactcaatgtacctgaagttgctcactcttcctcaaagagtggctacagggcagtgggaggtccaagccactcttgggtgaagtggcaaagaaagccttcctcctccctgatgattgctgccaactcgcagcccccactctgagttgcctcaacaccagctcttgggaaggttgtcagagggacctgggagaagtgggcaaggccgagttgatggggaaggtgcttctaaaagagggagtgccatacataagaatc

SEQ ID NO: 136876 - DNA, 1091 bp, Homo sapiens
cagcccccggccactcctgccaagcacagtagcagcaccagcagcaagggcgccaaagccagcaacccagaaccgagtttcaaagcaaacgagaacggccttccaccaagctctatatttctgtctccaaatgaggcattcaggtccccaccaattccctaccccaggagttacctcccttacccagcccctgagggcattgctgtaagtcccctctccttacatggcaaaggacctgtctaccctcacccagttttgttacccaatggcagtctgtttcctgggcaccttgccccaaagcctgggctgccctatgggcttcccaccggccgtccagagtttgtgacctaccaagatgccctggggttgggcatggtgcatcccatgttgataccacacacgcccatagagattactaaagaggagaaaccagagaggagatcccggtcccatgagagagcccgttacgaggacccaaccctccggaatcggttttccgagattttggaaactagcagcaccaagttacatccagatgtccccaccgacaagaacctaaagccgaaccccaactggaatcaagggaagactgttgtcaaaagcgacaagcttgtctacgtagaccttctccgagaagaaccagatgctaaaactgacacaaacgtgtccaaacccagctttgcagcagagagtgttggccagagcgctgagccccccaagccctcagttgagccggccctgcagcagcaccgtgatttcatcgccctgagagaggagttggggcgcatcagtgacttccacgaaacttatactttcaaacagccagtcttcaccgtaagcaaggacagtgttctggcaggtaccaacaaagagaacctagggttgccagtctcgactccattcctggagccacctctggggagcgatggccctgctgtaacttttggtaaaacccaagaggatcccaaaccattttgtgtgggcagtgccccaccaagtgtggatgtgacccccacctataccaaagatggagctgatgaggctgaatcaaatgatggcaaagttctgaaaccgaagccatctaagctggc

SEQ ID NO: 136877 - DNA, 1279 bp, Homo sapiens
ttgaactagttggcagtgtctttgggtgctgctgccttgaaggagtatcccagtaacacccatgttgttcttctgcaaaggtggatgcgagcacggcccataggatcgatggcctggcagcactgagcatggaccgcactggcctgatccgggaagggctgcgggtcccgggaaacatcgtctattctagcttgtgtggactgggctcagagaaaggtcgggaggctgccacaagcactctaggtggccttgggttttcttcggaaagaaatccagagatgcagttcaaaccgaatacacccgagacagtggaggcttctgccgtctctggaaaacccccaaatggcttcagtgctatatacaaaacaccgcctggaatacaaaaaagtgctgtagccacagcagaagcgctgggcttggacaggcctgccagcgacaaacagagccctctcaacatcaatggtgctagttatctgcggctgccctgggtcaatccttacatggagggtgccacgccagccatctaccctttcctcgactcgccaaataagtattcactgaacatgtacaaggccttgctacctcagcagtcctacagcttggcccagccgctgtattctccagtctgcaccaatggggagcgctttctctacctgccgccacctcactacgtcggtccccacatcccatcgtccttggcatcacccatgaggctctcgacaccttcggcctccccagccatcccgcctctcgtccattgcgcagacaaaagcctcccgtggaagatgggcgtcagccctgggaatcctgttgattcccacgcctatcctcacatccagaacagtaagcagcccagggttccctctgccaaggcggtcaccagtggcctgccgggggacacagctctcctgttgcccccctcgcctcggccgtcaccccgagtccaccttcccacccagcctgctgcagacacctactcggagttccacaagcactatgccaggatctccacctctccttcagttgccctgtcaaagccatacatgacagttagcagcgagttccccgcggccaggctctccaatggcaagtatcccaaggctccggaagggggcgaaggtgcccagccagtgcccgggcatgcccggaagacagcggttcaagacagaaaagatggcagctcacctcctctgttggagaagcagaccgttaccaaagacgtcacagataagccactagacttgtcttctaaagtggtggatgtagatgcttccaaagc

SEQ ID NO: 136878 - DNA, 1060 bp, Homo sapiens
agacagcaggcacagcctgccttccccatctgcatcctttatgaatcacctagaaagaggccttctctagcgccctgtttggctctcctttactgaacctcctgggattttttttctttccttttaacagactagacgcttgaagcaaagctgccatcccagaagacgacatgctctcagcaacccccctgtatgggaacgttcacagctggatgaacagcgagagggtccgcatgtgtggggcgagcgaagacaggtgaatgcgcccatctgggccgggcctgagtggagcccacgcccatgctgaagcccccctcaacttctcacagccaccgtgggcccaaaaggggtgggagagaaagagcttcccgcctagtaggccgctcttgatttacagttttaacaggcaacctggctcagtgaagcattgccgccctttaaaagattagcccctaaagcggcctttcagtgcactttcgtccttaatttattatttcatatttatgaaggagaattaatcccagtctatatactgctttaactctaaatgtcaggagtgtgggcccaggtggagcagcattctatgtgcttttaaaacaaatagtttgctcagtaataaatggggagagagccaccgttttccttcattgaagcccaggatctctcattgtcctctgctgcctgttcccagaggccactggcgcctgcttttggtcgtcagacagctctgttatgcttcctaatcagtaattttggagttgtggggtggaggcagctaagcagtagatgattgaagctgctcttcggggtaatgaggaaacttttcctctgccgcttgtcagcgatttttatcctggggatttggaagttggcaccaagcactttctttatcgatgctctctgataacaagtcccagggcagccgcagcagcctggcacagatgtgcagcttccttttcagcctggaacagctgacatttgtatgatactagtgtgtatccccctgtcattttgacaaaggcagtcaaatatggcttttttatcaccatggaaaccagtt

SEQ ID NO: 136879 - DNA, 1073 bp, Homo sapiens
gacttaggatggccaagaatgtggacctgcctctggaccgtcctggggcaagctgggtgtaaaaattcactcctctcccccatgagtcccaaggttgaagccttccaagccctggcacctgcctggtcctccttgggttttggaagatcatttagggctgactttggtctctgggtgtacagcctacaggatatctgcaaatctacttcattctctcctgtcccccccaccctcagcacctcccctccctaagtctactctctaagttttaacatggacttctacatctagttgggtttccgatggggagctgggagatgcttctggagtgagacatgaacttcggtgccagttctataaattggtctctttttatgacgtgtgccattttctgtaggaatgttgcttgcaaaacgagtttcgccttggaggaaaggcggaaagataaacaagcctgcaacgccaaaacactggcagtctttccctccttccagctctcttaaagcagccgggctgtatttccaggattagacttgtgcatgtgaggagggactcgcgttggctttttttcccccaagcaaatgcaaattagagaaaaataattttctttcaacgatatgcaatgtattagtcacttgttatcgtgctccgaggcaggcctcatttgcgcgtctgccagctcgctcacatctgctcagcgctgttcggggcattttaaccttggcggtgtcgtgtctagtcccatggatcaaggaggagtaattaagccctgaacagctacaaaaattcgtgggcccccatctataccatagttgttccatggctttgttttgggtgctctgagttccatgactgagtagcagacatgggattcctattgttccttgtaaagaaggtgggtgcccctctccttctctgaccctcatcccagcctttctgggactcccaggctctgcacaatcagtgagagactcgcttgcagattgcaggacccctgcattttacacatcttttatgcattaaaagttcctttgtgcttcctgtgtatactaatgatagctgttgttattagc

SEQ ID NO: 136880 - DNA, 2882 bp, Homo sapiens
gggattaagtccggatgttatgagggctcaatgtggttttcaataaagtctgccagggattgcttcttttatatcaatatgtatttaaaaaaattactagcatgagaagaaaaccagacctgtatggatccaggctggtagtaagctactgtgatcaggtttcctactcgactcccagaggggaagtcagtgtttgattgaagctacacttggttcttgactctcaggggatgcctgctctgaaacaggagccctccctccctttctctcctcctctccccctcctcctccctctttttcccttcttcccctaaaagcctttgtgctgaaagagcttcagtaggcacgaatccctggtccctctctaaagaatgccttacagcctttgctgacattgttttgtgaacagtgggttttaccaggccagcagtttccccccgattttagcgcacgattttaaaggtagtgtatggacaagatgcgccttactgcagtgattgcctcagtgtgtagcctgggctggggcttggaatctagagacgccttaacctttgccctaggggccctcctggagtggggggtgaaggtggggagctcgaggactgattgttttcgaggatctgtttgttttgtccagccaccgaggctgaaggtggagttgggcaagtctgagtgtatgttccagctttgggtctgattttaaacttggtttaattggagaaactcctaggcatttaacagttctgtacaaatgcaaacttgaaatagctcgaggcctacgtcatttaggaaagaataaatgaagtacagaaatgtccaaactatgtaaatcctagcgttgtctgccctcccataaacacatgacaagtgccaaggcatttccagtcaaaacacccatggaagcagcagcctccatcctttgtatttattattttattaacagcattttacacagcatttaacaagcacagcgtgcctgctttgcaccaggactctaagcaggcgaaagggtggaaaatggatggaggtgggggaggagtggttgctagaggacatcaactagagaaatctcatcagatgggtagggaaagcagcaccgggggtttatttctactggccacaaggaagacagacatagtgctttggaggaagaaatcctctctcccatcccaggaggaaagttgtacagctgtgatatgtctggtctcagctttgattccagagggtaaaacagggtatgtttcatgatactctgcccatcggttattggtgattttcaaagaataagtatttgtctgctatcgttattctatatcctggtggaaagtttataacgaaaagtaatgcctttcttaagtcataaaatgagccttgtatgcttatttaattaaaatctatttaaggaccgattaggcgtgtaatttgcactaataatgacgattatggaaatgttcaacttaaccaaaaatcataaaggagacattttgatcagtggggcggccagtaagtatttagtgagttgggcaatttccgaaagacaggaggcattccgctgagggctgcagaaagcacagacctgtctggcctctgtgacatggcatggagaggggcagacctccctgtcccggccccggccccagcccggccagaccccactttgctgagcatggaaaccaaccctgcgagtctccacaacctttattctcgtgatgcttcctcgagcttccagaaggagtaaactctcggagagggctgatgagccacacggaaatctctgcgaaatggcggtgctcttttgctttaacaaacagcgctgacaaacgcatgcttccttggctagccttggctggatcccggaggggtagggggagaaggggtcccttgttccggagaaacctgccagctgctgggcttggtgtgaaggcagcaaaggcagacacaatgctgctgttgttggtttgatctctaactgtggattgttagtctggctttaactatgtggtaaggggggaatgtgaaggctgtttacagcgagtgcaaataatgtgacagctgttggcgcgcgagcagcgctgcgcctcctcagcacttacacaaagcgcgcactatgcaggcccatggacgagctgcagaggtggcggccagtttctggccagcgcatccccagatgagagaaagctccacggcacacccgccctccatccccaacacacatctttatgacttcccaggattggggtggggtgcaggatggtttgtatgttgtggtttagggaacttgtggtgaggcagaggtggcgggagaaggcccacggggccgtgagtgtcaccgtgttggtggggtttggccaggatccgttgaactgggtcctcagctgtttatggctgagtttttaagatttgtgaaaataactttcagccctaagtaagcttgttggaaagaatgtgttattaactgaaagctttctggaaattgcagaggctctgaaggccgttgttcccctctgaaatggccctgttattcagacaagttagagacaggcgggtgctgtgttctgtgcactcgacactgtttccagcttggaaatgcaagtgtgcaggttcagtaccctaaggggggtgtattttggggggaagggaggacagattggcttttgattacccacatcccttaaccttttcttccaagccttcccgttttcaagagcacatttgccttcaactgcagcacgcaaaggtgccgtcctgaagcctgcccacagcaccacctactctgacttcatcaactagatgcccacagcaacaggctttctttgagttcctggtaccccgccaggccctgcagagaggcgccagggtgggagggagagcagttggtggtg

SEQ ID NO: 136881 - DNA, 1050 bp, Homo sapiens
cgcctcccggtgcctccacgggctgctccccccttcccccacctccaaacaattcccacacaattgaaacgtccggggaactcgggcgcggagttcaggcggaacggccaccgttgcctggggtggtgttttcaggtagcttttaacaccgaaatgggaaagggctcctctgggaggaaggggcaaactggggtgggggtgagcacgggagcacacaggccacgctccgctgggtctcggaggggacgaggccgggagagcgcagcgctggtggcaagaggcggcggcagcggctgctgccgctggggtttgacagctttggctgagcggagtgcgaggcgctttatggtaattgcggtcctccactggccttctgggtagcgaggggagtctcggcgcgcggctgggagagccgcccccgccgcccccatcccttcggctctggctctgccggcagccctcgccgccgccgccgcccaagtcggtctccggctcgcccaggacgtgcgcccgggtcgggcgtgcgcagccaactcggcccgagctggggaggggaggccgggggacgaggagggggggcgccacccaagtggtccggggttcggatccagagaggccaaaacgtgccgggccgtgcatcgatgacggccggggaaactcgggcaaacctttcctggggaatcacccctcccgaaaccccgccgcggaggcgccgcagcggagggtgagcggagactggcggagctcaaacttgcgagagctggaggcggcggcgggcgggcggctgtcgcccgagcgctgcgcctgcggggggaggggaggcggctgttgggagggagggaggtagggcgggcgggagggaggacgggcggagggagggggaggaggaagaggagggaaccagggaggggggacgcgttgggatcgcggcgtgcggcggcagacggagcctgggctcccagcggcaaggtgaggcagagctgcgctcctcgctgaacgcgggccgagctcggcggctgcgggggagacgcgcaggagcccagaccgcga

SEQ ID NO: 136882 - DNA, 1084 bp, Homo sapiens
tcgctcggctcccgctggcaaaacaacgccttcccgggccgggccctgggccaggagagtcggggagggtgggacggaggtggggggtgggtgaggcagggcaagccttgcaggtcagctccgccgccggatctcctccggacacggaggagacggggagcgtccattggcccttccctaggtggagtggcaaagtccgagccccgcagccgaccctacgtccctacgtggaggggggcgggtggagtaccggtgccgccatgacctactcccgtcccccgccggaggctagagtagggctgagggggagatgagtgtgtctggtttggagagcgggggcggacactgggaaggctcccaaaacaggttttgccccatctgttttatgaacgacctcttcaggccagaagccggatcccaggggtggcggcccttcgaccttcgaaaggagacccgggcccccagcaggccctctggcttcgcgctctgtcgcctgcagtgggtgggagatgggggtggccgaggcttggctgctcctggccctgagcttcggagccctattttctcctccgcgatctctgcacacaacagtaggcagcctctcacagcagcacgcgcccagctgcagggcctgggagcaggtgttcctgcccggccggagtggcggctccgcgcccctccggtcccagctgcggagctgcgagcggtgcgggggggcgtgcttatggtggtagcagagggacagggacatctcatcggaccgcaggaagggtcctctcggcttacaccgggataccgcagggcccgggtggtcgcctggggcgaggagggatcaggggtgacgcgcggccagccctcgtctggaacagccctggggccagcggaggccgctcggggcggcgcgagggcttccggtccccgtgactgcggcggcggcggcggggcggccgcgaggagcaccctcccctggctgctgccgccgcgcggctctcggaacggcgccccaggagcctctctgcgtctggcagcgccgctttcggcttgcgctgggatgggggccgcagggtggtctcggcccagcccc

SEQ ID NO: 136883 - DNA, 1116 bp, Homo sapiens
tggaaattgacaaggcctgtctccatgtgttgctagaaaagtaagatatattgataagtttcataggtgaggtacagaacagattgtgcagtgtgttcccatttctgaaagtagaccagaggacatgcatatctacagagaaactgggggggaagggggcactcccctgcagtgttggaaatctttaatgcacacacaaatatgtgtctatattcccccctattttgtttttacacaaactgtagcagatggtacacactgctctgtaccttatttttttttccttaactgtagaccttgggggtctttccatatcaatacacagagcagatcttctttattattttaacagctacagaatattccattgtatgcatgtgccatcaatgtcactgctgactctttaggttgtttataatcctatgctgttataaacaaagctgcacttattccagtgtcttaaaataacttcatgactagctgatttttagagtgaacatgaggtaagcctgcagaaattccacatggatggagacacctctttcaagaagtccaggtgtacagggaaacagataaatagggaaccagcaaaggagatgcgaggttaagaaggggcattataaagatgggtgatgcttcaagcaaagaagtataacaaggggcctttcaagaaagggtatggggggtgagggtggaggcagcaaggaaaagcctctaagaaggtgatattttagcaggtatgaaacgatgacttaaaacagtgtgagatcctatgttgggtgctgcgggaacatcaggatggatggacagacactggccttctggaaggttcaactccagcagggaagctgtgctgtttcacaaattggctgcaatattgttagaaagtggttgattctcggccgggcgtggtggctcacgcctgtaatcccagcactttgggaggccgtggctggtggatcacctgaggtcaggagtttgagaccagcctgaccaacatggtgaaaccccgtctctactagaaatacaaaaacattagctgggtgtagtggcgggagcctgtaattccagctacttgggaggctgaggcaggagaatcacttgaacccgggaggc

SEQ ID NO: 136884 - DNA, 1042 bp, Homo sapiens
gaatggcccagtgcgatctgacacctgggacgctttcagggcaacaccaagggcaatgctccagtctgtatttactctcttctgaggagaaactctggcagcagctggaaaataaaacccaaagcaaggaagaagccgaaaagaagaaatactcaaatacgaggcgcattaatcatcggtgtcagatctagagcagaggacaatggctggtttgaagaaagactgaacctaaattatcttggaaactgatcttctctcctccgggttccctgtgcctgcaagcaggggtcccggtgcagccactggcatggaaccgatgggggcatccactggctgaccagcatgctttgtcacaggacaggttagagatgaccaccttctgtctgtggatcatccatagcttctgcttaggaagctacagaagagaaaaggcctctcacagggacctgcaggacaaattcattgcccatcgtgtcctcaggggacatcatttgcatgccaggatgcagtaaggccactgccttcagatccaaataaagcacccaattagcatgaacttgtgcaattggcagagtaatgaagctgaccacaggtgcctggaaagtccgaaatttagttgctagtgttgcaccgtgatggcaggggctgtgacggcatgaataagtctgggctttgggaatgggcagtgagcttccaggcaagcaggcaaattaattatcctctaagcctcagtttccccatctgaaatgggaataataatagtacctttattataggacagttttttttttttgagacagagtcttgcaccgttgcccaggctggagtgcagtggcgctatctcagctcactgcaagctctgcctcctggtttcacaccattctgctgcctcagcctcccgagtagctgggactacaggcgcccaccaccacacatggctaattttttgtatttttagtagagacggggtttcacggtgttagccaggatggtctcgatctcctgacctcgtgatccacccgcctcggcctcccaaagcact

SEQ ID NO: 136885 - DNA, 1085 bp, Homo sapiens
gccaaggtctgaggggcagggcccagtagggtggctgagggcttccatctttatctcaatagtgaaagccactggagcaccctcgctctggctgcaggatcaacccccgccccccttttacctgtctgatcattcttcctcttttgcaatctggccaccctagaatcctggttgttccttaaacacagcaggcagtctcctaccacagggcctttgcactggctttgcctctgcctgcaaaactctcacctcagaaatcttggcttgctcccccggctccgttgagtctttgctcacatctcactttcccaagagacctcccctgagcaccttaatcctgcaaatccttctccccacaccctgccttccaggtgcttctttcctgctcccacttttctttccatggcatacatcactgtccaccatccatggtaattttgtgacctcttacctttattgcttatcgcccatctctctccttctggaatacaagtaccccgaggacaggtatttgttttgtttcctggggtgtgtcgggagcctggagcagcacctggcacccagcagcagtggttatttgcgggtgtggttgtggctggtggctgctgtgggggccatggactgcagaggggtaggagccagaggagggggcccagtgaggaggccattgccatggcgtaggtgagaagctgtgctaggcagtgcagggcgctggatgtgggggaaatggatggactcctaaaactgcgcagagaaaagaaaacggatttggtgaagggtcggtttggggagtgaagggattggagaggtcaagggtgattctcaggtttctggaatgtataaccaggtggttggtggggaccagggagaagaagcagttttaaggggaggaagagagaaggggcattcctgcagggaacatgcatgggccacaatggggaaaggctgtgtctgctccgggcatagcggaaaacccaatttaggctggagtggaagttcctgcagagaaggtgaggaagacagggtgggggcctaggcaacccgttaatgctgccaactccacgctttcactctggaagcctggg

SEQ ID NO: 136886 - DNA, 1332 bp, Homo sapiens
ggcatattaaccaaggagaaaaaagaccatagacatctattttgcacataattatttaacacccaccatacgcctaccaaagctttggacatttatagcaggaacaaaaacaatatcttggacatcataaaactacattttactggggagagaaaaagtacatgagcaataaaaatatataatattgcaggttgtaataaatactcggaagaattaagaagggtgtgaggctacagagagatggaatgttcttttatgtagttagttatttctatctacagcaggtagaacgagtgttcttttagatggtaggttgtgcagtatgagccttgggttgaccgagtaacgtgctcaggcgatatatcaataagctcttgtcacaacactgttgtatcacaaaccacctcaaaacatcagtaagcacttatttcctacatacatgtcagtgggtcacctgtggttcactggtctagaatgtgctcaacagggcttgactccaagtgtggattggatctaaagctgctccacgtgtccctcatcttctacggacaagtgggctacctgggacatgttcttctcatgacaatggcaaaagtgcaagagggtagagtgcaaatgcaatgactcttaagtccgggactcaaaatttgcacactgttacttctgcctacatctattggccagaagaagtcatgtggcctgacatcggtgggatgaagaggcatgctctacctctaaaaggtgtggacacagggggaggtgaagcactgggaagagtaatgcaatctgaaacaggtgtttcaaaccaaaactatgtatctctagctgtgacatttatatatacaaacacatatatcaaatgataaaacgacccttgttgaaaccttcagttttagattaaatttaaataaatccatgcaataattacattaccctccccgagatggtttatgatgtcaccagaggcttctgggtcattgccgccaatctcaggaaacctgggaagatgggccaccggccatcccaatgctgagagacaaaaaggccatgaagggccgggcgcggtggctcacacctgtaatcccagtactttcggaggccgaggcaggcagattacctgaggtcaggagttcgagactggcctggccaacatggtgaaaccctgtctctactaaaaatacaaaagttagccaggtatggtggtacacgcctgtaatcccaggtactcgggaggctgaggtacgagaatcacttgaatccgggagtggaggttgcagtgagccgagtattgtgtcactacacttcagcctgggcgaaagaatgagactcttt

SEQ ID NO: 136887 - DNA, 1010 bp, Homo sapiens
gtttcaccacattggccaggctggtctcaaactcctgacctcgtgatccacccgcctcggcctcccaaagtgctgggattaccggcgtgagccaccacgcctggccaaaagatttgttttttaacatatttgttataacttaagaatcccctctttggcttttgtttcctactccaaagttttttgttcccctttggccttgataccatctttcgttttattaaagttgattatggttcctctgtcttgtccctagccagacaaaggcttaggagaagtcaaaggacgtgttaattatgtttcttgtaaactgacttttcatttccccctaacacatttagttggcttggtgtttagtttaacaatcaattgctacaaatatgctgcttaaaaatgctgcttttattaaaacaaataaatgaattcaaagacctttctaatttcaactcgtgtgggctagaaacagaagagaaaatcgaaagcaagagagagggaaaggcggcagggaggggagagaaaggagaccaggaaacacacacagacacacacacacacacacagacacacagcattcctgctgccatccctccggaagccatgttaaactggtccatacaattgtccctggctgccccctgcagctcgccagtccttctggattttccatcacttggcgcctaaggcgatcattagctgagaatggacaacctcctctacctgccggcagctcagctcgtcatttaccagccaggggaggctggccccatttgctcaacccgagaggggtccttggtttttgcccctgggtgcattggtgcctaattaaactctatccagggcaacgtgcactaaatatacgtaggctgagaggaagctgggaggaaaaagcagtcattacctaggaagagaaagtgaatcttccgagagagaggaggaaggacccctgcgatggtgctttctgtttaccctcagcagagccttggagtgcatgttcacttgggtgctgaaat

SEQ ID NO: 136888 - DNA, 1503 bp, Homo sapiens
gcactgaagcgcgtgcagagctgctgatcgctgccattgttactcgcgggcggtgtgggagctgagcctccactctggcgagagataaatggcctctgacagcccctcctcgccaagagagctcctcggatttcaccgcgcggcggctctcaggtctgtgcctcgctcgcttcccggtgagaacctttaaatcagcctctcggccctccctcctcccggacactgtcccccgcccgctcaggccccggcagggccccgggcgcgctgtgtgcagtctcggggtcctctccccacctgggggttaaacagagtgggggcgcagggaggacctcagggccgtggggggaggcaccgggctccccagccccggctccgcgcctccgcgggagcggagccccgcgccccgcctccgcgcccacgagatggatcaggctaccgtgcggagagcgggctgtaaatatttaaaaagtctctcgcgcgccggcagtaatggctttcgcagtcggaatgtgtgctaggggaagaggaagggcgacgtgtactgtgttgcagggtggggaattgttcctacgcttccccttaggtccggggtgggctgcatgttcaggcttcccgatttcccgccctccgcctctccgccgccgcgtcccacgatagcatcgagaacgccagtcgacagggaacttgagcatagccgggcaacagaggcccggtcgaggtgaccccggagccaccctccccaccggggtctcccaagctcgtgggttgcgaatggtcccagacccctaatccgggtccgcttctcgctgctgcacaggggagggcgggaaacgcacagattggagccccctgagtttgggtggtcgcaaaagcctgggccggggtttctgcagagggggcctggaccctgtttgtgcctttgctaccctccccagccgctcttaaaccttgatccgctctccaggagacccccacccctatctgaatctgaaagtagctttgtggctgctgggaccgaaacctgggaggaggcagcacggagagtttggggcggggagggggtagcctccaggcttagtggaggtcacacgtggacctgaacggggactcttttgcctttctggtgagtgtgggcctgggatctttaaggccaagccctgccggatggtagaggtgggggagggggattcagccttctcggcttggctgggagagacttaatgggcccaccacagggtgtgtgtcgggtgaggttgtcccctttgccagcggccactccctagcggggcggaggggctgagttgcccagagctggggcgggccgggcgccgcgggttcgcgcggaaggttccaggggtgtgggcccagtccggagctgttcgcctgcgccccgccggctctgggacctgccaaagtgtgggtgctggcggcgtgtcaggacgcgccaggctgctctccgcgttcgagcgctgggagctcccgactcctggcagctccgtgcag

SEQ ID NO: 136889 - DNA, 1010 bp, Homo sapiens
cctccagcgccgccaagtcagataaaaagttgcccgaggccctgagagtggaggcaccagctctctgatggccttgtagacgccctgagaacagtccgagctcctcaaacccgctacctttgtcctgggctcaaggagggggcggaaaccagaggggcccggattcttgaagacctcccctggggaccccactgtctgctgggaaggcctcagccaactgtaggcccaagccctacagagaccagctctggcaggaagtcatgccaagagtctgtgtccgcgtccttaggcgtgagaatggggctatgccaggctgggcctggctgcgcacgcctccgcttcgggactcgggcggctgctgctgccttcgttttcgggtcttcgaccgagcctccctggctctctactcccgctttgtcttgctgtcagcttctcgcctgtcctcgccagtctcctaggtcggcgggtcgcgctctgcctctccgagtgcgtctttgcgcacatgtggcggtcttcctgcaacctgggtcagctcggcctcttcccgcggggtacttggctttgcctttggatcgctgcgagtgtccacttcttgcgctctccttctccccacctcgccttaggcagacgcatcccgggcttggcggtcccccaaacagaaatatccccgggtttctggtttagctccaccaaaacaaactcgagggattggggtatccttcacttgcgtttcccgcttctctcagccctaggccgaaactggagggtttttttgttttgttttgttttaatgagacctactttgcagagttgacggggaacatttctgcggcagacttcgaggtctgtggcgctctcccaactttcaagactgtaagccgccaagaaagagaatttgggtacatgattttgccgctgatgtgggctgggacgagggtatccagagtgcacgtgcatgtgcggatcgcagggactctcggtggattagccgccaaaagctggggagcgcc

SEQ ID NO: 136890 - DNA, 1049 bp, Homo sapiens
cctcccccttccacagctgttacctctgccggcaacttggtggtggtggggacccgtccccccgctgaccctggcctcaggctccgagttcaccccagcagttccagggggtgtttttcttcgagacgtgggaagggaggtaaagccttatcggaactgtgaggcttcgtgccagaatccaaggctcgggtactagccagaggatcctcccggcagaaggccatggtcctccctgtcttacaccaggaggtagtgacagtcccggagggaggggctccaggaacaactctgctggcgacttctgttcattccaggaaaacattacagaagggtgaggtgatgggaggcagaaagatcccccctccctcctgcttgccccaatccctgtcagcacttgggcatttgggacttggtgtgtaggttccttctgcagcagagctcacctgcgccttgggcctaatccacccacatgccacaaggatgcttttcctcttggtttggagtacctggtgggtccaggggggaagtgccacccttagtgggttctggaggtacaactcccccatgctgggtcagttctatgcttgtaccaggaggccctcctgggccttggtccttcccagccatccccagccttagcctcctttccccttggccagctgtctcatgccttaaccacacatctgtgctagctgcaaaaggtcccgcctgtatggatctgtaagaggcccagagctcggccccatggttgaggtgggaagatgtgaagcagtttgctagtgcaggaatcatgaagatattgttgatgatggcagagcagttcctggtctccagcattgccttagaatggcttttcctcgtggtagaactttcgctagtgggtttcacaggctcagggcccaatcttgtgaaagtagctacactccccagcccggaaacacataaatacacataggcaaactcccaggaggctgggtgtaggaaccaccaccggggggatctgcagcagccagagaatgtctgcttttcctgtgatggttctgagaagg

SEQ ID NO: 136891 - DNA, 1085 bp, Homo sapiens
agctcctggctgccagagctctggtgggggaggggaaagggaggagaggagccagcgctagcgtaggtagcggggaatcgaagcttcccaggagaaagagttcattcatgagctgtaggaggcctcgcggcccggccaggtggagcctcctgaagccaacacctgtgtattttcctttttggaaacaggcgagcccatcgatcattaccatattttaattgcctttcgcaaaggtcatctctaattatgggttgcgaggagggttggtcaggagtccgtggccctttattatctgtgtgggtgtgtgtgtgtcgccgcagagacaatgcgcccagctcttatagaaatgccaatccgagggtgtccgtgcgcgcctgcgaggcggtcacgacgtgctggatccacgcagaccaggctgcgtgcacaataaaagccgagcaggcggctgagggccgcgcagacccacgggttttctttttagaaacagtggtgcgaagagacttgacaataataacacgcagcaggattaaatcagggcgggaataaggaaatgtattttcgtttctagaaccgcggactgtgtttaacccatccgatcctcccctccccagagcattttgtgcacacgtggagttccgcgcagggacaggcgccgggcacagagtggcttgggactgcccgatgacgttccagggcagccacgttacgttcatattaatctcttcccttaattcggcatggttgtcagttacagtgacgtgaaacagccttaacgatgtctgttttatgggaaacaatacctggctagttgaaaaagagaaagcaaacgttgaggttttttaacttttgaaagtttgcatttccttagtttttatcactgtcagaaacccttgtggcaaaagcctattttaacttcctccgagggagaagagcagtggagaaggtagatggagggtcaggggttcttgggaggatattttggagatggagggaggtggagatcagtgaagagctgtgagtcaggggtggtcagcagccactctgaacttgattttctcaaaggagcctggcacttctgagccccg

SEQ ID NO: 136892 - DNA, 1704 bp, Homo sapiens
tatacttgttagagcgaaaccccaaccagccccgcctttcacagctggcgtccgtagccgggcggaggcacacgaccaggaaagacagacaccctggttggagaccgtcgctcgagactggcagaaagatctgcactcgggaggcaccctcaccccgtgggctccgggacccctcgactagctccatcacccattccgactacccgccctacgctccacctcttgacccgtcatcaccgaccggggggcgggactgcccgacttttcaatcgctgcctaccattggtagaactctccatccgttactttaagtcccgcctatcaggctgtcgcttcccaggttacgtcccttccgtaggccgcggcgtaactggtgattggtggagaaagcggcagctgtcccagcggaagcgacgaagggacgggacccgggagcctggacgagtccgagcgcgtcacctcctcacgctgcggctgtcgcccgtgtcccgccggcccgttccgtgtcgccccgcagtgctgcggccgccgcggcaccatggctgtgtttgtcgtgctcctggcgttggtggcgggtgaggagccgggggccggcaggacgtgcctggggaggtcctgcgccgcggggcttgggggtcgggggcggccgcgggcgagtagctgcgaggcaggtgccgcagtgcggtccgtcagcggcggcctcgcctcagccgcgtccccgtcagcatcttctctggatcggccgtggcggcgcggcctcacgggccgccggggccggggctgggctgcgtagggggcccctgagcctgcctccaccctccactttgagggcggcgcgtccggccggcttcttgcgcctgaaaaggcccttcagagtacggagatgcatttctcagtgaactgggattgagtcgcagcccgctgcgaagaagagaaggcagactttttagctgccactggctgccacgatgtttttgcatttgtatggtgccttcatttctagtggttgtcatcagtaattgctgaaatccctgcccctcccttcccttatgtatatttccggatgcaaaagttgagatggagtcattatttttatatgacttatatttcttaaggcgaatacaaagcacctctcaatagtttgtcagagttccaaattttaaggatttggaaacaggatgtgagtcgcatttttagggtcacatgtcaataaatggtagctttctgagtagaacctagattcctaagcattcagcaagaggtgaagaaatcagctaatacgtggcctcttactgcatatcatgtggtaatgtatttcatttgacagcagtccttagagggcatcatctttgttttgcagggtgatcaacctaaataaattacccaacactaaacaggttgggtgctggatttgatttcagatgaggtggtgccagcgcatcggccttttccattatatatgttgtgttgcacaagtaacgctattactgtgtgagaatgtgggagtgatggggactgagactggaggcacagacagtagtgaacaagaggccaagttgagaacggcttggaggaatgggtgctctgatctcagtgtgtcagtttaaaacctatgggaggccgggcgcggtggttcacgcctgtaatcccggcactttgggaggccgaagcaggcagatcacctgaggtcaggagtttgagacc

SEQ ID NO: 136893 - DNA, 1037 bp, Homo sapiens
gcggaggttgcagtgagccgagatcgcgccattgcactccagcctgggcgatagagccagaccttgtctcagaagcaaaaacaaacatacaaacaaaccaaaaacctatgtgaggtgttgggaggtcctgcttgtggaatggcgatttaattctgcaccagtatgctcttgaaatctgcagatctctgtccctagaggtgcgggggttttgtgtgttaatgatagttacgttgtatccatgccccaaacgttttcgagttctttgtttctttcttctgtttctggctctggaaaggtctttctgatctactgagatactttgagggaattaattttaattcagtttttgaaattttaaaaatattccctttgatcctgtggtttaactgaacatctattgagattccatgttttaatattttgactgatattattttgattcagtgaggtataggcttttttgttttgggtctgagataaaataattgcttctgcacatggtttgaacatgttttccttactagcatagccgagttcatacagaacaagaacctgatcctgtcagcttctgaattgctcagtcttgtcagatgaggttcagttattattttccacaatgactaaatgtgatgtagtggaaaacatctttaagagctctgacttctctattccaggcagaaacaaaaatagaaatcctttaaaacagtgttgccaaactagagggagaactagggacctagagagagaggaagggaactaggattttgaataccatatcatgaggcgtatttgataaaattcagatatttagcctggagaagaaaggccaagggtgaacacatggaatttgaagtgatgtcatgtagaagagggagataggatccatttttttattattattgattccatccaccattcgtagacgataatagcacagtatagtggagttcctagagggaaggacacttagcccagactggggaggctgaggaaaatttcccatgggaggtgcctcccagggctaatgtgttgaaaag

SEQ ID NO: 136894 - DNA, 1032 bp, Homo sapiens
gtaggaccaaaggaggttttttatggttttagttatagaatgggagtgccttgagcgtatttttatgctgaagtgaaagggccagtggagagggaaaaaactggtggtttgaagtgtgacttcattcattcattaactcaacaagtacttattgagcaccaatgtgtcgggctctgttctcagccctggggatagtgtgtgaacaagacgcactgaaatccccgccttcatggagcttgtattctatagggccatcttttgatggctattaccatatagccacctcactcctgatgtgttgtctgtcctagaagagtggcttccttaacaaacagtgaaggaacaaaggtccctaaaaagactgaacacaggattgtcttagtctggaggagggacatccctgccctcatgtctggagggagaggagttacagataggggcttatgcagataaatttgtggtggggagaggaagcaggtagctcaagaaattcctctgttttctctgtgaagctggagatgaggttatctggtgagactgagttggggagtgatagcataggaagttgaaagttaggaagcccatttcagttcagtacaaggaaaaacttttcaaaggactagaatgttaggaaaatggagccagttgctggcaaatgtagttcgtatattgaggtggtgtccccatcactggtagtattgaaatagaggaggggtgactttctgccaggtatccctgagacatgcttatacttataataagcagaagtttggacaaatgaccttcctctgtataggagtccctgactctaaggttttctaaagctctgggcttctgaaggactgttgtacaggcatggaagttgaaactacgaagctggggcaaagttatttggtataggtttgccagaattgaatgagtagggccgtgtctcaaaacaagggtatctccaaatcaaaatatggttttttaaatgtgtatggtacctggggctgggcgcggtggctcacgcctgtaatcccagcacatagg

SEQ ID NO: 136895 - DNA, 1088 bp, Homo sapiens
ataatttagagatttcaagcttcttcctttttagtctgtgcctgggctttgttttttgttttttaaattttggagatatgccactgatttctaattcctgccaaattgccacatgcctctttaagagccatcagtaggaaggtgtctatatcattaggaaaccctgttttgtagttgtacctttgttgatctctttttgagacttttgtttgtttcttgttcttatcaggcagaccctgaaccagaataggttcagagaggctctgatagttgtacttttgttccagcagaatgtgtggacttaaattcttagagtgatactttgaaaaagaatttgttattgtttaggactcagcattttgaccagtcataatttaatacgctaagtcagtggtgaatggggaaacatgtattatatttaataattgtcaaggtaaatgatttatgatgttgataattcatttactgatctgttttcttttcaggtgttttggggaacgagtttagtatattaaaatcaccagggtctgttgttttccgaaatggaaattggcctataccaggagagcggatcccagacgtggctgcattgtccatgggcttctctgtgaaagaagtatgtatatattttttaaatgtttggagctgcttttaagaacatttttactgatttctgctaatagcccaaaaaagcatcaaacgaacgtaggtacgtttggtacagattacaaaagttaaaaagctcatctggaccaggcacagtggctcacgcctgtaatcccggcactctgggaggccgaggtgggaggctcagttgaacccaggaatttgagaccaacctgggcaacatagtgagactcccatctcaaaaataaatgaattaattttttaaaaacccatttgtagttgggaagattttggatgagtgcttcaagcttggcttctgaaacaaatcattagaaatcattaactatataattatttattcatagtagtgaaattctttgtatattagagaatgcatctgtcctactcttaataggatatctactttctggttttttttttttagtataggcgatagattc

SEQ ID NO: 136896 - DNA, 1073 bp, Homo sapiens
tggtcaaatacggaagatgagtggaatttacaaagcacctgaaggaaaaaaaatgccatgagaaacaggtgcaacaaacagaattcatctccttagaactacggagaataggccaatttccaagagatctaaaaatacatacattaaaattgtgaaaaaaagggccaggcatggtggctcacgcctgtaatcccagctttgggaggccaagatgggaggattgcttgaggccaggagtttgagaccagcttggtcaacatagcaagaccctatctctagggggaaaaaaaaagaaagaaagagaaaaaatttgtgaaaaaaaggaaggaacagaaactatgagggagttataagacatttttgatacatggtgctttagctgatacttcaaaatatttcataatttatattgtgattctttaacccatgagttatgtagaagtattttttccaaatgcatgggttttaaaaaagtaatttctaatttttaaatttctaagttcactgcattgtaatactgtggtctatgtgatgctgaagttttgggatttttttttttttcagactttcctgtggtcgagtatagattatttccaagtacacatggcatacttagaaaaaattactgtgcagtagtccacaaggcaaatctcaacaaacaataaagaatcagtgtcatataaactaacttctctgaccacaatgcagttaaatctgaaaataataataaaatgatatcttaaaagggtatttggagcccggcaccatggctcacgcctgtaatcccaacactttgagaggccaaggcgggtgaatcacttgaggcgaggagtccgagaccagcctggccaacatggctaaaccctgtctctactgaaaatacaaaaattagccaggcgtggtggcacgcatctgtagtcccagctactcagtggctgaggcacgagaattacttgaaactgggaggtggaggttgcagtgagctgggattgcgccactgcactccagcctgggtgacagagcgagactccatctgggaaaaaaaaaaaggtatttggatcaacatttctcct

SEQ ID NO: 136897 - DNA, 1608 bp, Homo sapiens
catgcatgtgtaaacatttgttgagctgttaccccaagatttgtatactatattatatgtattttgcactttaataaaaaaattgaaggaaaaaagtaggtcttatcaccattggttatttcaatctaataatatcaacatgtcctaagataaaggcttcaaaaaccttgtgacatacttaacaccttatctaagagtctttaggctatctgaagacaaatgttaaatctcattaaacatttttaaaattttgaaatgaaagatgaattccatttttatttcaattaaattcaatactcagattcctctaacctcttaaatgcaaattaaatactttattgtggaatatgcattcatcgtggcacatttagtcaatattgaaaccaaatgtattgctgcttcaaatacatgaatgaccaccagaaaatggtttgtgctagatatagtgttgtgtccatcaggtttaagttattttccactgaggcatgatgggagatacagacttggcttaccagggggctgtttaatcttctgtgccctcaaaagggcttgtttggaaatgatttcgggcttctaaatttccatagaaagtgctggaaaaaagtttaaggcttctttttaaataccatctgaatgatttttcttcccactttggttcacataataattgcgttcttactcttaaatttcaggcagttccttttagtcttgacagtgttgcaaattccattcactccttattttctgaggaaactcctgttgttttgcagttggctcccagtgaggaagtaagtgataagggttttattcaagacattttaaaaaataagcttttattatttgaaaattatgaaatgtaattttattatgaaaatataaaactaatttatgaacaatgttgtcatacctctgggtattggaactaatctgtagaatttgagcaacttaaaattttctattcttcttacagagagtgtatatggtagggaaggcaaactcagtgtttgaagacctttcagtcaccttgcgccagctccgtaatcgcctgtttcaagaaaactctgttctcagttcactccccctcaattctctgagtaggaacaatgaagtaagtgcagttattcaatgaatacatgaatatcattaatttccgtctttttaaaaaatagagacagggtctcactctgttgtccaggctggtcttgaactcctggcctcaagcaatcctgtcttggcctcccaaagtgctgggatcacaggcttgagccactgcatctggcctcccattccttatactacttgaaattttggaaattttgctattttagaaaatgaaagattgtgcacatttactgctggggtagattcttctttagtgtaattttcttatgactctcatgaataaactgatcctttttgtgagttgagctgtggtaaataacatcacattttagcacgagggttgccacctattaattcaaacaagccagaggtcatagatctacttggtgactggtggagctgtgtggatctggtaacttggaagccattgttcactgcctctgctgatttgttgccacatttttctcattcattctggacattgca

SEQ ID NO: 136898 - DNA, 2013 bp, Homo sapiens
ctacttttgactcctgtccttcagtttctccatctgctcatgcgccctcttaaccatgtggcatgccactttcgtggtggcctcccctttttatttgctgtggatgaccagggccatcatcctttattctctgatgtggaaactattcaagggaagtgagcaaactgggccaatggtaggatgtcattgcagagtgccaggatatcctgatgctttgaaggaaaaccactggagaacttggatgctttatcatggttttgccaaaaatatagctattgagtggcagtcactgtgctagggaatggccatcacctttttgttaggaaataatgttttatatgcattttcaattgaagcaaacataccaaatggaagataattatataaattcacttatatgatcaacatttgtaatatcctgtgccttgcttggtaaatggcaaataaagatctctggtgcacatttaaaagaatgctctttttttttgggctctctgaaggttgacctgctctttctttctgaactgcaagtgctacatgatatttcaagcttggtaagtaggctgctctaattttttaattccatttattttggtttctagagaatccttgaataatagtaaaggcagttgaaaagtttgattaagtatgccctagatttatgatcccatgaaaattgaaaaattagtggcaatattgggaattttgaacacatccatgttatagtcaaattattttgcatttctgctttttagggagagacaacatatcttccaagaacacaagcctgggcgtaagaacaccctggccatagtcctaacttggctgttgatttcttgtgagacttaattcctatctatatctttgggcctaaaatagaaataatagtttggactaataatgctgtcagtcaagtcaagaagggacgaaatccgtctgaagggtatttttttggtgaatgattttttaaaaatcatccttgttactgaaatagaaattcttatctgtttgctaccttctgaagttgttttccaaactttttcaacaggtgttggttcggggagtctggaagtgtagtgcattcctgggatcaaactggtccagccatctgttctttcatacgttggcccatacctgagtttttaaaactgaggaattttgttgaaagcttttattaaatatccaaggagtcttgtactgctcctaaacatgagattcgtgttggatttatcagaaacgcttattcaaaccagtttcttttgccaccattttagactatttgcatgttgtggtacactggtatggtttagtttagcctagtttagttaggcataaaactttaactggctgtgtttgacgtctttcatcttactttatccgctacctttttttgtttgtttgttctcctaagctgtctcgtcataagcatctagccaaggatcattctcctgatttatattcactggagctggcaggtttggatgaaattgggaagcgttatggggaagactctgaacaattcagagatgcttctaagatccttgttgacgctctgcaaaaggtaaatatcaatgcgacatgagaggttggagtatgaccatttcacttttagcctcttaatagaaaaatctgctgtttcaaacactgttgattgaactcttatttgccttctttggggctcctctaattatactggccaaggatggagtagggtcaaaaatgtatattgatatatttcttcctaatgctagaaagaacagcattaggaaaagttatctcacacaaagctttacaaaattattgtggtaaaatatatataacataaaattaccactttaaccatttttaattgtacagttcagtggtattaagtgcaagtacgttcacatgttgtacaaccatcaccatcttctatttctagaactttttcttcttccccaactgaaactctgtactccttaaacactatgagataactgaagtagaacacccagcacagtaccagacagtaga

SEQ ID NO: 136899 - DNA, 1065 bp, Homo sapiens
gtttgtgattaaccagagaccacttaggaagatttcatttctctttccaacttcccttcctccaatttatatgctgacaaattcagtctcttcttaaagtaattttagtctaaacatttgaatatatgttaaagcttaacacttttctgtatagttgagcaaaatcaaaacctttaagacttgcttattgtaagatgtagtatatttcatgagccaggaggtaagtgtacattgttcttgtagctgcacaaaagctttaaaaataattttaataagtatgtatttgactcactgcataaaatgataagtaggaggtaatgcatatgttaattagccaatgtggacttaagccattccacaatgtgtacatatttcaaaacaatatgttgatgtgataaatatatatgattttaatttgttaattaaaaatgaaaaaagtacatagttgagattcccaataatgttaataactaactttcagtttgcagatgacatgtacagtctttatggtgggaatgcagtggtagagttagtcactgtcaagtcatttgacacctccctcattaggaagacaaggactatccttgaggcaaaacaagcggtgagtatattttgagatcctgctttaaaactgtaaaattaacttcttataaaaaaaaaaaaaccaagtcctatatcacctaagggtgacatgaatgagcagtcagtaaatctgaaaaacaatttcagttaaaacgtaagcttcttgttcacatacatatgtgtgctttgccagtgatgatcagttctttagggttataatcagataatgcaagaatttgaattagggataaaagtaaatctgtccaagattataattcaaatatcagtacacacaaggagatatcagaagttaatgtggcgccaggtgcagtggcgtgcatctgtaattgcagcttctcaggaggccaaggcaggaggattgctttagctcaggaggagtttgaggccagtctgaggaaacatagcaagaccctgttttgaaaacaaaaagaagtgaatgtgtgcgggagtggtgtggtgccc

SEQ ID NO: 136900 - DNA, 1053 bp, Homo sapiens
tgggggatgggaatggacaactccagataaagctggggaccccgagagagctgtgccctcagtgagagggtagactggaaatttttgcccaccagcacagggaaacagaaaggcacctgggctctgggtggtcagcacatgtgttgagagtggggatgcctcccagagaattcttttttttttttttttttttttttttttggattttttggagataggatcttactctgtcacccagactggagtgcagtggcacaatctcaactcactgcagcctccacctcccagattcaagtgattctcctgcctcagcctcctgagtagctggaatcacaggcatgcaccaccacacccggctaatttttgtacttttagtagagatggggttttaccatgttggccaggctggtcttgaactcctggcctcaagtgatttgctcacctcagcctcccaaagtgctgggattacaggtgtaagctaccatgcccggcctatgagatttctttttagggtgatagaaatgttctagaattagattgtggtgataactatgaaaccactaaaattccttgacttgtacacttaaaatgggtaggaaaaagaacatgtttatcaaaaaaaaaaaaaggaaagaaacaaagaggtcttcatgggcgtgaaatcctttaacgtttgcctcagctctgagctccccgcaggtaaatatgcatgcctgtgtacccattctctcctacatttgaaatcactctcttccattagtttaaggagacaggagtttaaggaacatttactgagtactcacaacattccaggtgctggggctgtagggacaaatagatctcggttacattttcgttctcatcctcactgccaggcaccctgcccccatttctcccacctcatttgactgccgcctcctaacttgtctgaactcatctgtctctctgcttcccagctggctcctcccaaatccatcctacacattgtcatcaaagttatcttttttcttttctttttttgagacagggtctcgccctgtcccaggccggagt

SEQ ID NO: 136901 - DNA, 3096 bp, Homo sapiens
ttcaccatgttggccaggctgctctggaactcctgacctcaggtgatctgcccgccttggcctcccgaagtgctgagattacaggcatgagccactgtgcccagccttgctgctgatattcttatacatgtctcttggtacacatatagaaattttccctagcgtatggacttactggatcacaggatatgcacaccttcaactttattaggtattgtccagttttcccaagcatttggactggtttatacttccaccatcagtgcaagtgtcgtctccacaaaggcgctccttcttgcttcctcctagtataagtagctgttatgccacttatgaagaaatgtttgttagacaaatgaatcacagtcactagactgggataatttcctattttaaaattcttccctcttgatttttctttcttttctatattgtagaagaacccagcaagtccctataaccttgcatataagtataattttgaatattccgtggttttcaacatggtactttggataatgatcgccttggccttggctgtgattatcacctcttacaatatttggaacatggatcctggatatgatagcatcatttataggatgacaaaccagaagattcgaatggattgaatgttacctgtgccagaattagaaaagggggttggaaattggctgttttgttaaaatatatcttttagtgtgctttaaagtagatagtatactttacatttataaaaaaaaatcaaattttgttctttattttgtgtgtgcctgtgatgtttttctagagtgaattatagtattgacgtgaatcccactgtggtatagattccataatatgcttgaatattatgatatagccatttaataacattgatttcattctgtttaatgaatttggaaatatgcactgaaagaaatgtaaaacatttagaatagctcgtgttatggaaaaaagtgcactgaatttattagacaaacttacgaatgcttaacttctttacacagcataggtgaaaatcatatttgggctattgtatactatgaacaatttgtaaatgtcttaatttgatgtaaataactctgaaacaagagaaaaggtttttaacttagagtagccctaaaatatggatgtgcttatataatcgcttagttttggaactgtatctgagtaacagaggacagctgttttttaaccctcttctgcaagtttgttgacctacatgggctaatatggatactaaaaatactacattgatctaagaagaaactagccttgtggagtatatagatgcttttcattatacacacaaaaatccctgagggacattttgaggcatgaatataaaacatttttatttcagtaacttttccccctgtgtaagttactatggtttgtggtacaacttcattctatagaatattaagtggaagtgggtgaattctactttttatgttggagtggaccaatgtctatcaagagtgacaaataaagttaatgatgattccaaatttgtgtcattgcagtactaaatctattttatattgtaaaaacctaacaaaacaggcttttctttcatcaggattggctgttttgttgtacagataatttcatggtgtttcttttacacttgtttattctcgctgcctcctgagatttagtactaatgtaaggaaggcattttaattaccattcttgttactgaatttatataggatatatgagaaatgcatactttatgtaggaaagggttacatttttctatagcttttttttttttaaattaaaaacattttagagaccagtcttgctaggttgccaggctgaactcctggcctccagtgatcctcctacctcagcctccccagtagctgggattacaggtgtgcaccactgcacccggccctgtagcatttttaaagatgaataagcaactaattggttagaatatgaaggactgtctcaggtaaaggtttaaggtaacaatttgttttctttttcaaaaaacaggatctttaacttcattattatatagcaagattattttagtatgagcattgtagccctgaccctgggatccttccttgtatttagtattagctgtttctgcatcttctttgcaaagatcatcaaattatttatacatagcattgagtttggcaggtttgagaaggtagggtttatttagttgtcaattactgcaagatgcccttgacaattacagtttcaaacccccatagagtgaaggaaatgttggttttctttttgcctctcattgaagtataaataatagggaaactgatactcagcttcacagggaagaaaaactacattgttctaaaatcactcttccatccctacttcctgccagagtgatgggggtgagggttttcagctgtttatcaccaaaacagttcccactctgaccccatggaacgcaacactgcctaagtgtagggagcaggaacctatcatgcgtcagggtggttagaatccatttgtctttcacaactttcttatataaacattgccggagaagttagattgttatgattaaatatgaaataaaccaatgcctttttaatttaaaactgatgagactttaagttctaggggaagaaaaaaaaattaattacatgacagcactaatccatatagggtaaatggcatcagcatccttctatctatgttaggcagagagcaattcattaaaataaatgttctgccaagattattatacctgttgctgatgatttgctcttaaattaagtctaatttgctcaggaacataaatcacagtgtcgatttgtgtgagaggcagaaaaggcagactcatggcagacgattccactgacaaagagaaaacccaatcactttacatctcattggtggactattctaggtttataaaatatctgagattctgcatatgtagatattgcttatggcctaattctattaggaataatatagaattgatttttattttctttggttatgtgtttttttgaaggaataatctgaatccattttcattgataccaagtaatatggaaactgtaaacttactttttttttttttttgagactgta

SEQ ID NO: 136902 - DNA, 2262 bp, Homo sapiens
ttcgcctttccccgcatctacttgtttccaaggccagtggtacttaactgggtcaagttgcctgtggaccttcaggaacagaattgccatgttcctcactgcctgcaggaaaggctccattccaagcccagtgaagatgtgtgcctatccagccgcccaccaaggatgtcatctgtagaatgggtggagggcaggggtttatttggtgtatatttttacattaaaatgcacttaatatcactttgtaaagcccagatgagtgcaaatgtgcctgtaacttcctcctttaatctgtccaggtagtatttagtctttagtcttacattttctttctccctttatttcatgaaattccttgagaaaacttcaacagtaaagaaagaaatttcattcatctcacaactcttccaaacgaggaaacttagtgaaatatttcagagcttctagatgtgaggtacaaaacttgggatcaaatggaatcttgattcactaaccaatttaagatctgacttctaattttaggaactttgggttatgaacgcttccattttatacctgtgtctagttagtttctgcctatctatccaagaagcttttatcaagggtccaccatgtgccagccactgaagtagatataaatacaaggatgtgtaaggtatggatgatggtatacgaactgtcatcttactggatttgtccgctctgttaaagatacggttccgaaaactttttaaagccctagagagggctttaaggcaatgtagcatcatatatagaggcatcaacctgttcatatctttctatttaacagaactgtgcacctgggcacaagggtgtgcacaacaggatgtgtacagcagcactgttaaagtgtagcacatccatactacaggatcttatgcaactgttggaaagaatgaagcgatgctgcactgtggtcatgcagtgatctctaagacatattaactagaaagcaaaaggtttaacaatgtatagcagctgggcgcagtgactcgcgcctgtaatcccagcactttgggaggctgagtagggcggatcacctgaggtcaggagtttgagaccaacctggccaatgtggcgaaacgctgtctctactaaaactacaaaaattagctgggcgtggtggcgcgtgcctgtaatcccagctactcggcaggctgaggcaggagaatcgcttgaactggggaggtggaggttgcagtgagccgagatcacaccactgcattccagcctgggtgacagagggagactccgtctctaaaaaacaaccccccccccccaaaaaaaaaaatgcatagcaagctgtaatgctctttgtgttttagaatagtagaggtctggaaagttgtttgcttttccccagtttttttttgctgtgttacctctgaagggaattgaggtagaggggagagttagaaggaatattcggcttttctattttatatcctcctaggtgaaatttttacaacaaacatgtactggtgtattttgaaatgtttttaaatttttgtatttcaaaataataaaatataaattcaaactgcaagctggctgtgtcgcatttcctggactatgttgtagcctccattcctccattttgtagctccacctccagggtcacctgcaaattgtcagggtcgtgggaagaagcccagcaagtggatcactttctacatagggctgtctgtttcatcgtgaagaggcttgtcttcgtccagcaatatgatttgttctcagcctctccctgggacacaatatgtggctcatagttttgaaagaattagaggaaaaaaatggtattagcattatagttgcaaagataaagcagttctttggatttagcctattcttcaccagggagctcagagtacctaaggaggaagacattacatattcaactcagagtaaaacacctgattctgggaaatgactaaagtgtgttggtgacaaaaactggaaaactagctctgccaattcagaaaatgttactggttttataaagttgtggagatctgtagacagtttaaattgccaaggttaggattacgtttgagagtttgggaagattatgaaatgattgttaccctaatgatttaaaaagttcatttttattaaagtatgaattacttacttggctttaaacactaatatcctagacaacaaagggtctaagtgaacccagctaacttagttgggtgggcatattatgaattagatgctgtaagtggagcattgcattat

SEQ ID NO: 136903 - DNA, 1086 bp, Homo sapiens
acattgcatggtttcctcttgcagctctcaaatcgactggaagtggtgaaggaatttctgagaaacaatgaggatcttagaaatggccttacagaagatatgcagaagctagacagcctctgtctacatcaaaaactggattcacaggaacctgggagacaaacacctgacaggaaggcctgaggtgagttcaggcagatgatggtgttaaagaaggacagaatcacctcatctctttcatgtctattctctcatgtgaggccatcatgaacacacaacaatctaatctgaagtttgcctttgtccttattgtttcaaagaaaggacactgaggtttgtgttcttcacttaatgattcttacgtctgtgaagtaattcagcatcaactccctgtttagccaaatacacctgaagtcattggtctagaattaaatgaatcagctttataacataatcaaaaagcatttctgccttaaaatgacaccattgatgcctagctcttaccatggcattaatagcaattgactagtcaatttccataaggagaacttcttaaaatgagtaactgtcttcagcattttactttttcccccctcaaataaaaaaaataaataaaacattctctttcattttaggttgcccgtcaacaaaaatcaggcatgttctgtgaaagtcagcatggcttccatctcagacatccttttctgtgcaaaaggaaaaagttaccagagtattgtacccaaacaaaaaggaatttttgttgttttgtcctggactttcctctaactctttggaactattttaatatttataaacttggggttgtataatctattgcaataaaaaatattagatactctatgccaaaacttgctaccaggccaggtgtgatggctcacacctgtaatccccagcactttgggaggccaaggcgggcggatcacctgaggtcaggagttcgagaccagcctggccaacatggcgaaaccccatctctacttaaaaaaaaatacaaatattagccgggcgtggtggcatgtgcctgtaatcccagctactcgggaggctgaggcaggagaatcgctt

SEQ ID NO: 136904 - DNA, 1012 bp, Homo sapiens
agaagatctgggaacacagggctcatgtaactcccatggcaacaagccacgtgttaagtagaggctgccccttgagatagggcctctgctccccagtttgccctgaaccagtcttttagtagggagatgactccttaccattacacatggccagcttccctcaggctacctgcctgacctttgaaggcaaaaggagaccttcacttcttggtgtctgccctctagacaggatgaaactaaatgtggatccaacttgcggggctggagggctgaagtgtcctccactctgatacaggtacatgccagattatgcccatgatcccaagaaagttccagtccttctcatctgaagactgctcttgttgattttataattaacaaagcctctctatgattttttctttggagtgaaagatctcagtttaccccattgtttgattttgaagccttttatctttttgtctttctgcaggtaattaaatgtcgtaatgagatcatgcactcttcagagatgaaagtatcttctacgtggcttcgagattttcagatgaagatccaaaattttctgaatgaattcaagaacatcccagagattgtggcagtatactccagaatagaacaggtaaaaatcatgtttaatagttctggcatacagaatgaagagagagaaaacaacaacagccacacatttagaatttgaagtttattagatttaacctaagtgttagaatgtaagcaggggaaagaatgccaatatgaaatctgtaattatgctgggctgagaagcttttctgtggtcacagtgcactattaatatggatccagttcattgtgtttaattataaattatttgagtaattcagtggaatgccttcttcatgaaatcagttcatatatttgtgtggcaatccctcagctgttgacgtctgactgggctgttcacatccccgaggaagatcagcgagatgggtgtgaatgtgaaatgggaacttacctgagtgagagccaagtc

SEQ ID NO: 136905 - DNA, 1031 bp, Homo sapiens
tttttttgagacagagtctcactctgttgcccaggctagagagtagtggagcaatcttggctcactgcaacctccgcctcctgggttcaagtgattctcctgccttagcttcccaagtagctgggattacaggcgcgtgccaccacgcctggctggtttttgtatttttagtagagatggggtttcaccatgttggccaggctggtcttgaactcctgacctcaggtgatctgcccgccttggcctcccaaagtgctgggattataggtgtgcgcccggcccaaaatagacttctttcagagggtcggcctgtctgtggctattaaggcacagaaagatagtgatgatactggctattgtacctgttgacgggccagccagggtttacaaaattctgaattatgtggggctcaggtgtatgatttcaccaccatcaggagcatagccctgactctcctgggcatacatgagcacttaccccagccttttcagaatgctttcatgagcagccctgtaggaggcattgtagttgcttgcctattgatatgtgttttcaatggaacaggtctcttaaataaaagaggttttttttgttgttttttgttttcgtttttgttttgaaacagggtcttgatctgttatccagactggagtgcagtggtgaatcagagcttattgcaaccttgaactcctgggctcaagcaatcctcctgcctcagcctcttgagtacctgggactatagcacacaccacaatgcatggctaatttttttttttaatagagatgggagtcttgctttgttgcccaggctgggctcaaacgatcctcctgcttttgcctcccgaagtgctgggattacaggaatgagccactgtacccagcctatttagagttcttattgcgagtaactttttgttctagtcccttggcaggagtgtacccttgtgattcttagcctagtaaagttgttgcatcccagtataagttgagaaatatttcaggaaagaaatacgcccaagctttcccataa

SEQ ID NO: 136906 - DNA, 1002 bp, Homo sapiens
actgctaagaaggggcagtttgagtctgagctagtgctcctaaacactggacatttttgctgtgaaccacagtcgggaaggtttaatgtttagactctttcctcagaggcttttaactacacacaattttgacatgttttccaagctcagaaagctcattaaaaacaactaaaactgacctgacttgtcacttggagttgacaatcccagtgccttctgacctttgtggcacttctttggaacttaaatcagacttccatgtgcaaggagcactaattatcatataatcaagaatactagataattatcgtctaacctttgctaggtgcttcaggatgcccttatctggctcaggtgtgcagccttctagaatccaagtgatgtgttgccctaaacaggcaaacgcccccttctgggtggtccagtggcgggggattttgagttttgggttagcttggcacaccgcaggcagccagcggtcacgtttcactaatacctcaatttgctacagctggtctgtgggcttaggaaccagtaactctagaattgtataatgcaaagaacatacacgattcaagcaatgtgccctgagcaccttgtacatctggacaataaaaaaaagttaaaacagaagtgccctacattaggagagggagtcgaatcggatgctgacagggtctctgtttgggggacgaagagggcctaagggtttcaaatagttaactgcttccccaagcaccaaagttgttagacgtcagacgtcagacgtcacccaagtggggtggagccgacgtgccccggaagtcaagatgccccgccccgggatcggtggcaccgcgccgcgcaggcgcaggcgtcgctgccgccggcgcaggcgccgctgcctcgggtacttcccaggctccgcgcctgcgcactgccgtccgccacgccccgcaacctcctggttccaagtgggagacatggtgctgtcggagctagcggcgcgcctcaactgcgccg

SEQ ID NO: 136907 - DNA, 1048 bp, Homo sapiens
ctcagggcacattgcttgaatcgtgtatgttctttgcattatacaattctagagttactggttcctaagcccacagaccagctgtagcaaattgaggtattagtgaaacgtgaccgctggctgcctgcggtgtgccaagctaacccaaaactcaaaatcccccgccactggaccacccagaagggggcgtttgcctgtttagggcaacacatcacttggattctagaaggctgcacacctgagccagataagggcatcctgaagcacctagcaaaggttagacgataattatctagtattcttgattatatgataattagtgctccttgcacatggaagtctgatttaagttccaaagaagtgccacaaaggtcagaaggcactgggattgtcaactccaagtgacaagtcaggtcagttttagttgtttttaatgagctttctgagcttggaaaacatgtcaaaattgtgtgtagttaaaagcctctgaggaaagagtctaaacattaaaccttcccgactgtggttcacagcaaaaatgtccagtgtttaggagcactagctcagactcaaactgccccttcttagcagtttgatcttaagcaaccttaatttgatctcaggcaaattacatttctctgggcctccatttactcatttttaagaagaggatatcaataacctaccacattgggttgttgtgaggattaaatacacattgaaatattaagaaaatgcctagcacacagtaagctctcagtaaatacttgctattattttatattgacctaaatatgccctttcatcaatcagttatattcttgggcaaggtattttaacaaatcactggccacttggaagtggaggcaacttgcagaaaattgtgagcataccatggagttcctggagttgtgcagcacagtgctggctggcctctgctaactttgtcttaataacctcaatgctaaatccatcctaagtaaatttaaatcacatccttagacacactgtccattctcaaaccgaatgaaaaaaaaattccacaaga

SEQ ID NO: 136908 - DNA, 4431 bp, Homo sapiens
tcacttaacacgtaactcctggcagtgctaaatttggggttgcaaaatacaaagctcagcaaagagaacttttcttccattttgctcatttctaatattaaggaaatttaaaatttgcttatttctaatattaaggaagttctctgtatctctctctgtttagaatagttaaataacaattatgtttttaaatgagggaaagttgttctctgaaacatttttaggtactacagtgtccaaagttttctagaactaggaatcaggagagaaatgatatatttagctatttgtttccccacattggatatgcaggcgagttctcactttaatgtataaggaatacactgggcagtagagaagggtgtgcttcttttgttgtaatacttcttctacttcttacaattttctgctttcatcctttgacttctctcttctttcagctaaaaataggtcctcaagaatcaaagtttaaagctatcagaattctcaaagtaacagtccagtagaaccttgataataaacaccattccttcacaagcagatggctgtcattatcttatgtgtttttatgtattatgtcttgtggaatttaaaattaaaaggaaaatgttttgatcctattgggatcaagcaagttttcttgcctatcaataatgaaaatgtgttttttaaaaaacaatacttctccttttcagaaattgttgagatattttggaagtgttttcatttttttccccccttggactgggcagacctttggatttcctttttctttctgtaccttctcatgtgcacaggatcactgcacatcctgccctttgctgaaaggccatggttcacatgaggtcttcagttctcccactttcagccactgtatacagtgttagaccatgctgtagaggaagggatccagcttttggtttataatatttaaatacttgtaataattacaagaagcagagtatttggtttctttgagcaaaggagaagttgacaggatgaatcgccagcaccctccccacccacaaatcctgtttttggattgttggtgtaccatacttcagtctcccaccccacctcccacacccatcacttctcttctgatgaagtgcttttaagaaaatcatttttgtatttaattgattttaatgttgaactctggaagttgaccatttccttgaattttgggagaaaactccaatagatgtcagagacatgcactgtccagtataactgccactagccagcatgtggctatttaaatttaagttaatgaaaattaaataaaactttaaattcagttcctcagtcacactagctatattacaagtgcttaatagccatggcacacttatacaacatttccatcatcacaaaaagttctattggacagcgctgtcctaaacatttttatctggcctttaatgcaacgtttgaaagataccaccaaagttgtaactaatgcataaatataaactagatgtttttatgatatccaaaatgcccttataagcactcagtagccttaaagcccaacttcaaaggcttatctaatgctacagtgtttctaaacagaaactctagacatatcttcctaaatacaaacctaactgggacttgcttgaagtttcctcctgagaaaaaaaatccaaaccaaatataatctgatacttaacaccacagcttaatccccaataatctgggcagttaaaattgtcttttattttgatctttaaagttctcactaattttagatttaattaccccttcccttaccggtgtgttaacatctttcctgtgttgtgaatagctaatgaccatttttctctgttgcaggtgaatgcacaatatttgcagctgttcgtgatttaatggctaatcttacactgccccctggtgggcgtccatagacactattgtttttaaaccaggaaggctgacagatgagacaacaaaaaaaatctgaattcagccttcagtttaaaaaaggaaaaggactttttttttaaactttaagagctaaatattctaaactggcaaaaattttcagggtgcacttctttcatcaaaatgatcatccatcttttgtataatgaacttgtatagtgtgtttaaatgggacacatttcaaaggaaataaatcagtgtccgtttgccagtaataaatttaatattctgttttatactataaagttatgaaaatgccaaacttgtttatttaattgttttcttatgttttgggtgtaatagtccttttttggtttttgttttgttttttaaggcaggtctgtcatttttgaatactgtaaaactgtgataaactttatattgaagctgtattttaatatgaccgctttgaatccttacatgaaatgttctgggagttgttataaacacaccccaaggaagcaatatttaataaaactaggtcaaaaacaaaacaaaacagtgacactcacttgtgtgtatataaactctagagacatcttaggccctcccttcatctttaacctggtggatggagccagttattaatttataataatacatgtctgaaatttgaccaaaaacatcttctttatgtcaaggttaatatattttcttcagacattcctaacttgactagtggttaacatttagcaccttggttgtctttcaatatataggatttgggtgaaaaataaggaacttagtctttgagaagggacagtatgtggttcgtattgatcaaggatcccaaataatgcaatcattctcatctgttgaggatgtgggaacttttctgtcaggaaaatttagtttacagaatacttctgcatacaacattaattaggaaacaaagaactttaatgctgtacctctgcatgaagtttctgtgagctttctttatcttgcttaacttatcctcctttccttccccaccaaaattgggattgttctaaacaatttcaatttaattcattgtcaacaaaacgatagaatgttttgcttggaagaaacctggtccattcccctcattgtgaagaatcccgaatcctgggcctgtccagggtcaaatggagtttttggtattaatacatctctgcagggtttctttttggagcactgtgctgtctttcctagtcagtcagggacttttttaagcttcaaagaacatggtctgatgcaaaggtcttctaccgacttcatggtatttaggaaaaatttttaagtgataataccatgccgagttacctggtcactgtaatactggttctccattaaaatgtagatgctttgtctaattccacttcaagatgatttaattgagcttctataactatcaactatcaaattctagtttcaagtatctcactgtacctatatcatatctgttctcaactttgtttgattctccactcattttcaatcagagttgaagccttctttgcctttcttctttgtcttatttctgccttcatctcccacttctcacccaactctgccactgttcaggagcagttgactaaacttttatccttcctttaacttaatctttttatccttctgtttttagttcttacagtggtaatcacatcagtttggcaatctaagatgtctttatcaagggtcagcccttttctatttggagctgaatcttttctttcatgtagaaatctacatgtatatacaagaaatgtatttttatctgcaggataatattgtttcaaataattttattaagagttaactttttaggtattttcccttttaatgtggttttgaaatgttaattgcatttttacacatgatgcattcagtggacactcttttttcctaattataactcatctctgaatgcattgtgccaatcaagagtaagataggattcagtgcgcaaaatttgcttttgatgcttattaagagtaaacccatgaatttgaatttttatattatgcttggtacttggaattgatatataccttattaaagcttgaaaacatttagcatttgaatagtaagtttcatcacaaatcatgtcttttgcctcttttgttacccaggttcgatcaaggggactggatgcccaagtgattttctctaataatcgggttgggacttaactttaaggtgttttcaatgtgattttagtatttacagtaataaataaaatttatacaaagtttcagagaactaccaactctctagttaattttgatgaagatgttttcattaatagtctggtttagtattaatttaaccttgaaataagaaattggtcctgatttgccaccttcatttttccatctgctgaaatgccatttcagaatgtataaaagtactttcagaattagaagaaaagtgagagcttcagcagaacgtgtcaagtcgctaataacaggagtcgaaccttatgtttgaaaattaactgagtgagttaagtgcaagcat

SEQ ID NO: 136909 - DNA, 1027 bp, Homo sapiens
tttactcttaataagcatcaaaagcaaattttgcgcactgaatcctatcttactcttgattggcacaatgcattcagagatgagttataattaggaaaaaagagtgtccactgaatgcatcatgtgtaaaaatgcaattaacatttcaaaaccacattaaaagggaaaatacctaaaaagttaactcttaataaaattatttgaaacaatattatcctgcagataaaaatacatttcttgtatatacatgtagatttctacatgaaagaaaagattcagctccaaatagaaaagggctgacccttgataaagacatcttagattgccaaactgatgtgattaccactgtaagaactaaaaacagaaggataaaaagattaagttaaaggaaggataaaagtttagtcaactgctcctgaacagtggcagagttgggtgagaagtgggagatgaaggcagaaataagacaaagaagaaaggcaaagaaggcttcaactctgattgaaaatgagtggagaatcaaacaaagttgagaacagatatgatataggtacagtgagatacttgaaactagaatttgatagttgatagttatagaagctcaattaaatcatcttgaagtggaattagacaaagcatctacattttaatggagaaccagtattacagtgaccaggtaactcggcatggtattatcacttaaaaatttttcctaaataccatgaagtcggtagaagacctttgcatcagaccatgttctttgaagcttaaaaaagtccctgactgactaggaaagacagcacagtgctccaaaaagaaaccctgcagagatgtattaataccaaaaactccatttgaccctggacaggcccaggattcgggattcttcacaatgaggggaatggaccaggtttcttccaagcaaaacattctatcgttttgttgacaatgaattaaattgaaattgtttagaacaatcccaattttggtggggaaggaaaggaggataagttaagcaagataaaga

SEQ ID NO: 136910 - DNA, 1117 bp, Homo sapiens
gcgccgccgattgcacctcctgggacgcctgctgtggtgctgaaatccaaaatgctattttttgtaagtaccacccagcatgtgtgcatgtacagagcttctgagggaaatgccacatgataatagagcaacttttggataactgcataaattatctcttgttgccaaatagaggccaggattccttaattgtcagcgtagatgtcatgacatcctggttcctttagtaataaaacagaaatttattgaaccaggtaattgtgtagcacagttgcatcttaaccataatattcagttgtttgtcacttttcttgtcatgtgtaattttcttttgcttgcttatcttaatctgaaagtacagtaaatgatagtacctttgatacatttagacagatgttttatgatgtttttattctctttgtgtgtgttgtgtgtatacagcttcaactaactcagaaaacatcggtccctccccaagaacctgttagtattatagttccaatcatttatgacatggcttcaggtacaacccagcaggcagacattcccagacagcagaactcttctgttgctgctcccatgatggtcagcaacattctgaagaggtttgcagagatgaatccaccacgacaaggtacatgaccagtagacaatattttattgcatatatgttataaaagttcttttgagagacacccctttctcctcttctcttctccctccttacctactctaccacccaatcatagcaatagaggtctggttgccgtggccctcttaatgtctgcctgtcgctttcttcctttctcactggttcttcatttttgtccatttctctgctgcctggactttttgttagtgatttactattgggactgacccagttgctaatgccagaagcttgtatttatagcacacattgccacaaagacctaggttaggatgatagaattttccacggctgtgaattcctgccctaccatcaatacctgccactctgtacatcacaaagttgaaatgcatgttggtttctcatatttcatggttcaatcacgaatagaagaatattattaaaagttctgtatcttctaaatgttttgtgaagaataaaagctga

SEQ ID NO: 136911 - DNA, 1054 bp, Homo sapiens
caggttcttggggagggaccgatgttttctgagttagttgaagctgtatacacacaacacacacaaagagaataaaaacatcataaaacatctgtctaaatgtatcaaaggtactatcatttactgtactttcagattaagataagcaagcaaaagaaaattacacatgacaagaaaagtgacaaacaactgaatattatggttaagatgcaactgtgctacacaattacctggttcaataaatttctgttttattactaaaggaaccaggatgtcatgacatctacgctgacaattaaggaatcctggcctctatttggcaacaagagataatttatgcagttatccaaaagttgctctattatcatgtggcatttccctcagaagctctgtacatgcacacatgctgggtggtacttacaaaaaatagcattttggatttcagcaccacagcaggcgtcccaggaggtgcaatcggcggcgcgctgggagggatcgtcaggcaaaactgaacattccattttagctgtgttgcttggtcagggaactattttgagggggaaaaatcaagataaaggcatataaacatttaaaatcatattctaggtaggaaagtctgagaggttagaattttgtttcatacccaattattaacagaacataaagttaataactgcactttttcaaaacaaatacatacatgaagttgctaactgaaaagtcaactgtggacttatgtaagattttccccttccttccctcccacttcgttaattcctaaggcctatggattcggcttctgcagggtctctgacatctgttccctcctctctatattcattgaggccaccatgtgcagggctttattacttctcctgtgctcccctaacagctctttccagtggctgcctcttccagtccatcctcataccaccatcagatataggtcctacaacatggttccagtcaagctcacaaatgttcagtgacatttagtgacacatgctatccccctaccacccacaactgaggaccaacacctagcattcaaggc

SEQ ID NO: 136912 - DNA, 1028 bp, Homo sapiens
gtcagtcctctggatcaaactactgcatgaattcaggctcaagtttttttatgttgttttgcaagaatacttcataggtagagttatgttcttccatcaagaggcacataatgtctgatcgcatctctttttgcagtgttgccagcagctgatgctcaatgctgtaggtgcctttgttttggaataggtatcaacttagtggttttccttttggaacaattctcagtaacatcttcattttctctttgacttacatgttaatttgatgtgtccttgttttgtagctgcagctgataaattctaatgaacccggagtgatcatgtttaagactgatgcactgaaatgcagagtagctcttagtcccaaaaccaaccaaacgcttcagctaaaagtgacacctgaaaatgcaggacagtggaaacctgatgaacttcaagttttggagaaattctttgaaacaagagtatgtgtttaatagtgcataatttgaatataattaatgaaacagaagcattaatgtagaatgaagagtaacttgctttatttatccctgtaggttgcaggaccaccatttaaagctaatacgttaatagccttcaccaagctattaggagctcctacacacatcctcagggattgtgtgcacattatgaagctggagctggtaagtcacagagatatacatttctagcaaggtttgtttgaggaggttagagttggtgggagcagtgtttattggttttcacccatctatgtagtttcttctatttttctcttaaattcttaatttttaacttaaattttatttatctttgaataggtaacacaattctgttttatcttttgaatttaaaacaagataatatagtgagaaatttcccatcagttcctgtctagctatccctgtcccctctatccctgtccaactgtcttctggccaaccagagttaccatggcttgcctctccttccagagatggtccattcataaaagcaaataacattgctctcataaacttttgattgat

SEQ ID NO: 136913 - DNA, 1064 bp, Homo sapiens
gttgaaggtatctggaggatgaaatttatttattttttatttttgaatatcttcgtagataccaatggagggtgaaatttaaatatcaaattgttcaggaagtcactgctttcaaaacttgagtcttggttcatttcttagtcaacgtagtctaaataaagaatatggaaaatttccttctcctcattctacttagagtagaatgaaaatatggtttgtcaaagttggtttaaaaatataatatttctgcctttaaaggaactctgagattgtttgcttaatattttaatgcatatagtagcatacattgttacatattacatacattgaagcttgtgtgaaggtaaattttatcctctctcaagctttatatttttctaatttttgtatcatgttaaaaagtaccttacacaaaatagagattcaggcatgacatgttaacacacatcaagcttcagtgaaacatcttattggaagaaaaaataaaattattactgtgtaaagatttgaatgctgtcaaataattttcagttattaaaatataggttttgagaatcatttgtttaccttttttataggaactcttgaccctagttccccatacactatggtgtcaccaagtggacgagcagggaactggccaggatctcctcaagtgtctggcccctcaccagcagcacgcatgcctggaatgtcaccagccaacccctcactacattctccggttccagatgcttctcattcccctcgagctggaacaagtaagtatcatcaacatttttatgttcttttttagtataacccaaagtgacctatcttgttgcatcctcacatttgaaagtcatgacctactttttgagagaggatacttaaaggatattacaaaggatgcagatgaagagatgcataaggggagtgcagtttccatgccctctgtgagccttcacatgtttgcctatctggaagttctccaaactctgtccttttgggtttttatggaagtttcatcacgtaggcattattgattaaatcactggccactggtgatcaactttgggggtggg

SEQ ID NO: 136914 - DNA, 1368 bp, Homo sapiens
tcacatagtacagtcccccctcttattgctctccaaggttttagttggcctgaggtcaactgaggaccaaaaatgggcaagtatagtacaataagatatttagagacagagagataccatattcacataacttttattacaatctactgctaagagtgttctattttactgttaatgttaattttttactgtgcttaatttgtgaattaaactttatcatatatgtgtataggaaaaaaacaggtttcaatactatctgaggtttcaggcatccactgggggtcttggaacctatcccctgtggataaggcggggactgctatagtagagaatttgaaacatgctgatattaaaggtaattatgataatgtagcaagtgcttaaatgttgcatttattcatagttttggtagccatagttcacactttcataatcctaaattaaaactagtcctgtgcctttaaataagttaacgtttcactgttttttatatctccaatctcagtctctccataagtctagtattgtattttcttttttctttgattttttttttttttttttttttggagacagagtcttgctctgtcgtacaggctggagtgccatggcgtgatctcagcttgctgcaacctccgccttctgggttcaagtgattctcctgcctcagcctcctgagtagctgggattacaggcacatgccactgtgcctggctaatgtttgtatttttagtagagacggggttttgccatgttggccaggctagtctcaaactcctgacctcaggtgaaccgcccacttcgccctcccaaagtgctgggattacaggcgtgagccaccacacccagccttagtattgtattttctagctgtctattcggcatcatttccatgtaatgtctggtagatatctgcaactcagcatggccaaaactaaactctggatctcttcactgccccagtgctcctcttcccacagacaccccagctcagtaaatggcaggcccttccttcctgctacttgggccgaagctcttcgagtcatgctggacgtctctttcatacccatgttcggtcatttaccaaatactatcagcttgattttcagaatttacccagaatccaaccacttttcactaccatagtctgtcacctttaccaagccactagtcctctctcacctgaattattgcagttgtttctaactggttttcctgtccctacccctacccttgctctatagtctgtcccacagcagctagaatgatccttctgggacagaagttcgtccatgatttccgctccaaactctgcattggattcccactcattcagggtaaaccctaagttcttagagtggcccacaa

SEQ ID NO: 136915 - DNA, 1019 bp, Homo sapiens
ctacaatgagataacactccacacccacaaaaatggttttaagaaaaaaattgataattatttccaacatttgatattaggaacaactgaaactctcgtttgccactagaaaatatgtaaaatgttacaactaccttgtgatagtgataaagatgagtaaaggtcaggctgagctaccatatttcattgatactaaatgccaccaaatgtaagatgcatcagtttttatctaccgctcagaaagaaaaaacactgccagttaaactaacatcccataaatggaaagacacaccctgattttagagatattaaagtgtggggggaaaatgtcttagaatcaatgaaatggtagataaataatagagataaatcggttatatgctagatagaaaatgagcaaaaaacatcttgagggatagaaagcattgcaagatcgggaaagaggatgttgctattttaaaacatttcgaaagtcggggtttataaagacttgtgctggtgatgtgtatttattttgcacacttttatatctcatgtttcctatttggtaaccagcaaagtgtgtaaatattaacactgtagctataattagtgaaagccacactcttatgctccgtgcggttggccattttaccaacatttaattttcttcttttcagccatttccaaagcagccaggaacatcaggtgcttatcctcttacttcaccccctacatcttatcatagcacagtcaatcagtctccctcaatgatgcacacacagtctccaggtaagatattacttattctcttgtcatgttcaactttcaaatccaaaatacacacacacaccccacattgagaagcactgtgcatctagtctcaggcttcagagagaattccctttctagtctatggctagatagttgtcactcatttattatggaaggtttgtgaaatctgtgtccaggcttgggagcactttaaaaggtttaaattaatgtcacccagagccagactcacagcacaactccagggg

SEQ ID NO: 136916 - DNA, 1031 bp, Homo sapiens
atctgggagggtctaagtgtctcttagactttcacttagtccttctgttattagtcccacttttatccccacttccaaaggtacccatattagtctgttttcacattgctgtaaagatactacccaagactgggtaatttataaaggaaagaggtttaattgactcacagttccacgagcttaacagaaagaacggctaggaggcctcaggaaatttacaatcgtggtggaaggtaaaggggaagcaagcacgccttacatggctgcaggggagaagcgtgagagcaggggaaactgctacttataaaaccatcagatctggtgagaactcactatcacaacagcatggggggaactgtccccataatccaatcaatcggtccctctctcaacacggggattacaattcgattacaattcaagatgagattcgggtggggacacagagccaaaccatatcagtgcctgatactgccagttccaaagtatctcagggatctggatggaaatagcttgcttcttggcttttcccacagcttacttaggatacaactttctcacattggatggttctagttgctactcagccatctgctttgcagcctcccggatgtattgctgtttcttctcttctcctattctttttgtctttgttacttattgcttcaaaaaattctttccagtagtttagtggggaaagaatgcaatgtgtgttgtgagcccatcatctttaattaaaagtagactgtagacttcttttttgagacagggtctcactctgtcgcccaggctggagcgcagtggtgggatcacggctcactgcagcctcaacttcccgggctcaagcagtcctcccatcttagcctccctagtagctggatccacaggtgtgcaccaccatgcctggctgatttttctattttttgtagagatgaggttttgccattattgcccaggttggtctcgcaagggatcctcccatcttggcctcccaaagtgctgcgattataggcatgagccaccatgctcag

SEQ ID NO: 136917 - DNA, 1026 bp, Homo sapiens
catttagtgtctcaggcaaaactcttcaaaagatcatggggacttgtctttaatgactaaggctgataattttgtcttttatatcttgaacacttctttgagaattttctttgattcagtgtggacccagtgatctagtttgcattctcttcaaggggaagttttatggaatgtgccagaaggacgttgtttcatttttgacagttatacactgaaaattctgaggttttaacatttgtacagaaactggctgctctcactgtgtttgttccttataggtactgtttgatactcaggctccattaaatgccatcaacaaactccccactgtgccgatgttgggcttgacccagagaaccaatactgcctaccagtgcttctccattctgccacagtcgtccacccacatcagactggccttcaggaacatgtattgcattgatatatactgccggagtcgaggtgttgtggcaatacgggatggtgcctatagtctttttgataacagcaaactagttgaaggtttctatcctgcaccaggactaaaggtaacagactttagtgttataacatgagtaaacataaaaattatctctaaaatagtttctttgagggggaaataatggggaaaagcaacaaattcctgtttaaatttagtaagtagcagtgttaactcatcatctgtataacgtcattctgaaggagctagaagttctgataaagtgttgtgcttatgtgtatgagatgattaaaagtatttttctttatattcttaccttctgatcagtagggtgaagatactaaaaacaatttgtgtttggtctttggaactttaaaagtagtttttatcattgatttttgaaaaggtttggtcatcaattctactgtgatgcttatttatttatgagacagagtctcactctgtcacccaggctggagtgcagcggcacaatcttggctcactgcaacttcagccatgtgggttcaagtgcctctcctgcctcagcctccccagtagctgagatt

SEQ ID NO: 136918 - DNA, 1009 bp, Homo sapiens
caaagaccaaacacaaattgtttttagtatcttcaccctactgatcagaaggtaagaatataaagaaaaatacttttaatcatctcatacacataagcacaacactttatcagaacttctagctccttcagaatgacgttatacagatgatgagttaacactgctacttactaaatttaaacaggaatttgttgcttttccccattatttccccctcaaagaaactattttagagataatttttatgtttactcatgttataacactaaagtctgttacctttagtcctggtgcaggatagaaaccttcaactagtttgctgttatcaaaaagactataggcaccatcccgtattgccacaacacctcgactccggcagtatatatcaatgcaatacatgttcctgaaggccagtctgatgtgggtggacgactgtggcagaatggagaagcactggtaggcagtattggttctctgggtcaagcccaacatcggcacagtggggagtttgttgatggcatttaatggagcctgagtatcaaacagtacctataaggaacaaacacagtgagagcagccagtttctgtacaaatgttaaaacctcagaattttcagtgtataactgtcaaaaatgaaacaacgtccttctggcacattccataaaacttccccttgaagagaatgcaaactagatcactgggtccacactgaatcaaagaaaattctcaaagaagtgttcaagatataaaagacaaaattatcagccttagtcattaaagacaagtccccatgatcttttgaagagttttgcctgagacactaaatgctgttttttgtttgtttgttttttgagacagggtctcattccgacacccaggctggagtacagtggcacaatcaccgctcactgcagccttgacctccccaggctcaggtgatcctcccacttcagcctcccaagtagctgggactacaggcgtgcatcgccacaactgactaatttttgta

SEQ ID NO: 136919 - DNA, 1404 bp, Homo sapiens
taaagtcccatagctagtgagtggcagagttggaattggaaccctctaaccactatgctagactgcttcagtatatctcacctacccttgcccccttttgtagaaacggaagcatattatctgtttgtgctgttgctttttttaaaaaactaaattacttaactagagacctgtctgggcatataatattgccaaaatgccctgttactcaaatttatattttaaaattttacatgtataatattaatctcctttttgtttccttctgtttagacatacctgctcatctaaatattttctcagaagttcgtgtttataattaccgaaaacttatcttgtgttatggaaccaccaagggaagctcagtaagtctgattaaaatgctgaagttcctgtcttatgaatcttaaaaatcaagaattaaaaaaacatgaaaattaccttaatataagtaagagctcaagtaaaagttagggataaaatggtaaattttaaatgctttgtggctataaatatagtatactataatgcttaactctttaaaattgaaaacaaaaataataccctatgatggggtatataatcttgaagcaatttggacaaggtaatgtactgatggtgtttgtatttttttcttcactgattacagatttgcttggcaatgtgattattgtaaggaaaattgtgtatgagtggttataacaatatggtatgtttttgcttttggtcacatgaatgttaacattatttcatcttaacttaatcttgaagtatttcctgtaatctatagttctttattttttttcccacctcatatgtaaagtcctagaaatgtagtataaaaatgcagccagctggtttctctctagacttctacgtcaagtaatgtcaggttacttgagctttttaaaatctgttaaccaagtgtatctgtgtccagagtggcgcccttcccctttatgacagtgctccttagttgatggtaccaaaagtgtgactcttcttcagttcaagagaaaaacgaaaagaaacactaatgataattttcaaataaagtttaataaagttgttttagcgcctttctgttttatttagtaaaagaggactaacacatggtcagggagtgtactgttcaatattaacagcacatctggagttcgaatccagtcttattttattgcttgttttccaaaaaaaaattccatttagatttttggcgttttgccttacttttaacattttttttttctcctacttgaatctgttactttctcagtttctgaaacatgtaatcttttttatttagattagtatccaatggaattcgatccatcaaaaattccacatttctttgggaactgttggcccaaactcaggttgcagtaactgtcacaataccattct

SEQ ID NO: 136920 - DNA, 1078 bp, Homo sapiens
actgtcagtgatctccctggttttgcactgcagggccatagtggggttaatgatgtttgtaaaagccctcacaacaaagctgacacacatctgccagaccttaaaagaccatagcctggctcctcaatttgtttagtactgagaagtacaggagaaaagttggttaggagcagctgtgtaaatcaaacatttttgaattggtaaaaattttcagataggttaatccattgtccagaaaataccttcctcggttcttaatttttaggtactataatagtattttgcagtattttaagtttgtaacaattttgtcaggtttccttttggggaacctggtttcgggttgttgcttttttcccctcacatgatcatgctgggaagataaaagttacagtttatttttattcattctgttccattcataaccttaaaagcaagtaactattttacgaattccttgaggtagagctcattgtatctgcatcacagattaaagtgatatacagtgcactttcagggttccgctgtccctaagagcataaatgggaaaagaggcttacactgatgttagttctcacttgaacacatgctggcttctgtgctttccttttctaactagatagattttgtgaaaaacctgttttatttgaaaggaagataatgtactgcatttatattttcaaacttgagatttaaaaaatctgtctgaattggctgctttataactcctacggagagggctatgtcgtgaggggtaagggcaggcaagtcctcagtatacctgtcacgttgaagaacggataggtagtttatgcaatttctgtaataactacccaaaatacagttgcacaaaatctttctggcagtgataaaaagtatgtagtgtgaaagattaacttttgaaaaacttcaaaagctgtatattgaagaggagctgtgatagaagttttaattagcacatgcaatctattttttgctctcttaagttgtttattccaggtcagtggttctcaaccccagggcagttttgccctgcaggggacttctggcaatgtctgcagatgtttttgatcattaa

SEQ ID NO: 136921 - DNA, 1075 bp, Homo sapiens
aggtatgattccatatgaaaatgagcacagaatttgtgtgtgttaacttggttgtgttctttactcatttttaatatgagaaagaactaagatacagtttttaagagacgaggcagcaataaggcttaagtaacaattgtctacattttcttgaaaatgcttctgttttaattaaataattgtccaccattttccatgagagaacttgtgaaacacaaaatatttactaataaattaccagtgtttaggtcagtatttactcagtaaatacaataacatttgttttggttaaccctgagctttcttccagtattttaactatcttaatgaattgcatcacatgtacttttttttttttttttacctgtttgtgttctttacttaaattctagttgtctgatgatccatgtccagtagaatccaagaaaacaaaacgagcaggagaaatgtgtgccttcaataaagttttagcccacttcgtcgctatgtgtgatacaaatatgccatttgtaggacttcggttggaggtaagttttttggaacagttctggataccccaaatgaaagagtagtttttaaaatgtgttgctgagggtatatatagattccattaggaaaagcagaatgtttgtgatcctgttcattttgggaggagtggtagggttacaatcatagcatctaatggtatacatgtaaaacatgacttgaattatttcatctctctgattccagattctgggtcttctgctctttatggaaattgaatgtaaaattttcccagttaaaaaaagtggacagggctgggcacggtggctcacacctgtaatcccagcactttgggaggccgaggcgggtggatcacttgaggtcaggagtttgagtccagcctggccaacatggtaaaactttgtctctactaaaaatacaaaaattatccgggtgtggtggcacacgcctgtaatcccagctacttgggaggctgaagcaggagaactacttgaacccaggaggtataggttgcagtgagtcaagattgcaccactgcactccagcctgggcaacaaagcaagactct

SEQ ID NO: 136922 - DNA, 1049 bp, Homo sapiens
cttaatttgcaagctgatcttcagccagcagctgttccatatgccagagatcatttgtgtttcataagtaaatatttcagtggagttttttgtttttatgatttttaaggttctaagtctaataatactatgagttttaaatacttataatttaaaaatactgattaagtagactaggagtttggggaattaaaatataggcaaagaatggattcatgtatttgttacttgttctttctgccagtgtacatttgccattagttgtcatatctataatgctccctaaaagttaaagagggaaaacaaattaggttggcttatatctaatggtacatttagtttaatttttctctgactcaaaaacaacatgattttctgccttaaacaataattttcatttgttttatttgttttacactacctagataaagattttgtttctcatataagcaattaattaatgaagtgctttattctgtagaccaggccactctggatgacatggagaagtctgtgaatgatgatatgaaacgaatcataccctggattcagcaacttaagtaagcttatttatatagctcaagactaaaaatggaaacttattttgacaagatatgttttcttctccatcattactcttggtcattcactgtccttaaggtttatgacatgaaacttaagtgccgtttggtaccttagaatctaaattctcttggaatagttccaagatgtcagtttctcatatcaaattctcctctagagcaaatataggtgtgaagggcataacactcagctttcatcccttaccacattttcttctatacaagcactttacaaatcacttacacaatgaattttattgtatcaagtgttctctgtaataaagtcctatttgttcttatccagggtaatcgtcatggttgactaccaactgacactttcaaaatagtcatttctgcttctcgaatacagtcattcaatttgtctcaaaatcctttaaatgcttcacactgttaaactaaataaaattgaaaatggagctagatata

SEQ ID NO: 136923 - DNA, 1065 bp, Homo sapiens
gaaagaggggatctaagataaaccaaagcattagcttatatttttaaagagactaaggagaggggcagcctaacttaacaaaaatgcaaatatgggccttaaaaaagaaataaaggatctgccagaaatttggtgaatgtattggttagatgtgtcttgggggtgcctgtccattagccctatcagggtttaacattagctttatcagtacttcattatcttaatttaattaaaagcttcagtagaaggccctcccctttaatccctcaagcaaagatgttaaatacagacctaaaaattatgattggaaagtataattgaaactctcactggaattagaaaggctactaaccaccactgccttttcgtctttttttcttaacagctttattgagatataattcacatataattacctcattcaatggtttttactgaaagagttgtgcaactatcaccacaatttgattttagaacattttaatcatcccagaaagaaaccgtgtacccattagcagtcacaacccattcactcctctcccttcctgcctcccttttggcaatcattaatctactttctaactctatagatttgcctatttggacatttcatataaatggaatcataatgtgtggtctcttacatactgtttttaacacattttttttgaggttcacagcatgtttcaatacttcattcacttttattgtcaaataatccattgtatggctataccatcttttgtttatccattcatcattgttgaacattggggttgtttttcttttttggctattgtggataatgctgctatgaacattcatgcccaagtttttatgtggacgtaagttttcatttctcttggctgtacacctaggagtgtaatggccgggtcttgtaactgtttaaccttttgacgtgtttaacaccactttacaatctaaccagcaatgtgggaaggtttcattttctccacatcctcaccaatacttgttattgtttgcattcttttacgtgaggatatgcagttatctcagtaacatttgttgaagactattttctcc

SEQ ID NO: 136924 - DNA, 1129 bp, Homo sapiens
aaccttttatgaaacttattttaagtaaatgttacacttcttacatttgtttttttaaaacatctgatactataatatataatttttaagatattctttcatattttataatttagatcagataccattttaattttaaggtctggcattagagcaccataactgatttgtaatatcttctcctattacttaccaaaatgttaactatagtttttaagctatcaattgtaagttaatttttaactcaataccatattagttaatttttaactttaagtttgctttctattagggttaacacttaatcagtgtgattccaaaaggaaatattttgaagcacagtaatctactcttgggcttttaaagtaaaaatgtttaaattgcacatttgaatttgttgttcttatttatgcagatcgaccacttatcaatagaaaaactcctgattgacagtgtccatgcaagagctcatcagaagctccaagaactgaaggccattcttagaggcttcaatgccaatgaaaactgtaggttcttttaaattgacatttgtttttcttttgtttaaactagaatccagttttatttgatgagaatcttaatatgactttttcttgatattttgcttttattgtggaagctggtatttctgcattttaacttgtgatctgccaaacttatgctaatttttcccttgttacttatttagcttggccttatttttgaaatatttgtgtattggatttccttaaaactttatgaaatggggctgggcatggtggctcacacctgtaataccagcactttgggaggccgagatgtaaggatcacttgaggccaggagctttagacaagccagggcaaaaaatgagaccccgtctctatttataaaattttttaaataaaaaagaaaaactttatgaaacatgagctaacattttaatatgaaccttatttttaaacttttttctagtgataaaacagcattccaaatatttataatatacttgtaaaatatgcccctttgagtgaagcagaattcatcccttgtctttttaaaaaatttttaaaaattattaacagttcaaataaggaatgcagatacatggacatagtgaaaaatcttcca

SEQ ID NO: 136925 - DNA, 1043 bp, Homo sapiens
tgtattaattttacttaacaacatctatcagattctttctgtttatcacttcagttagaagtgttacattcccaaactctaatgttaatccgagaacggtggggagaccttgtgcaggtggaaaggtatcatgctggaaagtgcctctccctttcagtttggaagtaagtaaaatcagttctggtgggttcgtgctatgactgtaaatactctttttatttctctttttctctcatacatctgatttaatatacagttgacccttggacaacacaagcttgaattgtgtgggtccacttatatgcagatcaatttgcaagatgtgaaacctgcgtatagggccaaccttccctatacgtgggttctgctggctgaccgcaggactgactgcaggacgtgagtttgcgtggattttggtattgggacgggaatcctggagccagtctcccaagtataccaaggaatgactgtataccaatagctatgcacctctagtaacatgcttttgtgtagtaaggtcccatagtattatgtagaccacataggacatccatagttgacacctgtcttagaacatgttttaaatacatagacatttacctgtttgtactaagacttactattcttaaaaagtttgagaggttagtttactttgggtttataccaaatagctaaaagaccgttaggttagaaaagaccattaggttagattgttgggtatcattttttaaaacatgcatgcttatcacagttttccactttgaattgtgcctgttaaaaactttctttgggagaaaattcctattggactgtttgtaactctcaattccctgtttgaactttacttgattcctgtttttctccccaccccggcatcttattatcccaaatgacccccattttctgtaaaggagtcagaggtgagtagatactacttagaagacaggtagtttttgttttggggttctttttcatgtgtgcatatgttttatttttaaattatatgtcttttttaaatgcaataaatcaaatattgtattgga

SEQ ID NO: 136926 - DNA, 1067 bp, Homo sapiens
accagcctagacaatatagcaagaccctgtctctacaaaaaatttaaaaattagccgggcgtggtggtgtgttcctgtagtcccagctacttgggaggctggggttgggaggtgggaggatcacctgagcccagggaggttgaggctgcaatgagccatgatcatgccactgcactctagcctgggtgacagagcaagatcctgtctctctatatatatattcctgcaaaataataaatgcatgcagcaatttatcctgtaatttgaagcaagttttataattgtaactgcctgttgaccgtggaagtttcagtgtttctcagagtacaatgtcaagtttctgtagataatttcagtgctttttaaaaaaattcattgttattatgtgcttccttagttggtatagtgacacacttgtacacctatttaattaactgctttcttttcttctgccaacggaagatgggcgagctttggttcatagcatgcaaatcagcttcatccatcaactggtgcagtctaggctctttgctgatgagaaacctcttcaggatatgtacaactgcctacgtatccttctgaaatttgagacatatatttgtaaggattttgtggtacctctcccacatttttcatttgtccttagtcttgaactgtagcagcctacattccttgcccccatctcccccaccctttttgaggtgcagatagggctggagaatagtgaagaatagtgatatgtttgtaataaaccaaatttaaaattttactgttgactttgcaggtaaaagcaaaaagtgattagttaaaaatagtcttgtttgaggctgggcacggtggctcatgcttgtaatcccagcactttgggaggctgaggcgggtgtatcacttgaggtcaggaattcaagacctgcctggccaccatggtgaaaccctgtctctactaaaaatccaaaaaaaaaaaaagaagcctggtgtggtggcgggcacctgtaatcccagctactagggagcctgagacaggagaatcgcttgaacccaggaagcagaggttgcagtgagccgag

SEQ ID NO: 136927 - DNA, 1032 bp, Homo sapiens
tgggaactggtgcccttttgtagaatgaatacagtttcaggctttggtaaagatcagtttcaattcctttcacttaccaaaagggttactaattacttactaattaaattactcctaatttcagttatgaacttataattcataactcctcatttaatcccttctgtgaagcagtttacttctaccaccatatactgaatttagtatatttttgtaaacaacttttattacaatataaaattaattttaaaatgtgacttattgctaaaacattctattgggtttattgctctgaggtgaaaaagcatatgcagataatatacaaaatgtgacaatagttcatatttagataaatattttaggtggctcattttgtagtggttgtaagcaaaggctgatttatttatttatttatttttgcttagctgaaataaattgtgaaatactgtttctaatatgttggttcattaagagttgttttattttataggaaaatagaaatagtgcagtttgctagccggacacgccaactcttcgttcgattattagctttagtgaaatgggctaataatgctggcaaagtggaaaaatgtgcggtgagttaaactttttattttactttgtataaaataacttttcgaatgttatgatagacatagttttacattttagctttaacttatccctgctgatttgagtgacatgtgaataatcatatttctgaatgataatgtatatttctgcagaaacttagtatttgtttatggacacctgatcagaaagaagaggagatagctggagacatcattacgtgaggagactttaaatatgagactggaactaaagggggaaaattgttagtttatattcgtgctattccttagaatttgcaaggttctcccttaaattttgcttatgaattcttgacatcctgtgagaatggcagagttggtttttttttttttttccagttttacagatgacaaaatgataaggttcctagaagttacatggcttcttcaaggtcacaga

SEQ ID NO: 136928 - DNA, 2109 bp, Homo sapiens
tactaccgctgacatgagatggttcttttagggtctctgaggcaggtaggaggagtgggaacaatgattcctgttctttctacccccagaaactctgctccccttctccccttatagatacccatcgttctcattctccccctcccttgaggtgaaaacaagggctgtggcttctcaaggagtgttctcaagaggtttggcttgtagaggaacttgccagtagctgcctttatttgcagtcttctaacagggccttaatttctgcttcatctctccggtctgctggcccttccagcccccacctagttccctttatcattctgaccataactttaacttccatctcaccgtctaccctaagagtaggaggtaactataagccagagatcattttaatattttctcctccttgtactttgaacctctggaagtagttttagtttttctgttcctgtggcacgtgggtgggagacaatctaaatggctgggtgtgtgtacttcaagaactgattagctgtgggagaggcatgagagttgtttaggccattgaatcttggactgtgggatagaggttaacagaatgtggcaattcaggaggcattaaggatctttctaggcatcagtggatgtgaatgttaaatggtatagcttatctgggaagaagttgacattggttgctggctatcagtattggaggactagcaaaaagaaacttaaaaatcctgttggagctgtttaaaagcaataaaaatttttcatctaaccaccatgcagcataattactgtaaaacccttgacatacactggtccttttgtatgcttagcttccagttttgtccaccataacacaatgtggagggattattgcttggaaacaggtatccattggatacagggaggctggcaaccaagtagtaagttcttctgcatctgtgaccattttggtcttaaaataatcttttctctgacaccctatgatatagtgtgctaatgtgggacttgggctttttaaatgtttaaggttcatgcaatacattttgaagtattttgaatggagaaaaatgttcttttgttggtttttgccttataaccatactgctggaaactcataaatctaaaaaagagtaggtagctacatgagcctgtagtagctgtttacccagtttttctgaaacattaacgtatttaatagagtcaaagtaaagactattatcacattagaatgaaggtatgcatgtatctaatccgttttttttttttcttcttagactgccaaggaaatctgatgtggaaaggtgagtatggaaaaaaaaaacccttaaagtctctttattgatcaatctatgagtgttggtgtgtgggtatgggtggtgtagggctgtggattggaaacctaggcccaaagagtctagaatgatttttcacaccatgtatttagggagtcctgggaaatgtaatttcctcacccttaacaatacttgttgtgagaccagttctaaatcttctgttctacaaacctttattgagtgactgacctggtcaagtccctaagggtgatattaagataaagaaggtatagtctgtaaaggaagatgctgaggagcagcagactggctttagaaagttgactgccacgggcatagtggcgggcgcctgtagtcccagctactcaggaggctgaggcagaataattgtttgaacccaggaggtggaagttgcagtgagccgaggtcacgccactgcactctagcctgggccacagagcaaaactttgtctcaaaaaaaaaaaagaaagttggctgctaatttatcacttgcaacaatgatgctattaagtatctttagagagttgacatttgcctactgctcctactgttacatagttaacattttggttcagttggagcttggagcttaagatttaacttaaggctaaaatgtttccagaggccaaaggaacaagcgaaattaaagtttcaaagaaatcatttgatggagatttaaattgtaactaaagtatatggtacttgaccgtatctttggcactacttatgctccttggttgatttttttttttttataccaaatcacttggcaactttttagcat

SEQ ID NO: 136929 - DNA, 1036 bp, Homo sapiens
atttattgtctagcttcgttgtacaaataactgttactttaaaagaaagctaacagctggataagttgaacatgaaaatgggaaaccaaagaacaaaagtgaggtatggcaacccctgggactatgataggagtgtgtcgggggagggggaatcacctttgttagatcacatctttgcaccaggtggcagaaataattgggaatggaaaggagtaaacaaacaacaacaacaacaacaacaacaaaggtgacacttcacctctattacttcaactactactttaacttactaatttgtgttttctaaatttaataaaaaattgcattacattagggaacctggaatcatattgcatgcaggtagttatgggtggggaagaaaggagattaatgaactgatgcactggtgttgcaagagatgtaatttgagtccttcaaagaaaatgcttgacgtttttatcatggtgagataatgagacctgttattatagtagattctctgttcaaggagggagaccttgagagtggattttactcacaactgccatcagtagacaaataaaataagtgaatgttcatgacctaagtacaagtgttactcaacaaaattaatgaagtccaacaaatttgaaaccagtaaaagtcatctagagggtctcagtggatactttttattttattttattttgagagggagtcttgctctgtcgcccagactggagttcagtggtacgatcttggctcactgcaacctccgcctcccaggttcaagcgattctcctgcctcagcctccggggtagctgggactacaggcatgtgccaccatgcctggctaatttttgtatttttagtacagacgggtttcactatgttggccaggctggtctcaaactcctgacctcaagtgagtcacctgcctcggcctcccaaagtgctgggattataggcgtgagccactatgcccggtcattgattttaaaaataaatattttaaaatctggcatgccatgtgattagaatcctcagtcactaaat

SEQ ID NO: 136930 - DNA, 1052 bp, Homo sapiens
tctactaaaaatacaaaaactagctgggtgtggtggcatgcgcctgtagtcccagttacttgggaggctgaggcaggagaattgcttgaacctgggaggcgaaggttgcagtgagcagagattgtgccactgcactccagcctgggggacagagcaagactctatctaaaaaaaaaaaagaatgaggccattcctaaccaaaactctgaagcacgtagtttgtttctgctgtccttccaccttccttgactaccccacctacctgggaggtccatcctggggacagtggggtacaattatgagcaaccataggcctatgctgagggcctctggagaaactcacctcttcctccctctcctcttcatcacctggctgaagctctgggtactggcctcccaaggtgaacgtaagaaagaggctctcaagtgttggttgaaacttgaacacagctggcttcctgagctgagggagatattaagatgtgtaagatatttaactgttaactagggatctctgtagatttgtgtgaggaacaataacccaactctataataatctccaataaagctttgaaaaacaagaccagtaataacttactagtatcttgccctaatggatattaaaactctctataaagctattgtaatcaaaaaagtaggacattggagaatagatcagtgaaatagaataaagaagaaagaaactgattttatcagaacttaatacagtgtataataaaggtggcatttcaattcagtaatggcttatttaataaatggtgctagaataattgcctagcacatgaaaaacacaaagacaaactcctatttaattcatctttaattacagaagatacaaaggtaaagtaaaaaaatttaggagaatatttatgtaatatttagctaggaagaccttcttaaataacacaagaaactcagaaacataaaagaaaaaaaaagattgataatatagacaattaaaatttttcagttgcacaagacaccatgaaaagtcaaaggacaactaagaagctgtgagaaaatagtcgcaa

SEQ ID NO: 136931 - DNA, 1754 bp, Homo sapiens
tacgctgtaaaacattgtgaaatcagattactttcaaatgatgtattacaaagttatggaaaaaaagcagttgtgactatggaagcccaaggcttatatcccagctgtcttacactaaatatgggtactgtgtttcctctctttgtctgcaaaatgggagctaatatcctccaatctgtgtgcctgacatggtggttaaaaggattaagcaaaacaatagtttgtaatttattctgtcagagcaaactactggtaaataaataaaagggagtaagttgactaaaaaaatttttttataaataagaaaaaccataataaaacaagtttgtaatttgtaattgtatacaaataaaagatgttatttaaaaaaaaaaaagagcttcttttcagagaaaacaccaaatggcggatgacgccggtgcagcgaggagggtccggaggccctggtggccctgggatggggaaccgcggtggcttccgcggaggtttcggcagtggcatccggggccggggtcgcggccgtggacggggccggggccgaggccgcggagctcgcggaggcaaggccgaggataaggagtggatgcccgtcaccaagttgggccgcttggtcaaggacatgaagatcaagtccctggaggagatatatctcttctccctgcccattaaggaatcagagatcattgacttttgcttgggggcctctctcaaggatgaggttttgaagattatgccagtgcagaagcagatccgtgccggccagcgcaccaggttcaaggcgtttgttgctatcggggactacaatggccacgtcggtctgggtgttaagtgttccaaggaggtggccaccgccatccgtggggccatcatcctggccaagctctccattgtccccgtgcgcagaggctactggaggaacaagatcggcaagccccacaccgtcccttgcaaggtgacaggccgctgcggctctgtgctggtgcgcctcatccctgcacccaggggcactggcatcgtctccgcacctgtgcctaagaagctgcttatgatggctggtatcgatgactgctacacctcagcccggggctgcactgccaccctgggcaacttcgccaaggccacctttgatgccatttctaagacctacagctacctgacccccgacctctggaaggagactgtatttaccaagtctccctatcaggaattcactgaccacctcgtcaagacccacaccagagtctccgtgcagcggactcaggctccagctgtggctacaacatagggtttttacacaagaaaaataaagtgaattaagcgtgaaaaaaggaaagaaagaaagaaagaaagaaatatagcctctgagccaggtgtggtggtgcacacttgtaatcccagctactggggagactgaggcaggcggattgcttgagttcaggagtttgaggctgcagtgagttatgactgcattactgcactccagcctgggcaacggaatgagaccccgattcttaaaagaaagaaagaaagaaatggattgtggaaaatcatgagctctcagatgtataaaataatgggttgctggctgggcgcggaggctcacgcctgtaatcccagcactttgagaagccaaggcaggtggatcacctgaggtcaggagttcaagaccagcctggccaacatggtgaaaccccacctctacaaaaaatacaaaaattagccgagcatggtggcgggctcctgttatcccagct

SEQ ID NO: 136932 - DNA, 1288 bp, Homo sapiens
gaggtggggtttcaccatgttggccaggctggtcttgaactcctgacctcaggtgatccacctgccttggcttctcaaagtgctgggattacaggcgtgagcctccgcgcccagccagcaacccattattttatacatctgagagctcatgattttccacaatccatttctttctttctttcttttaagaatcggggtctcattccgttgcccaggctggagtgcagtaatgcagtcataactcactgcagcctcaaactcctgaactcaagcaatccgcctgcctcagtctccccagtagctgggattacaagtgtgcaccaccacacctggctcagaggctatatttctttctttctttctttctttccttttttcacgcttaattcactttatttttcttgtgtaaaaaccctatgttgtagccacagctggagcctgagtccgctgcacggagactctggtgtgggtcttgacgaggtggtcagtgaattcctgatagggagacttggtaaatacagtctccttccagaggtcgggggtcaggtagctgtaggtcttagaaatggcatcaaaggtggccttggcgaagttgcccagggtggcagtgcagccccgggctgaggtgtagcagtcatcgataccagccatcataagcagcttcttaggcacaggtgcggagacgatgccagtgcccctgggtgcagggatgaggcgcaccagcacagagccgcagcggcctgtcaccttgcaagggacggtgtggggcttgccgatcttgttcctccagtagcctctgcgcacggggacaatggagagcttggccaggatgatggccccacggatggcggtggccacctccttggaacacttaacacccagaccgacgtggccattgtagtccccgatagcaacaaacgccttgaacctggtgcgctggccggcacggatctgcttctgcactggcataatcttcaaaacctcatccttgagagaggcccccaagcaaaagtcaatgatctctgattccttaatgggcagggagaagagatatatctcctccagggacttgatcttcatgtccttgaccaagcggcccaacttggtgacgggcatccactccttatcctcggccttgcctccgcgagctccgcggcctcggccccggccccgtccacggccgcgaccccggccccggatgccactgccgaaacctccgcggaagccaccgcggttccccatcccagggccaccagggcctccggaccctcctcgctgcaccggcgtc

SEQ ID NO: 136933 - DNA, 1048 bp, Homo sapiens
ttgggtcccaaggcccctaaatgactgtgcctttttctctctgcctttcagtcttcatatgcttattttacatagaaaatctagggtgttggcgggcgcgatggctcaagcctgtaatcccagcactttgggaggccaaggcaggcagatcacttgaggccaggaattcgagaccagcccggccaacatggtgaaaccctgtctctactaaaaatgtaaaaaatagctaggtgtggtggcacatgcctgtaatcccagctacttgggaggctgaggcaggagaatcccttgaatctgggaggcagaggttgcagtgagccaagaccgcaccaccacaccccagcttgggtgacagagtgagattctgcctcaaaaacacaaacaaaccaacaaacaaatctaggattttgagctgtacttagcaggaggaatagtacatttactccatcttctcagaagcagaagtcccaaaggctgccttttcacatttcatcacagccaagaaagtattactccactctgctctatgtttggatttggaaggcctttcctactgtaagggagtctatgttggaatggggaactgtcttaaaaaacaaattattgggccgggcgcggtggctcacgcttgtaatcccagcactttgggaggccgaggcgggcggatcacgaggtcagcagatcgagaccacagtgaaaccccgtctctactaaaaatacaaaaaaaaaaaaaattagccgggcgtggtggtgggtgcctgtagtcccagctactcagagaggctgaggcaggagaatggcgtgaacccgggaggcggagtttgcagtgagccgagattgcgccactgcactctagcctgggcgacagagcgagactacgtctcaaaaaaaaaaaaaaaattattgggtctaaagtagaacaaacttgaggccagtcgcagtggctcacacctgtaatcccagcactttgggaggccgaggcgggtagatcacacgaggtcaggagttcaagaccagcctgaccaacatggcgaaacctggtctctac

SEQ ID NO: 136934 - DNA, 1503 bp, Homo sapiens
gggttcaaacaattctcctacctcagcctcctgagtagctgcgattacaggtgcatgccaccacacccagctaatttttgtatttttagtagagatggggtttcaccatgttggccaggctaatctcaaactcctgacctcaggtgatccacccacctcagcctcccaaagtgctgagattacaggcatgagccaccacacctggcccccagatattttttctaggctgacctataacctgtatagttaaaaaaacaggatgacatcctgcatactgctttataacttgttttgtcatttagctatatattttgaacatcttttcatttgaataaatgtatcagtagtgttgtgggcagggtttcccaggaaacagactctgagacagagatttgtgtgcaggaagtttatcagggaatgctttcaggatcaacatgtatgggggaagggaatgaggtaggattagacaggaggagaagttagactgtggtgcagtatcaacaagggctccggctttgttgcttagaggccctgcaatgctgtcacaaattgaagaaagaaggctgggcctttatatacccgtgtcgtttgatgtgagctgcccctgggaaggggtgggggtgacattgagcaaggcagctgacttcaactgaattcaattcccagaggcagatgaagcctgtagcactcccagtagctgggagtcctgaagtgggatctgagccctgcagtacagaatccaccatagttagggacactattgacttcaaccagcagaaaacccaaccaccccttgtttcataaatagaagttagtctcagttaacaagccctcagtaggtgattgctagcatcaatgctatctatcccttttattaggaaaacaaaaactttctgagaaatactcggtagatttacctttacgtttcattggccataactaaaatgtccatccctaggtgcaagggaggctgcgaaagtagtatcagaattgtcaggattttgtgcctggagcagtgaacattgctgccctgaacagtgtccagattgttagtatagaagaagagcataaagggtattagacatgcaactaacaaaatagacttgtacaaaattagtttgaatagttgcatatggatttaacttactaaaacagtctccatattgctggacactcggtagtttccaactttttgctactatccaccgtactgcaataaacaccctagatatttttctctgcccattattcgttggggatgaaattgtaaacatataattgataacaacaaaaaaaccaggggaatggatctttgaaataattttgatgcagattaccaagaagtacctttgaaagtccctacaaattcatgttttctcctgcattaaaaaaaatttttgtttttgagatggagtcttgctctgtcgcccaggctggagtacagtggtgagatctctgctcgctgcaacctccaccttccggtttcaagcgattctcctgcct

SEQ ID NO: 136935 - DNA, 7148 bp, Homo sapiens
ttggaatataaacatgtagaaaatagtccatgacacagcggatgggttcataagtttcttccgggtcctaacaccgaattgtgctgatgatctggcaatggaggctaatcttgccacatcaagtacggcctattcgctaagccgtctggggcactttataatttttttctttgctggtctgtttgaagggctcctatggccaaaaaggtggtcagtcccgtcagctaggctgtgaggacgcctaaacgctttgaggacgcctaaacgctttgaggtagtgatgatgcatgatcgtgtgaaagagtttctcagagcacctccctcgcggggtggggaaaaggacctcactccccacgccccctccttccgctgcgggagatagccacaccttccccctatcggcgccaagcaggtggccaggccctcgggacctcgcgcccccgcagccagtggcccggccagctcgtgcgtcacgtgacgcgggtcagctgcaccgccgggacctccaggcaccgcggcggcgaccgcccagcgcgtggtctcgagatctcatctttccgcgcccctccccccacggtcccggaaaagggggaggccggtgacgtcatcatccgggttcttgtcggcggggctacggttcacaatggaacaaaaacaagcggcccgagtcaaactatgagcgacgcggctgcggctcacgcgattaaccctgtcgtggccacacaccccgccagtccctgccgcccagcccctcccgagtggtgtgccagatcttttcgggcctcccttccccaacttcggtcctagagccacctctgccctcgtcccgctcctgagccgaggggcatggaacaggatttctggccgtagcacgaccctgaaggggccagccggaagaaacagtactgcgcgaacaatctttaccgcattgtcttcccctcccccaccctagctctccgggttcccggcggctcgcgccgaagcccggccccctcagcggctcgcgctgctctcccagccttgacggcccggggtggagggagagaagagggggcagctgagcgggagggggctgggcaggagcagggggagggccgaaaggaggggcctgaaaggggcgggccctgacgggggcggagaacttcgggtcttgggcggctctggggctagtgggagtctgcgccgccgccgccgccgccaccgctgctgccgccgtcgccgctaccgccgccgccactggccgagcggtttttttttttttggtttgccggatccgccatattgacgaggacgggcatccgcggctgcggacgctagtctccgccgccgccggagccgcaacctctccgcacccggccccgtcagggcctctgtcgcgcctagcccctccccgccttacacagctcccgggcctcgcgggagcccgccgccgccgcctctctctcacgggaggcggccgccttagcgcccggtgcttgggtcggcgccgggagcgaggagcgagctacttcaaagccaccaggcctggagcggggacagaggcggcgactaggggaaggtgaagccgtcgctgcaggaggaggagcaggaggaggtgacgcaggagaaacgcaccgcccggagcccgtctgagctcagcgagagccccagcctgaggggagaaggggaagagggccgtcgccggccaaggaggaggaggaggcgggcgcggcgaggagcgagttccggcgccggtgtgcagccttttggttgagacgcccgcagccccgagcccggccgccgcagcctttcgatacactttgttgccggtcacccccgggcctgggatgcacccagggtaggtctcgtcccgggaccgagccccaccgtcgcctggtgcctcccgcctccgtgtgccctggttgtgagaagacgtctgtgtcgtgcggtgagtggccagctgcactggggcgacgctctttcccggggccaacagctggatgtgggtgaggggaggagggcgaggggggtgtgcgtgtgtgcgagcctcttccctcggcggctgccggccaggctggggcttccccgttccccctcctccggcccgggctgggcgggcgcgcgggcccgtgttgtgtgtggagccggtgtcccgagagcgtgtctgtgtgttttggactgtaagggaaaatggctgacggctccgtccctccccctcctcccccttcccgtcctgtctggggccgagtaggaggatggagtctccgggcgtggcgggcagcccccccgccgtccgcacccgggggccgggtcggtttgggggctggccgccccccgcccggcggccgctttcctacccggtctggttccacttgacaccaaacgccattactgaggtggagtgatttggagctggggagctaggcctcggctacgcctggctatcaggcctgacgacttgtccgcctccccccaccctcccgcgataacccgcagtttctccccggccctgggctcctggagtgggagctgggttatcggcctcctacacctccttcgccccgctttatttgcagagggccaaagccgtgaaaggggtttttgaatgcagaaatcgcttccaagctagcttggacctattacctttctatttttaactgtttctgcaaatattagcatgtgcgagtttggtagtgatcaggtcttcagattcttgtgacgtgaggcttagggttggataaatggctgatttttcattcattgtgaaataagttaaagagttatacagcaggtgtgtagatggcttcttaaattatttgtgtggatttctgtagcgactagaacttacacgagaatttgcaaaatttctagtagaacctgcttaaattaagcatgttattttttggaagttccatagttacaacgttaattgaatttacacggtgcagtttacaggtgtatataattgcttcagattgtcttttagtttaaataagcaagttgtaggtatagattaaatattcatgctttatttttcggggagagaagtatgtgtactgttcttttacctggaaacccatgagtccctaaatctacttaacgtttgtatactttcacttttgaggaagaatgatttggggtgcattgattaggaaactttccagcaggtacttaaccctctcggagctgattacccttaggtaaggactccttaaccatgactagcttggctggttagtacacttgaactcaaaaatagagactataaactctcctttagatctcgctcgtcttctaattcgctgggctgccattttggtttcagcaaataccttcaaattcttgaagaattatgtattaaatataaaaaagtgtcaacattcgttttctcaatttttaaactcatgtgctgtgtcatacatctaactttaaccctttaaactttatcgttccagcttttgggtggagtgaaagcttgaagtatttggaattggtgttccacaggtgaactcaaaatgtctttggtattttactgttttattttctctaatttaaaaataggacgtttggactatatgaattctctctaccccttttcttgtatttttttgcatgaacatgtaacttgtaattctggttatcagcgttctcatgtttcttttgtttgctgaccttggtagtttctgagaatttctggagggagtaatagcaccagcaacagtacatgtgagaatcttaagttacttcaggaaggaacattgaagggcagattttacctttcaccaggttattggggtctctagtttggtgttccatagtccatagttctcatggttttgtttgtttgtttttttgtctgtcgcccaggctggagtgcagtggcacgatctcggctcactgcaacgtccacctcccgggttcaagggattctcctgcctcagcctccctggtagctgggactacaggcgcgtgccatcacgcccggctaattttttgtatttttagtagagacggggtttcaccgtgttagccaggatggcctcgatctcctgacctcgtgatccgcccgtgtcgacctcccagttctcatgttttatctatggaatgctcaagtaggatttactttagatcttttttcttccagagtcttgtttttaatatcttaaggtatgagatttctttgctatcttctcagagatttttctttgacatggtggtaataatgcagcttatggttttgaaatggatgtttgtcatgaatttgctaatcatccagttcttgattagttggtcacacaacaagtgtctttgagcttatttttatttaataagatcaatttctaacgttttagtttcaaaattttagtattaaaaccaatctttgtttaaaacagatgttaagaattagttatttgaaatatctagcagtgtgtgttaatggattagtgttcttctaagtcttttgggcagtgaaggtgaggggggtcttatcctgagattgagttagttgatttttattctgaaagaacgtattactttttatggtagcctacattatgtttcccctcttgtaggtatgttttctgagtcttgaattgtttttcttttttttttcaaaaagggaaaaaaccggattttagttgtcatttggttcttttaggagctgtgtttttgaaagccatcctgtgtattgctaagttcttgtattattttaacatagagtttaacgttaatatttgggaaagagttagtgcattggacctcaaccctgactggacatgagaatcacttggcggggttaaaaaacaaccacaacaaaaaaactgatccctgggttccacccccagagactgattaattggtctgatagggagcctgggcaaaggtatattttaaaagcattgtggatgattcttacatgcatttggagttgaaaaccactgggctattgtttttatcatgttgttagaactttcaagtggataaataagaaaatggatttttttctcaattgttttcagttattagcatgattatcatttgagcattaattgtctgtcagcactgttaagcattttccatttattgccttacgatgggtctgaggtctgtcaggttcaaccagtggtgcttcgactactgtgctatgttagtgaaatgacactgattgctatttttaaaaaagcatttagagcttttggtttgtttctcgtaccagagtaagttaagatatagtttagtttttaagactatcaagatagtctccaatttgataaatatcttggttgcccaagggagatgttaaaagctatgtggcaaataggtttctccccttccatatatcttccagcgtgctcagggtgatagtttagttggtgcgtttatgacaaaatattacacaacattcctaaaaggtgtagaaactatgcatttgtctcctagtaatttatttaaatgatcccacaaattaccgtttagtgtcacatgaaattctgttatctcagtttgagaatttagagttttatttgtcttagtcaaaatcagtttgattttgattaagcgttttgaattttgtgttgttttgggattgatgtataattgttttatggaacgaatgaaataacaataacagacatttatttggagtttctgtctcttaatccccttggtccattggaccaaattctgcatggtgggggcatggcagcagggaagcctataggagtttaggatctatgagggttttttttttttttttttttttttttttgagacagattctcactctgtcactgaggctggagtggtcacggttcactgcagcctccacctctcctgggctcaggtgatcctctccccttagtctcctgagtagccgggactacaggtgctcccatgcctggctatttgtattttttttctcttttatagagatgggttttgccttgttgcctaagctggtcttgaactgctgggctcaagctgtctgcctacctgggcctcccgaagtgttaggattcccggcatgagcgactgggcccggccctatgagcattcttagtgtgacacaagattccccaaagatctttttgttaaattatagaaaatgagactataaggatcatgaaaaaagttgatgtaataaggaaaaagacttaaaacttctaacacttacctatattgggcattgaatttataatttattgtggattataaagtgatgaccattgtaatatacttttaaagaataacttgtgaaaaagtatattgttaggatgagatcgcttacctaaaatttattcttcaaagatactcatgctaaatcttggtgtcttcaacgtgtgtatacacacatatcttatatttggcagcaaatggattttcaattttattctcaatcactgcctaacaaggattttctaccacctctgtgtatcaatcatctgtggagctttttcaaaatatatatttgctctataggtgagtctgatgtgtaaccagaggtttttttttgcagtcccttttagggaaaggggagaattgagaccctttgcatgtcatgtgttccaccattaggcagcagtactcttgtttgagtttcgttttgttagtcacacagtcaaaaattccagactgaaacacaaacatgtagtgaaaagctcaaacactagaagagacagggattccacactcacatgtattatatacagtatatgtgcacatatatatcaaatttattgtcacttagcaccttctcggtgttacggttccagctctactataaacattaatatctgttaagacatttgtttcctttttaatccgttcaacaaatacttctggggcatctgctgtgtgctaggcactgttctagagattactgttgtctagaagctaacatatgaagtgaggtgggctggactagctgatctctaaagtctttagtgctagttttctggcattcttttatgtacctcgtaggagagattggattaagttgttatttaaaaaaactttgttatggtatatgccaattgaattttttttgtcactaaatagaatttcattctgaactccagttttctccagtgagcccaaatgtcaagtatagtagaaataggttcttttggaattcttggcatactggctttaggaatagctgtacttct

SEQ ID NO: 136936 - DNA, 1518 bp, Homo sapiens
tttacttctgggagtcacttttcttactaatctcattacaatgagaaatcctggaagagatctcaattctttctagtcagacccttcatttttcagatgaaaaaaatggctcaaagaggtgaaaggtgaagtaacttgaccaagatagcatgccatagactaccttctttatgaagctatatctatatgtgtcaaatcacattaattattaaattctctgtagtcactcataaaattaacattaaactgtctccctggtaatggataataaggtcagggattctgtcctttacctttgtatattacagagcacctagaataatactgtttataataaccatttgattacctgaatgggaaaatctggggcagtatttaacttgcagtacctccaacctcttgtacagaattgattcatcttcattttatggcaccctacagtttattcttattaatcatgtgagctttgaacaccatgttagtcaaccataatcaaaggaattgttttccttgggatgagtttgagctggtgatcgtgcatattagatcccatcttctacagagcctgtgaattgggtggaaaggaaaaagggagtggcgaagcctcctgttagtatccttgatgtccattttattcctgctgactttggtggctattgagagttataagttgaggctgttggttacatctctcatttctagtcttttctgttaactggttacttagaactcctaagtaaggccgctcattattaacttggaccccagagagcatggaagttaccgtatagtattgaacccatttctgcctaacagtgttttctctctggtcgaggtgtagtgtacaaagttttggttgctctgcttggtaacatctctggagttcagagcacagggatcagtaaactttttctgtaaagggccacatagtaaatactttggactttgtgggctaagaggcaaaattgaggacattgggtaaaatttttattggtgaaataaaaaatataattaaatacagttatgtataacttaggtctaatgagaaaaacaatttggtgtgtgtgtgtggaggggaggtaatacagtattttgctttattgggtaaagttcagtgttccctgtcatcaaattgattgcagacgttctgtgtgaaatccattcttaccttgtgagctgtacaaaaacaggaggctggaattggtctgttaccatagtttgccagcccctagttaagagcagtgatttttttttttaagaggaggggtctcgctgtcactcaggctggattgtggtgacgcaatcatagctcattgtagcctggaattcctgggttcaaggcatcctcgcacctcagcctgccgagtaagtaggaccacaggccgacatcacctcacctggttaatttttgttagagaacaggggtttgactgtgtttcccaggctggtctcaaactcctggcctcaagcaatcctcctgttttggcctcccagtgttgctgggattataggcctgag

SEQ ID NO: 136937 - DNA, 2444 bp, Homo sapiens
ataagggatgctcaacctgtgccattttaggcaccagagggtatataaagatgattctctgctttcaaggctctgaagtatggtgaaccagacagttatacagtgcaattacagctgtattaagtggaggtgtgaaaagtgtagtaggagagatggagaaatcattgtttggcattgggtgaggtcttcaaagatgtcctattttcatggccctattaattagagcagggacttccggtcagagggatcaacttgagatcaggcagggttttttaaccctattgacagtttggggcagataagtctttgttgtgaggtgctgtcctactcagccctggcttctacccacaagatgccagtggtatagcccctaccccactcatatgtcttcagacattgccagttgtgccctgggggcaaaattgagaaccattatttgaaatggagcaatgcaagtgtgaaagtatagtgttttcagagtaagaactagtaggagagtgtgcaaggaacactagagatactgggaggggaggggttatgggagatggaactgaaaggtagtttgagtgaagctaaaatcacaaggggtaaccttgagtgccatgttaggacatttgccttttactgttaaggtaatgagagatgtactttgaagtttaagtgaaaggagacattagatttgtgtttgtttttgaaagataattctgatggcattcgtggcagatgtgttggagagttgagtgtcgggggattgagatggtattttaaccgttcttctgaaagataagaaataatgattagggaatggaataaaggaaggagatcaatggggtgctcccatggtatgagggaggtgctgctaatttgagtttggcttttctgccacagaatggagtactgagctaaaaagcaaaacacctctattgtcttcctttcaacttttcctgccacctccaattccctttcctcactgagagctgctgtctgttgaggtctgttgaaaggtcattgagagaagggaatctgggttacagaatgactactctctcaatgtggttccttaaacagtggattatcaaagcacaagtgtcatcttcccccccgctccccgcaaggggttagactggcatccagagagcattaattgtagcctctccttggtttgtgtagatgttattttgccctaaaatactttgatatacaaacataggtgaataatctgatggtttaattgtaattatttcattgcttcctattttggaggttagctttactattttaagtgagaatgtagtcagtggaagggtactggacttggagtcacaagatctgtgttttatttttttattttattgattttttgagacagagtctcgctctgccgcccaggctggagtgtagtggtgtgatctcagctcagtgcaacgtctgcctcctgggtttaagtgattctgctgcctctgcctctcaagtagcttaggattacaggcaccaccacccacggcgaatttttgtattttttgtagagatgggattttactatgttggccaggctggtctcaaactcctgacctcagctgatcagcctgccttggtcccccaaagtggtggaattacaggcatgagccaccgcgcctggtcaagagctgtgctttagttccagttacccaactccctgtgttaaatcacttagctaacctcttgggtcttcatgactctgtaaaaccaagatgttgggcaagaggtgagttaaactactacttttttaagttcttaaattttatctttattcctaaagatgtggaaaaatctgtagtcaagagaaattgtcaagtaaaggaaaacagagaaggtaaacactttaatgggtttagaagttggttatattcctccatttacttgtcaatccaacaacttgaatgtctcctctcccttgtttctcctgtgtggtctgaagggctttattttatttagaatcctgtgggttaattgtgcttggcccacagcttgtactgtgaatttagggaccatagactttgtagccaggggtataatttctttgttggcagagcaacttaaagtttggttaagttttcatctgcagtctagtgctttaataacataacttgctaaaaagtgatatagcctgctaggggaaatagtatttagggggaaattattttttccgaattgaagatgaaaatacacagataaatacagtaatagtgatttttatctggcacagatggtttcagagaaaatgttgatacctcatttcttattttactgtaagagaactagcaaaagaagcttattttgtttcttaggtgagtcattctcaaacttggtctcaggatgcttttatactcttaaattattgaggatcccagagagcttttgtttatgtggggttacagccattgatgatttactgtattagaaat

SEQ ID NO: 136938 - DNA, 1258 bp, Homo sapiens
cagcactttgggaggcttaggcgggtggatcacgaggtcaggagttcgagagcagcctggccaatatggtgaaacccagtctctaccaaaaatacaaaaaaaaaaaaaattagccgggtgtggtggcacatgcccgtagtcccaggtacttaggaggctgaggtaggagaattgcttggacccgggaggttggctcactgcaacctccacctcctgggttcaaacagtctccctgcttcagcctccctagtagctgggattataggcgcccgccaccacgcctatagcaaagatcgcactactgcactccagcctgggcgactgagcaagactccgtctcaaaaaaaataaattaaaaaaaataaataaataatgactttagaggatacttcttctcagatctttcttagtggaatttgtgtatgtaaaactattacagaaacaacccaaatgtccattgtccatcaagtgatgaatgcataaataaaatatacaatggaatattatctgtcaatgaaaagaaatgaagtactgatacatgctacaacttggatgaactttgaaaatgttatgcttaagtgaaataaaccagtcacaaaagacctcatatcacatgatgccatttatatgaaaatagattagcatgggactgaggggaggttggagggaagggagaatgctattaatggtatgaagtttctttttgggggtgatgaaaaagtaatctgagatcgattttggtgataattgtgcaactctgaatatactgagaacctttgacttgtacactttaaatggacgatttgtatggtatgtgaattagatctcaagggtgttattttaaaaaacttaaatataatttataatgataatctcattgattaaacataatttgaaattttttggtgtactttttcagattctttacatttatgatttaaccaatctggttttggaagatacaggcagaaagaacacccagtggaggcacataaaaaatgttactagactgggtgcagtggctcatgcctgtaatcccagcactttgggaggtggaggtgggcggatcacttgaggtcaggagttcaagaccagcctggccaacatagggaaaacctgtctctactaaaaatacaaaaaattaattagctgagtgtggtggcacacacctgtaatcccagcaacttgagagggtgaggcacgagaattgcttgagcccaggaggtggaggttgcagtgagttgagatcacgccgctg

SEQ ID NO: 136939 - DNA, 1022 bp, Homo sapiens
tcggaacttcacagcctttgtaacgatttaaaaaaggagttaagaaaggtgttttctttttaaaataagtcttttcgttttgatgatatttttcaacattagtacatgcatttttggattatccagatgactgcctcataatcaagaactgttaacatcatttcggtacttatgttagcttaataatgtgttggtgccaagggcaaatgatgtcacaggatactatgtgtatagagtagtgtaatcattcaggtagaagtaggaacatatgatggtggtatagccatgcaaaactcgaacccatgccttagcattcagtaatacactgccatctgtcacgttatattaatagttttatttgtattccatttataaatttattttagttttagttatgagagcagtaagcataaggaatttaatcctaatttcatttctgcatttatttaagcaacattaaaatagaaagtgattaaattagtttttaaaaattctgttatgatagaaccagaatttgcaagcttgagccagcttacttaatattattgctggaaacctagcatttggcattaggtgactggaactgggactgcagttttgtatttactaggttatttctctatttatgaaatgggaaatatatttctaactaaaagggtcgttcatttgttcattctttcactcaacagataattagttgtgtagcaccacataattttatctcattactagtttaattttccctactgtcaaattttcttcagagccagcacaaaatctgataggaatattatgctatgaattgtcttctagaaggtaagataccacccccactcccccttttttgagacaggttctcgctctgtcacccaggctgaagtgcagtggcgtgatcatggctcactatagccttgaactcccaggcttaagccatcctcctgtctcagcactcccagtagttgggactacaggtgcatgctaccacgctgagctaatttttgtattttttgtagagaaggatt

SEQ ID NO: 136940 - DNA, 1425 bp, Homo sapiens
tttttaaaaaataggacaaaataattttaaaatgtggtaggattctgttgtaatgcaatggaataacagctatatcagtaaaactgttgaggctgttcatttatttaaaaacctaagcaattgtggtgtgtataccaggagcagcaaattctgataatttatagttgggagaataattttcctctgggctggtctagagattatatttatagggaccctctgaagattcaaaaataagaattgtcaagaggggataatcagcatttcaagagaggaataaccagcacttgttaaaacacctgctctttactgggtccctctgtgtgtctggtacttcacatacattctcctattaaagcttttcaacagtctctggaggtattagccatcttgagagagaaaaaaaaaagatacctggagttagaacatcatctgttgtcggcctgtctgctatgttgcagtatatgcattgttgaaaacctcatagtctgcaaaaatcaggtaccaaaaactaacaatgtgtatagggaaaaatgggcttaagagtaaactgatcacttcaaagctatgttactttgtaattagagcactaacaaaacaataaaaattccagtaaaatagcacagttttgaagatcctaaatttctgacaaactacaataaatataggacttgaaaaaggtagcttgatggaaggggcaggtataagggggagggttggggtgactgacttagagagacaaagctaagatgcataaatatcaggtggaactgcgtacatacttctgagacagagcatgtggcctgactaagccaagaagaataatgtggggctaggaggtggtggtgatgagcatctggttcagacctataacccccaaccccatgctgcattcagcttctgttacttgtgggtacaaaacatcaatgtgttgggggaaaagtggcaaccactattctactttgtgaatttgacgactccaggtacctcataagtggaatcataaaatatttgtccttttgtgaccgctttatttcagttaacatagtgccctcaaggttcatccatattgtagcatgtcaaaatttccttgctttctaaagctggattattttccattgtttgtatgtatattttattgacacattcatctgtcaaacggatacatatgcttccacattttggctattgtgactaatgccgctatgaacatgggtgtacaagtatttgttcaagtccctttcagttcttttgagtgtatacccagaagtggaattgctgtatgtatcatatgtaaattctgtgtttaactttttgaggaatcaccatatgttttccacagtggctgcaccattttacatttcttccagcaatgcacaggggttccagtttctccccttatccttgctatcacttgtgttttct

SEQ ID NO: 136941 - DNA, 1142 bp, Homo sapiens
tgggggagattttttgcaaagttctgatgcctaggccttactcccagatactgtaatttatttcatctggagaggaacctgggcatcagtgttttaaacaaaatcacttcaggtgattttattgtgtagctgaagagggctactgatctaatgaatatagaattgaggatttggtagcattctcctgtacttgtttgctggtcagtttgtaaagaagagttccctgttcttaaacagttgtggccttgtaaccctgttatggctctaggagtggctggagccaaaaccttgccaaagtagagagctgagatcatctgacaaattcagttgtattggagtattatgtagtttgaaccctcttaaaattttaccagaggtttttggggggttttcagggttttttgtttgtagggggtggagagagcggggatcttaacagaaatttgttctctcacaattctgaaggccagaagtccaatatcaatgtgttggtaggtttggtttcttctctggcttgcaggtggccacctttttgctgcatctttacgtggtctttactctgtatgcgtgcacccctgatgtttctctccaaagcgtcaaagtttatgttaaaagtacttagaagctagtttaaaaaaccatttataatgccctagtatcagtgataaacgttagttgtgcggcctgccttgaaatgttttaaaaaatcactttgtactttgtctaagtacacatgttactgaaacaggagagttccctgacgccctcacaggatgtgtgacaggggtgtggctcatttattcctcttatgggaaggggagcacacaggtgagcaggtacaggagccagggtgagcgcttttgggctccggccccacagcagtgtctaggagtgttacaatgctcctttagccctgctgtcccagcataagtgttaaacagctcagagaagagtcagtgtgacagcctttttgggtttctgcatttagggcatcccgagttcttttcctgtgtctgggaagaatcaggtcacagggacttgaaggatggtgaatgtggggatgttattgagtggtggaggtggctgtcagtgggatggggagctggagaggggatggagtgggaagatgatcttctcctgga

SEQ ID NO: 136942 - DNA, 1209 bp, Homo sapiens
ggcttggggtttatatgggcacgggataggggtgcgtggcaggccaaaagggaacacttgggcgtgaaaacaggaatgcctgttctcatttagggctgcaggtccaggcttgagccctcaccagggaccccaccctcatacctcttgtccttattcttacagtgtaatgaatgcatcagcaaattgaaaacagatagtttttgccgtttcttaatttaattaaaatgacagttaagtactttgatatattgcctttggagtcatttccaggaggctatatttgtttgttttcttggtataatggccagtgtaccaatgatcagttttaagttaaatgtagtattaatgaaacttcagctttttactttctcttcttgtttgtatagcccctttttcctgattagattcactggtgatactaaattcgaacagttccataattcatgttttttatatctaaaaccaattactttttcccctttctatttgtaggttatgcaatggtctctgcaagatggtttattcttgaattggacctttttaagactgacaaatgctggtacttcatcttctataagtggactataatttcttttctcaagacaactacataagcagacaaaattgcaaagatctgccctgtgtcgagtatgacagccacgactcgtggctctccggtcggagggaatgacaaccagggccaggctcctgatggacagtctcagccccccctccaacagaatcaggtaggatgttgaagatactagttaaagctacagtggggctggactcagtggttcacatctgtaatcgcagcactttgggaggttgaggcaggcagatcacttgaggtcaagagtttgagaccagcctggtcaacagggtggaaccctgtctctactaaaaatacaaaaattagccgggcgtggtagcatgcacctgtaatcccagctacttgggaggctgagacaagagaattgcttgaacctgggaggccgaggttgcagtgagctgagatggcgccaccgtactccagcctgggtgacagagcgagtctctgtctcaaaaacaaaaacaaaaaacctacattggtgggtctactgttggggtactaaatgatggaacatgttctaaataatttgtgaagcaactgttattttaagttttgattaacaaaagtgaacacgttgggcgcagtggctcacatct

SEQ ID NO: 136943 - DNA, 2112 bp, Homo sapiens
gttgtcccttagtattcatggaggattggttccaagacctcttaccacttggatagcaaaattggtgtatgctcaagtccctgatataaaatggtttagtatttgaatataactcatgcacatctttctgtatatacttcacatcatctctagattacttatgatgcctaatacagtgtagatgctatataaatcattattatgctatattgtttggggaataatgacaagcaaaaaagtttgtacatattcagcacataggcaattttttctgaatattttcgatccaaggttgttggttgactttgcagatgcagaacccatggatatgtagggctatttacaaaatttttaaatctgcaatgcttgtctatgttggtgtttggattactattttacatatgttatagaaacttaaatgtggaatgtttaatttttaattaagacttcatcgcctgattcttccaatgaaaattccccggcaactcccccagatgagcaaggtcaaggtgatgccccaccacagcttgaagatgaggaacctgcatttccacatactgacttggccaagttggatgacatgatcaacaggtgagttggtgtgtaacacccaagaaagagagcagacaggaaagtaaccccactgcctccttaatagtctttatagcttcgtcactgccaagtgctttataacccatgattcttaatagatttaataaatgaaagggagtgacagtgttagtaaaaatttcacattaatgatgatgaccctagttgggttgtttccgaagtaaaattgtatgttcagtttccctcttggagagtttatgaagtttttttctcattggtctcttggttgctggatgactttcataatttttgggatggcctgaggtaaatcaggtcatgaggacattgagttcctcagagcctgatcctagtgaactcttgactagtttgagctatttaaccatcctagatgtttcctttttttggtcttcatctcagggaacagttcagaatataatttttcacacttatagtacaaacaaccaccctatcccaccccacacactttgattatttagaggaaacctccaagagagtgaagctttaagcttttgtgcagaggaagaaaaagatttcaagaggctagggaagagcacatcaaggaatcccatgtgactgtgatcttcaccagactgtgggctcaacaagtgagtgctaggaaggtgcgacacatttccccctcactccccaaaaggaaagtaatgaaaacacatgttcttaaaggcacttgctttactgagtttttttttaaatttcattttctaaaaataagtcaacactattaaatgcataatgtgaggggaaatagaaatcctttgcattaaaaaaagaaatctaaatacataaataatgagtatgcgttaacagaaatattttgtgtaggtaaatttctctgtaatttcccccttacatacacatattcctgccaaaaattactgttaacaatcaatacattcttcagattacctttgtgtttactatcatatatgaattgatttttctataaatagaggattcttactataattttgtaacttgctttcatttatcttgaatatttttcctattaataaattccattgtttttaattatatatttataagaatacattgtgtgattctggcaggtgcctatagtaatggtatataataaattatatttaatagtggtccctgaccattctctatagcagtgataccatagcagaaggttgtattgtttgttgcttttccatacttgtctggtggttggtgattggtaataaaatacttcttaggctaaagttgcatattattagcaagttctcaggggggagaaaaatacaaatgattttttttttctttttttctttttttttttgttttttgttttttgttttttttgagatggagtctcgctctgtcaccaggctggagtgcagtggtgtgatctcggctcactgcaaccttcgcctcctgggttcaagcgattctcctgcctcagcctcccgagtagctaggactacaggcacgtgccaccatacccagctaatttttgtgtta

SEQ ID NO: 136944 - DNA, 1016 bp, Homo sapiens
cactgcaacctccacctccccggttcaagcgattctcctgcctcagcctcccgagtagctgggattacaggcgcccaccaccatgcccggctaatttttgtattcttagtaaagacggggtttcaccatgttggccaggctagtctcgaactcctgacctcaggtgatccacccgccttggcctcccaaagtgctgggattataggcatgagccaccgcgcccagctaatcttttttctttctttctttcttttttttttgtagagacagactggttccccaggctggtcttgaactcctgggttcaagtgatcctcccaccttggccttccaaagtgctgggattgcaggcgtgagctactgtacccagcctatttttttttttttattaatacacaggaaaggtgtgatttttctcttaaagaatcggaagatgaagtctcagtttttgtttaaccagcaaaaggaaatctggtgtttttactcagttgtccagaaaaaaagcttaatgctggaattaatcttttttttcccccaatgactttggtctactttaggtgcagttgaattatctaacagaggactaccattgtaataactttcaattcattttttaagatattgcagattaaaaagcagtaacatttcattttctgaaataggatagctatggatgtgttataactaacagtaggcactatcacaattgaaactgattattgtcaaaattaacatgtttagtactttaagttcaactccatggcaagggaaagtttgatttatcttttaataattcccctcttttgtttaaagaacgtgtccttatgcctcattaatcttgtagaaataatatcccaaagtgaaaatacaatacgcggacaggttacagttgttttcaccactcagaattttttgttcttttatacgttcactaattcatcaaaattttttaaagaaaatatctttttttattttaaaaatgttgaatttttatgggtatatagtaggtgtatata

SEQ ID NO: 136945 - DNA, 1469 bp, Homo sapiens
cagaatagtataaggatattgatgctaaatgaatgatttatgaacaaaataagattttaaaaattgggaaatgcttttaaggtcaaagacttattttcagggagcaaaatactatttaaatttgcctcttcttgtggtgctgctgatcaccattttgtgtttaaggctagtgccataatttgtaacattttcagttagtgttaatattactcggttaatctacttttatgcaattaaatatttgttagctgtcggtgaagtttccagttatttattaccttttattgtatattggacaatgtaaaaacaaccagatgaacattttgtttgcattaatttttctccctttttcttaggccttgatgttaaaagtgaagcatgtcagcgatttttccgtgatgggctaacaatatcattcactaaaattcttacagatgaagcagtgagtggctggaagtttgaaattcatgtgagtcttgcatttgactttaaaggatcagatttacatagtgatgcctgtgagtgggaagaggtatatgtgtgtgtggctgtgttatatttattctgttataattgaattaaaaggtctaaaaatgaaaaacttaaaaatgtttataaattaagtctcttgaaggccgcatggtcatttagaataagcatgagatttagagttaagcttgggtttaatctctcctctgggatctcaagtgtctgtgaccttaggcaagtcatcacatttcattgaaaatgtaatgctatcaattgtaaggtacatcactgttttatggactattaaggaagaaaaacacccaagatggggcatttcatatacgtctgggacaccaaagggtcagtatagaggtaaatgagaaatgaacttgctatgcagaaagggacagcaaaaaatcctgcatatctcaaccttggcacttggtggagggagggattaaaaaaaaaagtgaaaatctaaaccacaagccagtatttaaacagtttcgtagtctgaattcaaattatagttgcaatacaaaaagcccttaagtggaaaatgtaaagtggtctcatgtcggtagtgcccccaagtgactagcagaagcaaacacaattcctctctgcaaataccttccatttaggaaaacagtaatgtattgttcattgattataagatagagtcagattccagagatcttaaaaagtgaaaaaagtatatgtctcagactgataaaatgccataactactctaagtctctgttgcttttgttttttgtgtgtccccccgcaagacggagtctcactctgtctcccaggctggagtgtagtggtgcgatctcagctcactgcaacctccgcctcccaggttgaagtgattcttctgcctcagcctcccgagtagctgggactacaggcgtgcgccaccacgcctggctaatttttgtatttttaggagagatggggtttcaccatgttgg

SEQ ID NO: 136946 - DNA, 1461 bp, Homo sapiens
ataggtgtagaaatggaaactttggaagtggcgtcagacttctgcatttgacatttagctagcaaatttatcttggatgattgacatattgtttattttatttatttttattttttgagacagagtcttgctctgttgcccaggctggagtgcagtggcgccatcttggcttccttggagcctctgcctcctgggttcgagctattctcatgcctcagcctcccgagtagctgggactacaggcacatgccagcacacgtggctaatttttgtatttttagtagagacagggtttcaccctgttggccaggctgatctcaaactcctggcctcaagtgatccgctttcctcagcctcccaaagtgttgggattaacaggcgtgagccactgtgctcagcctgacatactgtttagactctagaattgctgcctctcgtgtacaaattccacagagaaaaaatagtaacttgcatcttacctgtggacgtagagcaggaatagatatcttatggtgcctcttgtattttttaagccatagcaaatggcttttgaaagtaccatataaattatgaagtaaacaaattctaatttgtcctttgataatcagtttgatcccaatattaatgattagaaaaatggagagatcgttatttgttaggatacgattaatattggaagatatttctgtttgaaattgcagtgttttgatcttgtaaatcgcctttcccccttgtataacagaggtgtattattaacaatactcatcgtctggtggagctatgtgtggccaagttgtcccaagactggtttccacttttagaacttcttgccatggccttaaatcctcattgcaaattccatatctacaatggtacacgtccatgtgaatcagtttcctcaagtgttcagttgcctgaagatgaactctttgctcgttctccagatcctcgatcaccaaaggtgtgttggtttgttattttcaaaattaaataatacaattgttttgttctgacacagaatcttcagtgatctgtatttaaagtgtgacaatgaaataacactttaaatgaaaatacacacaaccaggagcctttttcgtagctttgtcgttctagttctttgttttttctgcatgtataattatccccattgtcttctgtccagcctctttagaagtagtcataatttgggttagtaggaaacagactgtattttttctttgaaatagagtaggagattacttctttgaccaaggactcaattgttgttctgtagggccgtgatcattttaggcattctaagattttgactccaaaatcaagtatatcctctaaatacctaataatacatcataaaattacagaaattgttaatgaaatcaatatagtaaatcttccaaatctcacttaaatatattgtgtacataaatgtaagttttctatattggtgtaaacagactg

SEQ ID NO: 136947 - DNA, 3759 bp, Homo sapiens
cagaccttagtttttaattgacaattgactctcaggctattagttactgtgtttatagggaaattttaatgttttacaactaaacaagaagtagattcaaaattcattaccaagtagcttcttcttaactctcttgaagtctttctgcctcctgaaaattattttaatataaaagactttacagtaattagaaggtattcattcttatatggtgggatatctgaaataggagcatgtcttctaattcctgttcaccacttacattggtacagacagacagaactatgccccagtgatttaatctatacttactacgtatactgcttctgtctcacagatggaattactatgaacaaaatgcaatgttttgtggtcctttgaaagatgatttattttattgaatttactatttctagtatatttcaataaggcttttttttcgtgctttttaccctttaaagtaggaagttaacttttttcattaattgtgttacagggttggctagtggatcttctcaacaaatttggcactttaaatgggttccagattttgcatgatcgttttattaatggatcagcattaaacgttcaaataattgcagcccttattaagtaagttacatttaaaaatcaatggttagtgcaccgtagaattgctggtttttgcttcataaaaattgagtttttcaagtgtggtttcttcaactaataactgggattttttaaaagtaatataaagaatttagtcctaaattgattttaagaaattgcgtatttacaggagttttgtatctttcttatttcagaccatttgggcaatgctatgagtttctcactcttcatacagtgaaaaagtactttcttccaataatagaaatggttccacagtttttagaaaacttaactgatgaagaactgaaaaaagaagcaaagaatgaagccaaaaatgatgctctttcaatgattattaaatctttgaagaatttagcttcaagggttccaggacaagaagaaactgttaaaaacttagaaatatttaggttaaaaatgatacttaggtaagatacttacctcttgaaataattgttaatgccgattttagaatcatacttatcactgaatttttcttacagattattgcaaatttcttctttcaatggaaagatgaatgcactgaatgaagttaataaggtgatatctagtgtatcatactatactcatcgacatggtaatcctgaggaggaagagtggctcacagctgaacgaatggcagtgagtctttcagttcttcttcataggaataagaatctacttaagacaagaaattagaatagctctagctaaaaaaattagtaatagtaacattttaaagtaaactgaaattgggaggtgttttgattgatttataactctgttaatcctgagaactttttgaaataacatagtttattatttggtagtgatatgggtagctttaaaacatctttgataaacttagtgatgaatgtggcgttttgaagtaattattagtttgttggagagtgggaagttggttgaaatggagtaggtagagttgatctagaaaatggattgggtagtatctagtaccttataaagtggcctattgttcatttgaccatttacagttaaacgttttaaaacaggaaataaaattactagaataagatctatacaaattgttttatcacgattttgagaattttattttgaaagcccttattttgacattgaaattttatgaaactttatgtaccatagctattttgtattatattgttttgaaatgagtaagtatgccatttaagttacagtgccaatattttttgaatgtatatgtgtaacagtcctggggaaacatctgtaggagaactgtccttgccctcaaggagccctcacttaataggggagttagtgattagagtatgttaaaatgcatgtggagactgcttagatattgccctgtgttagggggtcaggtggtagacatctggtttcatacatatgatgtacgtatctgcctcatggaaagtccagcacagagctattcaaagtgtgctctgaagactggtgctggttcttgaaccagtcctagataggacagagaatggcattaagtgtttagaaactttcattgcagtttgacattgcgacatttttattgtgttttacaaaattatctgtggctctgcagtggctcacgcatgtaatcccagcactttgggaggccgaggagagattgcttgaggccaggagtttaagaccagcctgggcaacaaagcgagaccctgtctccatattaaaaacatatgtgtatatatgtagaataacataaaaacaaatatctgcaacagattagacattaaaaactggctcattatcagctgagacatgtacttctctagcacattttgggcctaactactttttattctcagctaaatactgcaaaatcatatagtgtggattactccctgtttgtatcatgagttagcactttattctgttgctatagattaaatgaatgctagttgagcaagctagcacagtgttacagaaaaacagactgtggaagcatatgacttgattcatattccaattctagcatctgtgagcctgtttacattttgtaatagaataatgtatctcttactaggattgtttggaaaattaaagagataatggataagcaataatagtgcctagcacatgataattgttaataaataaaagtaaaaaatagagagcctttttacccaaggtcaaaacataattctgtggcaaaattgggataaagaatccaaagatcctaaaattggtcctgtactcaccctaccatggtgattgtgtacttaaataatatttttctgagtaaatgctggagtgtagaatcttcttaatttcagtattatttatgggagcatttctgtatgtgcaaaattgttataaaatttcataattttccattaaagcaacacataagtatattttaccagtattatattttgtaaatgtgttttgaatttccttatattatttaataatagtgtgagcaattaagaaaaaattgttttaatttctgctttcaaacacgtttttgaattaacatttaggaatggatacagcagaacaatatcttatccatagtgttgcgagatagtcttcatcagccacagtatgtagaaaagttagagaagattcttcgttttgtcatcaaagaaaaagctctgaccttacaggatcttgataatatctgggcagcacaggtaaggaatttaagatgatggctatttagtttttaaaataaagatactaaaaactgaagaaatacagtagctgtcatgaaatggatgcaggcttgtattgtttgactttgagaacgtttaaatgcttgttaccctgccaggaatctttttgaaataaccaataatcttttaaaaataaaaatattcttttatctgtatttgataaaggttgagaatttgtcagtggttttaaataaagatgcaaacagtaaaatcataaggaatgtctattgaaagagagtaaagacatctgtaattggtttcttcatagatttaatagaaagcaaaaacctccagtgtcaggagaattaattcacttgattatttataaagacctgtaataattattccagagaatttataactcttcagaaggattagtaacctttttagtttttgagttggaaactacaactccttctattatcttaatgac

SEQ ID NO: 136948 - DNA, 2023 bp, Homo sapiens
tgtgccttatttttgtatttgcaatattaaaattgtcaaattaaataaattgtattaaaggtttgtatgaaccgccaaaatacacattagctgtatttattatatcatgaaattaagttgccaggttttagatggcagttctaaagcattttataatgttagaatttttttttttttttttgagatggagttttgttctgttgcccaggctggagtacagtggctcgataccggctcactgcaaccttggcctcctgggttcaagtgattctcctgcctcagcctcccgagtaggtgggattataggcatttgccactgtgcgggctgtgttaggaattttcttgtgttacatagttaaatgaaggagataggagtactttattaattgtcagcaagcagtatacactacttaatctattactcagattcttgtgcattgtgatttcgtttttgtttttcaataggcagggaaacatgaagccattgtgaagaatgtacatgatctcctggcaaaattggcatgggatttttctcctgaacaacttgatcatctttttgattgttttaaggtaattgttaacatagcaaaatattaccattctatttcaaatagaattgattaattagatctgtgaattacttttagccaataaatacttaaatagaaatcccattaaacagtctgtggtgtgaaggaattggcccattgttttcttttccaacaagaacttgatgttcattttcttaatagcccccataatggaaactcaggctatcactttttctttctttcccctggtagtttctattttagttacaggttcaagcaaattgtaggactacagggaaggatgattggctacaataaacagtaagatgaaagcaagagaataccaatatcttggtattctggggtcatatgtacaagcaaaatatgagttaatcaaaatgtaactgataaggtagcccaagaactcctcctacagtcatatctgcattgatgccatcatgttggtttttgaggccatgttttgtaacatctttgattagttgccagggttaggtttgtgaaagctcaagtggttagtgaatttgtggattaagaacgtaactttttggcagtttgcactaagaggtgttctgttaacaactggcattagatcaataggtcaccaacgtttcttgttaaaaataataattatactgaccagtgggaacataaattgctatagccactttggaaaatacttggtatttctggtaaagtttaagattctcataactcatcagtttgacttctgaatatacacttgagaaactcatgcttatgtacaccaggatacgtgttcagcaacacttgttagcagaattacttgtaatagtgaaaaaacctgctatgtaggatagataaaacatagaatagataaattatggaatgttcatacagtgcaatatttcacggcaatgaaagagcaactcaaccatatggatgagtctaataaacagaaggttgaagaaaggaataaagccacacagtaattaatacaccttgattacattaatgtaaagttccgaaatgggcacagctggtttctgggatgttacttgccgtgtattattttttacctgggtactagttacacaggtgttcacattgtgtactgtaataatggtatatgcttgtacttttctagatatttcacagtagaagaaaaaaataccatttttactggcttccatcacagacatgttagatcagtaggtactgaagcccaagagtctgtattttaagcaagtttcacagataagtcttagggacattaaagctttgatttatggaaaaatcgctgccttatggaaaattttattttgaagggaacaaattattgagtgaatcttttatgtggtttttatatattttgtttctatacatgtaaaagcaaaacttaaatactttttccatccattgaagtatatcaaaggcagctgaggaaataatagaattggtcatcatgggcactg

SEQ ID NO: 136949 - DNA, 1217 bp, Homo sapiens
agactgggtaatttataaagaacagaattttatttggcttatgattctggaggttgggaagtacaagaggcatggtgccagcttaaccgtgagttttgggggggacattcgaaccatagcagtaactttactcataaaacttttcccatattgcttagcagcatccctggtctctactcactaaatgccattagtaccctgcccttccccaagcatgataaccatgttgtattacaataccattttagaggttttaaaaaaatgtattttagagtttttaattgggtgtcttctaaattgaaatagtgtatcatttatttttcttttttggaatttaactctaccctataaaaaaaataccaggctaactatattttcagatctcacttgaatcattctgtgcttagctacgttgcttttgatgaatttgaatatagttaacctggtgacaatttatgaagtggtgactaaatatgtgttgttttcatgtcacttaatttttttctaggccagttggacaaatgcgagtaaaaagcaacgtgaaaagctacttgagctgatacgtcgtcttgcagaagatgataaagatggtgtgatggcacacaaagtgttgaaccttctgtggaatctggctcacagtgatgatgtgcctgtagatatcatggacctggctctcagtgcccacataaaaatactagattacagttgctcccaggtaagagtgtactgctttgctcactttttgtgacttttccccttcagttaggttggcttagttacaggatagttctgttactctgacattgttagtttttaaatgatcttccggagttgactttttttgttcattagtctgctttccttaggatctgtacatcaaggttttgtgactcatctgaaaagcattttagtctccttgggagaaagtataaacagaacagattatacagtggtggcattatcaagtgtatggttctgaaatgccgtttcgaatagaattcgaatgttaaagctgatagggacttcagagggaagagaaattaggttttctttgctcatagggaagttaagaaaaattaatagaatttcctaaccattaaaacatttagtgcctccacagtgagcaaatcacacagtttccctacattctaatttgtggcatgtgtattttttaacacatggtaaagtgaacattgctgagtaatttctcacatgtt

SEQ ID NO: 136950 - DNA, 1784 bp, Homo sapiens
tctttattttgattttggcgattatttttaaatgtagttgtcattctatttattttcttagtcaaatatacattttttgtgttcttcactgtactaaaagatggcccatttagagtaagtcagggtcttgttatatattaattctggattttatgatacggtagaatctcttaaaatactggctaaatacctaccctctggcaaacttggaaaatgaaactttctgtcagtgtgcctaatacttaggatctgtagtgtgtacagatatatttcagtccatataatacaaagcttttataacagtgctgggctttttggagttctggtagtaagtgtgaaataaaaacaaacttaaagcttttattatttaaattaaactctttactgtaattacaacatgatgcttgtattgctaatcttaaaagaaaagcttttattttataattctcaaaataatttgaaaataaaattctcctgagtattgatctatttaaaacattgaaatcatttgtttaaggaccgtgatacacaaaagatccaatggatagatcgctttatagaagaacttcgcacaaatgacaaatgggttattcccgcactgaaacaaattagagaaatttgtagtttgtttggtgaagcgcctcaaaatttgaggtaagactttttaacatagaaaatttcaatacttaaaatttatgtactttattgaaaagaaacagcatattggctggcaaatgcaaatttttaaattagtggagtgagaagaggctatataagaagtgtttggaacaaaagaattctttattacatctacctcctttttttttattaatgaggaagtaagccacagttaagtgataaatcagaatcaaggtaatattgcctttgggttcttggttcagaattattattatatacatactatatttccagcaagtatgccaagaagtttcatagcatgtctttaaagatggattagaccacaagaacatttaaattgatgaaacatgacaagataaagtttcataatttttaaacatttattttagctaaatttctttttaatagctgtctttatactatcttaggtgtcatattctggttactgaaataatttgtcctattttctggtaatacagttggaactgataacatgaaaaggaaaaataatgtgaagagaaagagagcagggtgcagtagaaggaatattcacagtggagtcaggattcctaggtgtgaatcttgtgtcaaaccagtaatttaatcttgtaaaaattctgtaaagaatcatgtttggcctggtgcggtggctcacgcctataatcccagaactttgggaggccgaggagggcggatcacctgaggccaggagttcgagaccagcctggccaacatggcgaaaccccgtctctactgaaaatacaaaaattagccgggcgtggtggcatgcgcctgtagtcccagttactcgggaagctgaggcactagaatcgcttgagcccgggaggcagaggttgcggtgagctgagattgcagcactgcattccagcttgagcaacagagtgagactgtctcaaaacaaaaacaaaacaaaaccaaaaaacatgttttctttatatgtaagattaaatgattgccaggatcctttacagctctagattactatgattatacctcagacagaaatagaaaaggtcatgtatatgtctttatttaaacagttgaactttgtctcacttttttccctaaggctagaaaaaattagcaaattggaaaagctatag

SEQ ID NO: 136951 - DNA, 1073 bp, Homo sapiens
caaaacagattagggtttcaatgaagatagcaaaacagatgagtctttgtggtgacacctgtgggcaaacttggctacaaacagagtgtcccaggatgttttcttaaatagctaataagaagaaaatgctaagagcattttctttgattgaattcttccttacaactgtagcataatctttgtgatgctagtcttgcaaaaaatgtttctattttataattttgggaataattacataacataagtgctttggtacagttatagtatagacattagtcattgaggtatactcccatttggtgaagttggagaatagtgatggatgctttttgtgtaaaataataatgtaataaatgtcttatcttttgaagagtttaagttggttgtgatattttcattaaaagaagtaaatgtacaaaagtataatttttaagtttttacatcagtagctaagaatttagatagtacgaactcttctggttacaacagagtttaattgcctaattatattgttaagttcttctcgtttcagtcaaactcagcgaagtccccatgtgttttatcgccatgacttaatcaatcaacttcaacacaatcatgccctagttactttggtagcagaaaaccttgcaacttacatggaaagcatgagactatatgctagaggtatgtattgtaagctaaaataaactatgggaaatagcagggacctttttttgcattaattaccttagaaatgtaaatcatgttcctttatggatttaagatccactattactcccaactcttagacatcctaaactctaggccagcagtttaagagtcttcactaagtgcttgccttcccccattctctttgttaaatagatttttgttctctgctttgggagctctgcctgccttttttacgattgatcgctaccttcttaggaatgtacttggctcattttcaacctttatgtcctttaccaccacctttagctttttaaaaggaaacttgttttgtctaagtctgttcttactttatagttcttttataatgccaagcctatgttttgtaagtgcttcaagac

SEQ ID NO: 136952 - DNA, 1099 bp, Homo sapiens
tcttgctctgtcgcccaggctggagtgcagtggcgccagctcggcacactgcaacctccgcgtcctgggttcaagtgattatcatgcctcaacctcccgagtacctgggattacaggcacatgccgccattcccggctaattttttttttgtagaaacggtttcgccatgttggccaggctggtctcaaactcctgccctcagatgatcagccctcctcagcctcccaaagtgctggaattacaggcatgagccactgtgctcagccatgattccatttttatatgaaatgcctcagacttaagcagggagaacaaagggagagggtggtttgtacagggtttcttcttggggtgaggaaaaatgtagacttagattgtgatgatgattatacaactgtactaaaaaaattgaattgtatttaaatggatagattttatggtactttatgactcgatgttttttttttaaatgaacttttaaaataagttctaaaatgggccctagaaaacttgctgtttatgatgacaagaaccaatttatgttagtctcagccatgattcactacctcttcctacctattttcatagacatctgagtaatttagtctcatctaattcttcctgctgttttcagcgggatatttgccacctagacaatatgagtcaaaagtggattatcctcctcatttgactgctagctaacaagtccaggtatttgttttgaactgaatatttactactaaactaccaatttatatatatacatatatatatatataaatttgtcttgacagcttggaagcttctctgtagtaagagggcctcttcattcctatttagcataaaggcatcttatttcttgacttttattgattagctgtcagctgaatgtttccaaagttctactctttgtgcagggtcccagttcttcataagtaaagtgttagcacctaaacaaaaaaagggaggtgggttgttagctaaaactagtgggcaaaagtttaacaaaatagttacatagcctcaaagtctctctctacaaattacttattaattacaaagagcaaaatagtacctttacatcagagaaacctgcct

SEQ ID NO: 136953 - DNA, 1307 bp, Homo sapiens
ttcttcatgaaaacacctttcaatataacaggtaagaaattgaagaaaaaaattttgtcttccttatcagttcatagaccacttaggtcagtcttaggctgcaatcatgaattgcttcattgtgtgtgaaggttgcacgaaggggttgtgctgaataattatttttgatagcatatttaacagattattttgttttggttatgtaacaggaacgtatttttgtggggaaaacaggagatggatagaaaccaccaactggtagaatttaggttgccttttaatgataaaggattagtgacattttaactggcctaatttctttggttgaagtcaaagcagtgatttgggttatccatgtgtataatgcatggttttttcttaatttgcagaccatgaagattatgacccacaaactgtgaggctgggaagtagatatagtcatgttcaagaagttcaagaacggcttaacttccttaggtttgttttatacagttagtgttgctctctttaagaaaaagataaggaatacagaatgaatagactgtatagcttggtctttgttgggtggccttttcccaagtccccaagtcatgtaagacatttccctgtatttgttactaaatactttaaaatgattcgctgagttttaactttgttgcaatattttaagagaacacattttaacctttagaattgacttcgttcttcatatctgtttatgctggaaataatgtttatttttaaagggcaaattcccatattttgacacaaccggaaggaggactatactgacttaatgatatcatagacactaaggaaacgggggcaaaaggctgctagaccagcacctcaaaagagtggttggagtcctctggtatcttgtttattctaacagtggctgacaggcaatctaaagtcatgtgttaataatatcatttctgattggcttgaggggaaaaggtttattaagataaaatgtagtctagggctggattttctctgcaatatttagcgtttggtgatcatacacttaacagatgtgcaaagtgcctttgttaaaaattttgatggtcaggcacggtggctcacacctgtaatcccaacacttggggaggccaaggcaagtggatggtttgagcccaggagttcaagaccagcctgggcagcatggcgaaatcccatctctaaaaaaaaatacaaaaatcagccaggcatggtggtgttcacctgtagtcccgggtactcgggaggctggggtgggaggatcacttcaacctcggaggcggaggttgcagtgagctgtgatt

SEQ ID NO: 136954 - DNA, 1331 bp, Homo sapiens
ccactgcactccagaccctgtctcaaaaaaaaaaaaaaaattttttttttaaatgagaggttccttttgaattcaaaaaaccacatgtagcaaaagagcttgtttagattacaagtgtgctaacagaaatgcccagattatcactgcttcttgaagtctattttatttatttatcttatttttttgagacggagtctcactctgtcgccaggctgaagtgcagtggtgagatctcagctcactgcaacctccacctcccaggtacaattctcctgcctcagcctcccaagtaactgggactacaggcatgcgccaccacgcccagctaatttttgtgtttttagaagagacggggtttcaccatgttggccaggatggtctctatctcttgacctcgtgatctgcccgcctcggtcccccaaagtgctggtattaaggtgtaagccaccgtgcctggccccatttattttaataacatattctgggtagttttgtcctgggctgtgttaattatggatttctatttattgaactctgtgcttatttatggagaaaattttaagtagctatataatgattttgaggaaaaacctctaccaaattttaagaaatttggcatttgtttaaagtgcattgtttttttttttcctgtgtgttttgtttttaaccacctggatagaaggacttgcctcctccccacattgagagttactgccatagtaagcagtcgttactgattggcatgtgttatatgtctcttaggtttactagaacagaaaagtggtttcaagcctttttgccattttaaagtttggaatcagaggaactattgtagtttctactctgttagtacctctgtatgtgagctaatagcaactaactcaaggaagaggaacctgactttaatgcctgctgtgtgttgggcctgtgccagacactttatatttactccgaagcaacacagtgcagcaggtgttactcccatctgatcagtaagaaacccaagattccaatggcttaaggtagcttgtttgaaatatcacagccagtatacgatggaattgcactactcaactaggtctcttttacttaagtctgtgctcttcctattagaccggtagtttttcaaacttacgtaggagctttagggcttctgagttaagttccttgaagatttctgaacaagcagtaggaagtttcccgatttttcctttctttttcctctcccaacaactggtgcagctctactttttaaaatatatatcagattccaaatgggattttcatttgaagaagggtctatgccatctttagaaaaaaacaaaaaaatg

SEQ ID NO: 136955 - DNA, 1500 bp, Homo sapiens
ccacacccggctaatttttatatttttagtcaagatggggttttgccatgttggccaggctggtcacaaactcctgacctcaggtgatccgcccacctcagcctcccaaagtgctggcattacaggcgtgagttactgtgcccagcctaagtcttttatttttaactcaagctactaaacatgcttctttccaaaagtctggtttcaaaaactaaaggttcatggaatgaatcttttattcctaattcagctagctgcatttcaggcacaaagtgggtgttcagtgtgtgcttgttgaattaattaatatctagtggggatttttttttagtaccagataaaagtagagaaataggttattttgaaagaatgaatatctttttatctatagttaaaatataatggtgataaatgtattttataggtaatacagattgcctttccggataaaaattacataaatctaattgccaattttcaatgttttttcaagatttttattgaaggatggtcagctgtggctatgtgctcctcaggcaaaacaaatatggaaatgcttagctgagaatgcagtttacctttgtgatcgtgaagcctgttttaagtggtattccaagttgatgggggatgaaccagacttagatcctgatattaataaggacttctttgaaagtaatgtgcttcagcttgatccttctctgttaactgaaaatggaatgaagtgttttgagcgattcttcaaagctgtgaattgtcgagaaggaaaactagtagcaaaaaggagagcctatatgatggatgacttggagttaataggattagattacctttggagggtaagtcaaaagtaggaactctgtaaatggtgtctgatgtactttttcatgtacgtaaggaattgtaattttgcatataaattgtgtattttactctgatgtttgtctcaggaatttggtgtagttaggaattgttcatttttattatgtcacctgtcagtgggctttttcttctctcttcctctccctcctcctgccactgatgttccttttgtcttagcttagtatctgtgtattccatagatgtgcactaaacatacaaatctttcattcctcccccgtggatattaatgttccttcccgagttttcattcagtgtcgatctgtttcctcctcttcaatgtttaacactaaaatagaggacagaagagaggacttgtgtttagtatagattatgagtatatgctttattggcactgtttaccttgtgatatttttaaatacctgggggaataaaatactatctttttaaggctaatctatttttatagtactactctattatgcctatctttaatctgacctgttatacagcagtttatattgtttggatgtctcacatattttcctgcaaaccatagataaagatgtttattgtggcatttgagtatttaaaagcttttaattaagtatgtggttttcaacattgttttaacagcagaaa

SEQ ID NO: 136956 - DNA, 1101 bp, Homo sapiens
tgatgatattgccagcagagctatagatctcctcaaagagatatacacgaaccttggtccaagactacaagtcaatcaggtgaggattgatgtgcattaaaacttccatatataattctttcggcccccatttctcttatacaaaagagaaaaaatattatctaaatgaatcttgccttgttagttgtcttgaagtgattgggttatttttaatataactatttattagatgttgaaatggcaaagaaagtctatgtgaattcattttgatgctaacacctaatcctgaagttcacttttgactaatttatgtttgttaacttatgtaatgctagcttccttttaataaacatacattttattattgtatggattctctacttaaatatgactgttgttaattgagtgctacaattaaatcagccattgccatctttaattggattaatatttggtttttacattttaaagcaattttaactgtgtttatttggcctgatatttgtaggtggtgatccatgaagacttcattcagtcttgttttgatcgtctgaaggcttcctatgacacattgtgtgttttggatggtgacaaagacagtgttaattgtgcaagacaggaagctgttcgaatggttcgagtattaactgttttaagggaatatataaatgaatgtgacagtgattatcatgaggaaagaacaattctccctatgtcgaggtttgtgaataactaatctattggtgctaattcttaattatttgatattttcctagccatttggtaaaaggagagcagaaatttttctcgtttgaaaattgttgtctttgcccattaaaaacattttcatttcatctaattttttttaataacctcccccactctcccatctggttttgttttggttttttgggtgaggcattcttaagttgttttctagttttctttttgtctttgacattattactcattaagtgttgcagtggcattttgcagttgaagtgtttttgtttatttgtttattttgagaaaaggtcttattctgtcacccaggctggaatgccgaggtgtaatcatggctcactgcgggctcaagcgacc

SEQ ID NO: 136957 - DNA, 2594 bp, Homo sapiens
agttttaccatgttggccaggctgatctcgaactactgacctcaagtgatccacccgcctcggcctcccaaagtgctgggattataggcatgaggcaccatgcctggccttattttcaagatactgaaagtaatacaggttgagtatccctaatccaagaaatccaaaatttgtctggtcccagacatttcatataagggattctcaagctgtattaagtatctttaattcacatcctcttgtttaataagaaaatacttagtgttaaatccccagcattattttcttggcaacaaaatttcagagtctgctgaatatgatgatgtctgtctttctttttccccccagagcattccgcggtaaacacctctcttttgtagttcgatttccaaaccagggcagacaggttgatgacttggaggtatggtctcatacaaatgatacaattggttcagtacgacgatgtattctcaatcgtattaaagccaacgtagcccatacaaaaattgagctctttgtgggcggtgagctgatagatcctgcagatgatagaaagttgattggacaattaaacttaaaagataaatcggtatgtatgtatagttaacagatttttcaataaaatcaaaccagagactatcgtttaatcagtaaatactaattgagcatttgttatgtttgggactgtgttaggtgttagagttatagcattaaagtatagcatgtagtctttcggattttttggttggtatatcactaagttttgtgttttgtgtaagtatttttccttgtttttgatattaacatagtatataattttcagcttattacagccaaacttacacagataagttccaatatgccttcaagccctgatagctcttctgattcctccactggatctcctggaaaccatggtaatcattacagtgatggtcccaatccagaagtggaaagctgtttgcctggagtggtgagtagatacagttttgaactactgtatgtaaggcatcatgctagggtttttgagaataaagtatatagagtggttctttcttttcttgaggagcttacagtttaatgagacaaaaaaatacagttaaccaccaacttcagaatggatccctctaaaaggtaattgtaacacagttggaatttaaaacataatttccccataggtatagtattgttacttttacataaaattaaccaattagagcttaattataacactattggatgtataaatttagaggaaaacagtcatccctcgtatacgtggagaattggttccaggacctctgcatatacccaaaatgctgcagatgaccctgtgcaaccagatatacaaaaagttagccttccatatacttgggttttgcttgctggaaatactgaattttctgtccacatttgattgggaaaaaagtctgcatgtaaatggacctgtgcagttcaaacttgtgttgttcaagagtcagctgtatcactttctaaaatttataccacaaaacggatagttcttttagaactatatatgagctgggcatggtggctcacacctgtaattccagctactggggaggctgtgaggcaggaggattgcttgagcccaggagttctaggctgcagtgagctgcgattgtgccattatgctctagcctggtcaacagagtgagaccccatctctaaaaatataaataaatgaaaacaagaactatgtaggaaaatacctgtaatctttatcagattgtcagtaacatatagccaaagaaatatttttaagctctcctttcgcccctcccgacagaaattttaatggttacaatagtagcagccactccagtgtcaggaggatttggctctctataacaactggattaagaatttggtagtgggcatggcagccttttgttatgtccagagtctaaattgtatatatgagagaaatggtttaatagaacaggagaggagctatcacaaaaaaatgactggaagtgacttgatgatgtatttgatctgcactattaaggatttgtagggattaaaagatgggaaagtcagactatttcaaagagtagaaatttcataagtaaaagtatagggattaacacagagaaacttacttgggcttttataaaacgggagtaaataatttagaggtaattattttgtgtattttatattctagataatgtcactgcatcccagatacatctcttttctttggcaagttgcagacttaggtagcagcctaaatatgccaccccttagagatggagcaagagtacttatgaaacttatgccgccaggtaagaatttttaaatgatgatcaagtacttgctggacaataaaggagtatattagcaaattctgtttctaaatggaccgtgctttttggtatagactataacaagagttgacagatgacagcccacaagccacatcaagccccctgcttgtttttgtgcatcccaagagctatatttttaagtggctacaaaaaaaaaatctagaagaataatattttgtgatacatgaaaattatatgaagtttaaattttagtgtccatgatcaaaaccaggctcattt

SEQ ID NO: 136958 - DNA, 2468 bp, Homo sapiens
gtttcatcatgttggtcaggctggtctcgaacacctgacctcaggtgatctgcctgcctcagcttcccagagtgctgggattacaggcgtgagccactgcgcccagacctatttttcttttctttaaaagaagcttttacttaaaaaaaaaaaaaaaaattatcaaggtatttttttaatcatagggcagttaccttagatcatcaaaatactttccaaggttgattgactattaataaagttggaatatttggtagctaatgcttaattgtattttgggattatcttatttttcccccactgtgtcttttcaccgtaatttaaaattatgttttaatattatgacaaaaggacaaaagctctgcttgctttgaggtgaatgtacataggcacttaccctttttcgatgtttgctttttagggttcattttcttggatatcactacattcctttcagtgaagcaagccagttaatatatagtgtcagggggcaaacaataaagaggttagagggaagagtttataatttttttcttgttattttcagtcagaactacttccttttgaaatgtatttttttccatctccagtggctgagaggagagtatcttgatttgaggtccctgagtagcagatgctttgtattgagagtaactgattaaagagccctgttttttgtttttgtttttgtttattttttttttcttttttaatcattccaggtcttgtcatgtcttaggaagtttgagcctatagcccaactgagtggattgttattccatattagtatggtcttcaagatatcaaaagttaaatatgtatgaacacatgaattacattttcacactgtctctttttttcctccagatagcacaacgatagaaaaattaagagctatttgtttagaccatgccaaacttggagaaagcagccttagtccatctcttgactcacttttctttggtccttcagcctcacaagtgctatatctaacagaggttagtttttggggttttttgttgttgttgttttctttgtttttccttttaaatttattctgtgttctttaaatttgacctttcatatggtaaggtgaatgatttgggtaaaattgtaatgaagtagttttgaaatgaaatattaatttgaaataaataatagtgagatggtcaagagtttcttggcactgacaatagtacaaatagaagttattttttttttaaatcttttaatacagccctctccccctcttctctatttttccaggtagtctatgccttgttaatgcctgctggtgcacctctggctgatgattcctctgattttcagtttcacttcttgaaaagtggtggcctaccccttgtactgagtatgctaaccagaaataacttcctaccgaatgcagatatggaaactcgaaggggtgcctacctcaatgctcttaaaatagccaagcttttgctaactgccattggctatggtcatgttcgagctgtggcagaagcttgtcagccaggtgtagaaggtgtgaatcccatgacacaggtaatacagactttttaaaaatccttttataatagtagatagcaatttttaaagtaaaactaattagtattttaagtgtagagttcaaggttgactcaatgttcaaagtgccttatttcagaggttttctttatgatgtttgtattaaaagtgcaaatacttttcgctgacagctgataatctgagggtagtttctccctgcccacttaaatcttgcttgactttcatttattttaaacctaacaaaaactccatatgaatctcttattaacttgtgcctggtagatatataaagacacagattgtaataagagatataattggtttatcttgttgcttgtttcccttcccaccttgggcttaaacccaagttctgagcttattctgactcggtttctgccttggtggcattcttgatccatgtcacaaaaaattctcaagacatgccagaatttgatacttatttatgagagatcaaactatgcatttaattctaagtaaagttttataaacatcataaatgattgttttactaagttactgatagaaggtaaaacttcagggataaagattttcttctttagaaatggcttagttttcaattgtggagatcagaatgttgatatttatggtaatatcacatataattgttttagctatgataatactgtggttatgtttaaaaggaagagccccctatatttttgaagtgattgctaagatacttccaggtgaaattacatgatatctaggatttgcttaaaaacaatcctggggtggagaagtgatggaaagcaagggaggatagtcagattaaacaatttggttcactggcgataattcctgaagctaagtaatatgtacatgggagttaattatactactttcgacactttgatgtgtgttacgaattttctgtaaaa

SEQ ID NO: 136959 - DNA, 1072 bp, Homo sapiens
aggcagtcagaattacctcgctaacaactacgtaatgaaattaatctgtcactgatttaacaacttgattatagcattaagtaaaaactagggtacctttcatacattagtcctcttactgctttttcagtattccttaatttttcttttttttttccaaagaaaaatgtggtaacaatggggaatacaagcagggtctgcccaaggcatgtacataaaagatgtacaatactttactgagtctctagaagggaaccagtctatttagtgtatcattatcccctgcaagttaagctgaggccagatttagagacacgagttgattgctctagaatggggatttgcagacacgtggcactacagtgcacaaggaagagaggaagcccactttgttggcagtgctttttgtgtaagttgccacaggttctataatgtgtatatgcaaggaagtcgttctgcaggagtgggtgatgaatgaagagcaattggttaggtctggttatgtacaaattatttactccaaataaaatggttaacttttttcagatcaaccaagttacccatgatcaagcagtggtgctacaaagtgcccttcagagcattcctaatccatcatccgagtgcatgcttagaaatgtgtcagttcgtcttgctcagcagatatctgatgaggttagttttatcaagacttctgtcacaattttaactttcctaggcccacttattttaatcactgtctcattctatagataatgtccccttaatatcagttttgtctactattaatattagtactttctgtttttaatcaactttatgtataataaacagcatccttttaaagtatacagatggggtgattttttttttttttgagacggagtctcactctgttgcccaggctggagtgctgtggtgctatctcggctcactgcaacctccacctcccaggttcaagtgattattctgcctcagcctccacagtagctgggattacaggtgccacacccacccccccatgcccggctatttttttatttttagtagagatggggtttcatgatgttggcca

SEQ ID NO: 136960 - DNA, 1138 bp, Homo sapiens
atattccacattttgtttatccatatacttggtgaaggacagttggatcattttccctttttggctgtgaataaagctgatgtaaacattgtgtacaagtgtttgtgtagacataaattttcatttttcttggataagaaactacgagtggaaaggttgtcatctttgtagtagtaaaatgtaatagtaaagagctagagaacttggggagcgtactttgttgtattgctgtttaaaggcaggaggtggggaataagccaggtgcagtggcagatgcctggacttccacctacttgggagcatgaggtaggaggatctcttgagcccaggagttcaaggctgtagtgagctatgatcacaccactgtactctagactgggtgacagagccagagggccctccgcccccacctttttttttttttttttttaagacaaaggcaacttgggaatttaaaaacaatggtactacacagtaattcctatttcctttacaaagtgaaacatttttgtttttctaaacataatttcactctcattctatcaacagttctatttactcgttatcttgcaggcttcaagatatatgcctgatatttgtgtaattagagctatacaaaaaattatctgggcatcaggatgtgggtcgttacagctagtatttagcccaaatgaagaaatcactaaaatttatgagaaggtaagaattatcacagaactatattccttgtaaacaaatgtttcttaattgtgcatgtggtttgatttttattagctttgctatttttaaaaattgaatcacttgcatcttaatggttgaaaattaattgatagctatgttgagaatatggtaaaattttactttgaaaatgaagtacttaagaatcgtgccatgtggctgctttttaaatgaaattgccttttgctgcttcttgtgggggtcagatataattgtctcatactgaatttgctttatcccattctcttttttcttttatcatctttctgtcctgcgtaaattttggtttgtcagttatggtatggcatttaagtatttttatttgattgtcttaaagcagtcaaaaataagagtgttagccaattagatatcattcctgaccttctattagattaagcaa

SEQ ID NO: 136961 - DNA, 1062 bp, Homo sapiens
gttactactttttgattaataaagtcagattagaattcattaggtacctccccaggcatattttaggttgtaagcctttgaaacccttcctgaatagttgtcagacaattgattttgaataaaatggcacaataggcaagcaacataatggaactagtcaaaagtacctaagtgctatgccacagtggttcctgagaaaggattggttgttggttcagaagtaaacaactcagaaggtctcaaaaagataggtagtgtgctcagtgtgctccttcagccctcctgaagacataggaaaataatggaattagactttattttctattatagtcatttccagactattccaaaggggcctcaagagttaacatgcagccatggagaggctgaggccaggtggtttaagtgagcagatgagttttaagcactaactagaagttgtgtgagatttttcttaaatacttctttgggtaatttgttcttgattgtaattttacagaccaatgcaggcaatgagccagacttggaagacgaacaggtttgctgtgaagcattggaagtgatgaccttatgttttgccttgattccaacagccttagatgctcttagtaaagaaaaggcttggcagacattcatcattgacttactattgcactgtcacagcaagtaagtatcttttttaattgtaagaaacttactttttgtaaatggagtgaattaatttaggctggcaaaatgtgtccccaaaattaaatatttattgtctctatggcatattggtattgaggaaaattttattatttaagagtgttttgcttaacctaaatgtttggttttagtctctgcaaatgccaatattaattgtcaaagcatgatttttttctaatcttagaatttagttttacctgggaggtatatagattagcctatttctaaaaatctagtttgcaagatttaaatcatataggacattagcctcctatcttagattcctagatgccaggttttttttaaagccaaacagaatttgatatgaaatttgtaagacagggtcattgtaag

SEQ ID NO: 136962 - DNA, 3048 bp, Homo sapiens
tagggtaatcctgtatccttactattaatttatttcccttttatactccccccacctctcctccccaagagggaacaatgttacaatcattttttaaaatggaaataatgtattaaatgtgaaacattttttatttcagaactgttcgtcaggtggcacaggagcagttctttttaatgtgcaccagatgttgcatgggacaccggcctctacttttcttcattactctactctttactgttttgggggtgagactttttaaaatatgcttatcaatgtgattcattctttaagcaagaaacattcagaaatttgtggttttagcttgcattaaagttaggacagtctatatttaataaatgaagtactactttatttcccgcactgtggtagtcatcttctctagttaactctgggtttttaaaaaagtggattttgaggatggacgtgtaaattgatattattctactctgtttccagagcacagcaagagagagagctaaacactcaggcgactactttactcttttaagacaccttcttaattacgcttacaatagtaatattaatgtacccaatgctgaagttcttctcaataatgaaattgattggcttaaaagaattagggtaagttttagttaatactccatttatatgtcattattagtaaatagaatgttttattgatgatttatattttttgagcattttggttaaatggaaaactccaaagattgataaaagggaccaaagaatgtactctgcatcagtggacgttagtaatctgtgattcacaaaatgcatatctagtttagtaaaatgaattgcttacttgacacttgaaatactgatgttcagcttcttttattttagcattttgggcctttttgcaaattctaatttttaaaaaaagtattcttgaattgtttatgtcaaaaatgagtctgatagagcagaactttctaccataacatctgatactttttacttaggcaaaatgatacaagaatttatttctgaagagatttgtagtttttaaccttcaaattagcatttcttctagtagttcataaagccaatttctagaaagttctgaagaaaacaaagttgtttgaatggaaagacttaaggaaattatctcatatccctccagctctgtctcgttctggctcctctctccctctttacctccctttcataagctagacatttgatttcttcccccccccaccccaccccccgcctttggcaggatgatgttaaaagaacaggagaaacgggtattgaagagacgatcttagagggccaccttggagtgacaaaggagttactggcctttcaaacttctgagaaaaaatttcatattggttgtgaaaaaggaggtgctaatctcattaaagtaagttctgtgttcttggttgtaagctacatatcataaccttctaaatgtttataatcaaatttaattaatttatagtagtatcatgtctttgtactttcttgatcttttctcttttttaagaatctttatcaaatttacagtaatttaagaaatacagttatgccttactttattcaagagacatttctaaatttgtatttaaataagatttcatggctggacttgctggcctcatgcctgtaatcccagtactttgggaggccgagtccagtggatggcttgagcccaagagttgaagaccagcctgggcaacatggtgaaaccccttctctacaaaagaaaaaaaaaaaattgccaggtgtggtggcgcacacccatggtccccagctacttgagaggctgagatggaaggatcacctgagcccaggaggtggaggttgcagtgagctgagatcgcaccactgcactccagcctgaaggaacagagcaaggccctgtctcaaaataaatagataaataaataagatactttataaagtaattgttgtttagtttttctctttggaaaatctgaattgttaatttcatttaatgaggcaaacctctgttttgtaagaatgcatcttgtatatctttaatgagttttttcatacatgtagtaacacaaggaaacaaagtttcatttttgtacattttatttctattcaaaatgggtttaatttgctatacacttgattaaaggagcaaacatttaaaataaaaattttgataagtactatattcagttctttcttaatatttacaaatttatttaacctgcgaaattaggtatgttagtgatagtaaatagtgttttgaaggaagatctttttattagaaaatctgagttttctgagatgtaatgagatcttaaattccaatgagtaattttaaaatgatttacttacaagagaactttttttttctaaaaatatatagcattgctaatatgtaatccctttttcaactttttaggaattaattgatgatttcatatttcctgcatccaatgtttacctacagtatatgagaaatggagagcttccagctgaacaggctattccggtctgtggttcaccacctacaattaatgctggttttgaattacttgtagcattagctgttggctgtgtgaggaatctcaaacaaatagtagattctttgactgaaatgtattacattggcacagcaataactagtaagtatttttaatagaatgtgataattgatcatttcaatgtttcaaagttgttttcctgtttttctttcagaaaatatttccaacttacgtatttctttcagtaactagtttaacatttttagtgagtgaatgaacagttaagaccattataggccgggcacggtggctcaggcctgtaatcccagcactttgggaggccaaggtgggtggatcacctgaggtcaggagtttgagaccagcctgaccatggtgaaaccctgtctctacaaaaaatacaaaaattagctgggcattgtggtgcacacctgtaatcccagctactcaggaggctgagacaggagaattgcttgaacccaggaggtggaggttgcagtgagccgagatcgcgccactgcactccatcctg

SEQ ID NO: 136963 - DNA, 3179 bp, Homo sapiens
cttgcttgctcctcaaaatagcattatagatatcaggaaagcaagtgttacttttattattacatttactaggaagaaacagaaagttacctaaaggtgggggaaaaaaagtggtaagcatcagaaccaggatgtgagcccatgtggttttaggattatttaaaactgagaaaattataatgtgttgatatatttagataacatttcattccttgccaaatttgaaggcaaaagtatcaaatattaagaaagtgaataatggctaaaaataaagatgcaagtaaagttagcatgtagacattagaattatactatcttgtacttttgagactgccatagaagcaacatcatatgaaacgggtttgcgggtgattggataagaagctgcacagtggtgcctgttgctgtatattttagattgttggaagatgaagtgcaaactcagaacactgcttcaggttgctgtagggttagtcgaattatgggtggtagaattattgccagggttgctttgtcagcataatagagtttgaaaggacagaatggccgtgttcatgctacaagaatctttccttctctcagcttgtgaagcacttactgagtgggaatatctgccacctgttggaccccgcccacccaaaggattcgtggggctgaaaaatgccggtgctacttgttacatgaattctgtgattcagcaactctacatgattccttccattaggaacggtattcttgccattgaaggcacaggtagtgatgtagatgatgatatgtctggggatgagaagcaggacaatgaggtaaatttgagttaccatttctgttttctgtgtttcaagttatgataccagatactattctctcttaagagagtgttatactttcatcaaacgtattaaagtatatttgaaagttagggatgggccgagcacacacctgtggtctcagctactcaggaaactgaggcaggaggattgcttgagcctgggagctggaggctgcagtgagccatgatcatgccactgcactccagcctgggttacagagtgagaccctgtctcagaagaaaaagaaaaagtaagtagggatggacttctcccagccagcatgaactgctacctcttaacatagtatagttctcactacctaccagaatttaaactgcagataatttttagaatggtttgtacatttctaaagcaacagttggctgggcatggtagctcacacctataatctcagcactttgggaagctgaggcaggtggatcacctgaggtcaggagttcaagaccagcctggccaacatagtgaaaccccatgtctactaaaaatacaaaaattagctgggtgtggtggcacatgcctgtagtcctagctactcggaaggctgaggcaggagaatcacttgaacccggaaggtggaggttgcgatgagctgagatggcaccagtgcactccagcctaggtgacagagcgagactccgtctcaaaaaaaaaaagcaacagttaatgtactcgtgtttttttgtgtagagtgtttagtataatttggggtttgtttgatggtaagaaccttcatttttgataatagttttaaatttttacttttctatttctaaattttaattttctattttatgccaagttatacagtatctgccaatttcactgtgtgtgcttacttttaggttattctttgaatttcccttagatcatagctcttcttgattaggaaacaaactttccctactttaaatagtctcacgtagtcttgtggcaaaatttaggctgcctactgagtatccagtgcagtataaagcagtgaagaagttgagttgtagtggcgaatcagaattgacataactgtaagatagctctttaaagaagagcatatggcaagaagacttaagttgtggtcatgtttgtgcttaccatgtaatatttccttggttttacttttcctgtttatagtgatagtgggaactgaagagagaagccagagtatattctaattgtagtaaatggttcttttcattccctcccttcagttgccagaactgattttgctctgaagaagtagtttatcaattggagcttctgaaacatctacttgcctcaactcttccctagacctgctgtgccagatggtctagggattgggttctgagcactttcactttataaaaaaaagcttcataaaggacacttatacccatacctgattaaaaaccactgctctgggaaaaaaatgtaattcaaattccagttctggagcccatcatatacctgggatattgagttaaacacaagtagatataggtaattgtactggcaagaagtaaatgaggcatagaaaatataacacaatttcaaataaggtgtaccacttttactctcatggtatcctctgctccatgttgtctctgcaccccagtgtactgtgggagtttttgtggggttttttgggttttggtttttttggcttatgtttttgtttccatccctagagtataagtttctcatgggcagggactggttgttgtctatttctatatcagagttatcagatacaactcagagaatactgaaagatagttaaatgtaaaaacacattcttctttgtagctgccatatgattatgacctttaggaattctgtcttcatgttacatcttacaccactacttctgttgttttttaaaattgtggtaaaatacatataacatgaaacttaccatctgtttttaaatgtgcagttgtcctattaaatacatttacattgttgtacaccatcaccaccacccatctccaaaactcttcatattgcaaaactcaaactgtagtcattaagctactccccattctccctccccacagcctctggcaactactattctttttgtctctatgattgactactctacatacctcatataagtgattatataagtgaaatcatacagtgtttgcctttgcatagctggcttatttcattttaaagtctaagtaatattccattatatgtatataccacattttccttatccattcatttgtcgatggacatttgggttgcttccccatttgagctattgtgaataaggctgccatgaacatggatatacaaatagctgtttgaggtcctgctttcaatatttccaggcatatgctcaga

SEQ ID NO: 136964 - DNA, 2026 bp, Homo sapiens
gttcacatgacaaaatacctaatgatgcatttctcagaatttatccctgtcattaagcaaagaatgactatactgatataggtatattttattgacagatctgagcattttatatacaacagctacacaaaggatatattacccccattcacacataaagaaacttgaagcctagaaagtttaagtagtttttacttgctcaaagttacttggtttataagtggtagagcctgcatttatgtctagttcagtctaaattactatgctaatgctacactatattatctatctttcttacacatggtcagggttatttggttatgataactaatatgtgaaatggtggggataaacactaaataactaaaaatttataaattgaaaagtgctttggaaatgagcataataggaatacaaatcatttgttcaataactgcttggcatttgtctcaacgtattttattatactttagctcattggtgacattttttggtttctagagcaatgttgatcccagggatgatgtatttggatatcctcaacaatttgaagataaaccagcattaagtaaaactgaagatagaaaagagtacaacattggtgtcctaagacaccttcaggtcatctttggtcatttagctgcttctcgactgcaatactatgtgcccagaggattttggaaacagttcaggtaaactatggatggacagtaatagagatacttcttaaaatgaacatctcaatacactaacattaaacctctaaaagacatgttggaaggcatctttttttaagcactggtaatattcaaactgtccttaattgggtgggtttttttttttttttttaggtccccttaggaagaagtagaaactgccatagtaagtaagggcaacatcctttagtctcttaaccatattattaactttttattaggaaaacatctaataaatacagaagtagaaaaaatagtatgaacccctgtatacttgtcacccaacttcagtagtagtcaacttgtggccagcctcatttaatctatattcttaacctattttttttttctttttttctttttctttttctttttttcttttttttttttgagatggagttttgctcttgttgcccaggctggagtgcagtggtgtgatcttggctcactgcaacatccgcctcccagattcaagtgattctcctgcctcagcctcccaagtagctgggattacaggcacccaccaccacgcctagctgattttttgtatttttagtggagacggggttttaccatgttggcccagactggtctcgaactcctgacctcaggtgattcccatctcagcctcccaaagtgctgggattacaggcgtgagccactgtgcccggcccctacctatttctttctagattgttttgaagcaaatcttagttccatctgtaaatacttaagtatgtgtctgtagtgtctgtctcaaaacatgatcatgataccattatgtttttttaaaattgcttaatatcaaatatctctgtcagtgtttgaatttaccgagttatctcataactggtttttactgatattttttaaaaataagattcagttgaggtccatttaccacaaatggttggtaatgatcttgattattcatctgtttcttttttccctttacaattatgggggaatcggaggacaaatagtttagcatgtaaattttcccacagtctgaattttgttgatggaatccctgtggtcgtttattattttctgtttttcttggtcacctgcatcttctataaacaccttatgagatctagaggcttgatcagattgtggtattatttttctttttgtggaatggataggcaacgctacttcataggggataatgtttatctccatgaggagtgacattataatgtctgtcttcttatgatgttaacagcaattttttattattattattatatatatacaatttttttttttcccctgagatggagtctttgctctgtcgcccaggctag

SEQ ID NO: 136965 - DNA, 2143 bp, Homo sapiens
tgcaaacaggacgcttcaccccttcatacttcaacatatatcttataagagatcatatatcagaataaggcaattttcctacttatgtatgatacagttatatccaagtaatataataacgatttttaatctctaatattcatcagtatatattccgatttcccaaaagtggtctttataacttatctctctatcccaatctgatactcatgaaggaatcacaaggatttggctgttagctctttagttgccttttatgtaaaataatctccctaacttgtgacttgtatcgcactgaaatttttaaagaatccaggccagttgtcttgcagaatgtgttttttgatttgtgtgattgtttcctgatgattagctttatgttaaatgttgagggggtgggggcaataaaactacataattgatgttttgtgtttctcactgcactgtattgggaggcatgtgttatccacttaattattaagtgatattaattttgatttcttggtgtcttaacagatctctcctttataaagggtaccttttcccttttgaaattagttgattacatgtttgaaagtttgaggagttgaatatggtttgaaagtaaatagaacggactggtgtaatttccagtaatgaaacaagctgatttttaacaaataatatatttgattttaaacttactgtatacaaatttttacttgtgtaaaatataatagagatcagattatttgctatgtagaaaaggtttttacaaaagtataaacagacagttcttgcatactttaaaatgtcatttcttgcttagaacaaatacacttaaattctctatatacattattctgtatatacaaaatcaggtattattgatagtttccagcagtgcctgagttttagcagtatgagttctcatttttgtggtatgtagtgatggtgtcttttcttagattactcaagagattaactctagaacaagttaaacctttctctcttcacttgggaaaaaaataaatttaagagtaactagatctgatctttttactatttataatccaaaatttaagcaaaatgaaagaaataaaatagtgattgtaacatccacataagagtgagatccaccacctcatcttaatagtatctttaattggattcaaaatgcatgcatgtgtcataccacctgaagcaaccatccttcctggagccgtactatccatcaattacaccactagttttgtggcagttctttgccgctagagtactagttttactatgaggctcactctcttaccccactacattctacagggaaagcacattctttttttcctactttttccatgtaattgaggaataaaatctcggttttatatactgttgtttgtggtcttgttgcttttttttcccctgaaaaatatagttgtacatattgttctgtgaatgttacatgttacatgttttatttcattcatttcttaggctttggggtgagcctgttaatctgcgtgaacaacacgatgctttagaattttttaattcattggtggatagtttagatgaagctttaaaagctttaggacatccagctatgctaagtaaagtcttaggaggttcctttgctgatcagaagatctgccaaggctgcccacataggtaagtactaattacacattgaaagtatatgttgtaccatgtatatactaacagaaataaaatttttactagtacttacatacaaaagtggagtatatcactgattactaaatacctgaaacagaatgatttatatactttgcataccttactgctgtggggcttttttttgtttttgtcagttaacttttagttccttctactctgcctgatctcttagccattttattatattatactcttacagtctctttcttcctttcctttcctttcctttctcctttttcttttcctttctctttttttttctttctttcttttttgaaagagacaaggtttctctttgttgcctaggctggagttcagtggcatggtcgtaactcatagtaactttgaacttgtgggctcaagcaatcctgctgcctcagcctctcaaatagctgggactacaggcatgtgccaccacacctggctaatttgtaaatttttttag

SEQ ID NO: 136966 - DNA, 3916 bp, Homo sapiens
ttaaataagggactatcttaaacagtgaatatccctcagtacttttacacatagaaagcactctcagtctatccattggatgaattaatggttaataatgtattcctcacatcccttgttttgcatttatgcatgtgtctcaccagaaattggaaagtctctttggtagaaaatgaccataaactgggattctagctccttctcaggttgctaatcctgtactcatttgtgtgtgcaaacttttgctttactaaggcttccattacagaaaaggaagaatatataaaaatttagcttattcgtagtttatcattttcagaacttaataaattcatgctttggcttcagcatgaattactatctaaacagataacactagaagcagcatcgtatactacaaagagattaagctgtgagcccagacagattcaactttaaaataccatttcacctaataatcttgatcaagttaacttttttattgctaacattctatgacttacgggtttcgcattataaaaatggcaaatgtatgggtgcagcaaaccaacatggcacatgtatacatatgtaacaaacctgcacgttgtggacatgtaccctagaacttaaagtataatttaaaaaaaaaaggcaaatgtagtttacattaagtccataactaaaatgtttacaaaactaagggataaatcctttttttaaatcgtttttaggtacgaatgtgaagaatcttttacgaccctaaacgtagacattagaaatcaccaaaatcttcttgattctttggaacagtatgtcaaaggagatttactagaaggtgcaaatgcatatcattgtgaaaaatgcaataaaaaggtacgggctgtccagttttgtttaattttgattacatttaatggatttagaagaaattggtttttttggttcatcctcacaagtcaccctatttttattttctcctactttggtatagtggtagcagagaagtagtcaatatgataactaatagaaggtttggcaaggaaggaaaaaaagtagtgccaaaggggctaggtaaataagataaaaataggtaaataagagtgaataattttaaaagtcataacgtgatagcacattctcttatataagttacacagacactttccatctctaccgagaaacaaattgccattgaacccctcaaagatacagagctgatagaggaaaacatttctcctgtcatgtccaggattacttgtcaagaccaaaacatttgctgaaaccattaattactttattgaaccacataagatttcttttagactagtcaagtggcccataagatttcttttatcacctatgttataaaaccatttattttggaaacttattagcagttctttgagagagatgattcacacgcattatagtaatgaataaggtgtatctttgggagctcccaaaccctttcaccctcaagtcacttgtgttgttttggccttatgcaccacttagagaagtcctgaagtttaaagattgagattgtgggctgtaaagccatactgcctgccacctgcagctcctgagacctgaggcaagttacttgacctctctgtgattactagttttcatcttttaaggttcagtagtacacacttgagaaggttgtaaggattcggtatgtttttacttgtgcggcacttagtatatattacctggcatctgaattacccaacaaatattagctactcttattgttattgtagttctttggtttgtgcataggaaaccaccttcgtgggaacaacagtaaacatcaaacaggtaataatggctagataacaatgacagaaaccagtcaacaatttaccatttgcatattattaatttcagcatttaaatcagctgataggattatcttgattatgctcattgtcatgtatttgtttatacttaaaaattcagataagtcttaatatcatttaaaagtttgcttggggtttttttttttttcctgtggattttaatagaacatctggtaactttgtcttgtttattttaggttgataccgtaaagcgcttgctgattaaaaaattacctcctgttcttgctatacaactaaagcgatttgactatgactgggaaagagaatgtgcaatcaagttcaatgattattttgaatttcctcgagagctggacatggaaccttacacagttgcaggtgtcgcaaagctggaaggggataatgtaaacccagagagtcagttgatacaacagagtgagcagtctgaaagtgagacagcaggaagcacaaaatacagacttgtgggtgtgctcgtacacagtggtcaagcgagtggggggcattattattcttacatcatccaaaggaatggtggagatggtgagagaaatcgctggtataaatttgatgatggtgatgtaacagaatgtaaaatggatgatgacgaagaaatgaaaaaccagtgttttggtggagagtacatgggagaagtgtttgatcacatgatgaagcgtatgtcatacaggcgccagaaaaggtggtggaatgcttatatacttttttatgaacgaatggacacaatagaccaagatgatgagttgataagatatatatcagagcttgctatcaccaccagacctcatcagattattatgccatcagccattgagagaagtgtacggaaacagaacgtacaattcatgcataaccgaatgcagtacagtatggagtattttcagtttatgaaaaaactgcttacatgtaatggcgtttacttaaaccctcctcccggtgagtatcaagagagtttagcttcttagtaataaagaataatttatagtaggcgtcaacatgtttaagttcataaaattaatgttttcactttaaatgagtctaatttgctgggtgtggtggttcacgcctgtaatcccagcactttgggaggccgaggtaggtggatcacctgaggtcaagagttcaataccagcctgaccaacatggtgaaaccccatctctactaaaaatataaaaattagccaggcatggtggcatgcacctgtagtcccagctactccctgtagtcccagctactccggaggctgaggcaggagaatcgcttgaacctgggaggtggaggttgcagtgacccaaattgatggccactgcactccagcctgggtgacagtgagtctccatctcaaaaaaataaaataaaaaaataaatgggtctaaattaaagtagcctgagaagggttcttaacaaatttaggacttctcaaaattaatggaaacacagacttgtttgaaaatggggttggaaaataaaaatgtgtttttatatctgcattttatttatagggcaagatcacctgttgcctgaagcagaagaaatcactatgatcagtattcaacttgctgctaggttcctctttactacaggatttcacacaaagaaagtagtccgtggctctgccagtgattggtacattgctttggattttcattcctattatactaatgtttggtttgcttctttaatagattgctttatgtttttctaaaccaagagaattttgtttgaagtttggaatatagaataaaaactctgggtcacaatagagaaatcatattaaaatagttacttagtctaaacatggccttttgttattcagaagctgacttctgcttctattaccttgtatcatatctttgacatccctgcaccaaagactacaagctgagactgggggacagtgactcacacctgtaatgccagcactttgggaagccagggtgggaggattgcttgagctcgggagttcaggaccagcctaggcaacatagtgagacccccatctcttcaaagaagattttaaaaattacccaagtatggtggcgcacacctgtaa

SEQ ID NO: 136967 - DNA, 1804 bp, Homo sapiens
ttacctagattgaattctgacaccgattaaaagggtaaaaaattaaaatggttttcttaagtttctaattgtgaaagtatagaggccattatgatacattgatttaataatttttacttactcatttcaggaatatgtcaagataagggggtggtattttgtcattgaatctaggaagagtttgttaatggatttttagaggacaagctttcacctgtttggtaactctgagagaatagaccaagtcatagtatttatctattgttttaatattagaagcaacctttgctggttctctccagcagtagaggaagatctttgtcttttttttttggttcaatgagactcatccttttactatagagaacaagttattgacttaatagtcataggtttttttgttttattttaggtatgatgcattgtgtattctccttcgtcacagcaagaatgtacgtttttggtttgctcataacgtcctttttaatgtttcaaatcgcttctccgaataccttctggagtgccctagtgcagaagtgaggggtgcgtttgcaaaacttatagtctttattgcacatttttccttgcaagatgggccatgtccttcaccttttgcctctcctggaccttctagtcaggtaattgcacagctttctttctaaatgatgagatgtttacaaataaattgtgtttcctggaagtcgaagtcacaagcatatgtgcatccacttgatatgtttacctaacagaaacacacaatatgatgtcagtgagttccatttaatattactgcatggcaatgaatagtaattattggctctttaaaaatgtaagagaattttctctgttcggttacatgcagtagcttaattataagtttactgttaagtagattttttcctattttgaaggttttttaaatagtcttagatttttttaaaaaattacaagtgtaaaaaattataatgaaatccgcctctgatcttcattccctttcccaagaagcaaaatagtttagtttgtgtgatcagtccttccataaatgtatgcctgtatcagcatatgtgcatgtcctttttatgcaagtagaagtatacatataccttgttgctgtaaaacaggtaatgttttatcctttacaggcttatgacaacttaagcttgagtgatcacttactaagagcagtactaaatctcttgagaagggaagtttcagagcatgggcgtcatttacagcagtatttcaacctgtttgtaatgtatgccaatttaggtaagaatttaagtttttcagaattctgttttgatgtatcatattaaattgtgaagtcatttaggtcaagtgatgaaatataatctgatctgaagtagaaacaatttcccataaaacctgttgtgaattttatctgaacatggcactttcaccttttactttgtttatgcatgtgtctttgtggtagacacaggtcagaatctgtgttttgatttttttttttttttaatctcctaatgcagtggtgccaaatctggctgcttttggaaaatactggtttctaggcctcttctcacactgattgaatcagcatccccaaagctaatgtcagggaatccatgttttcaaaggggtccccaaatggttgtgatactcaccaaatttagatagcagacttggtctgtacataagtttttgtttaagtaaactacaattatggataatataaatactcgcttaaaatattaatttaggggccgggcacaatggcttatgcctgtactcccagcactttgggaggccaaggcaagag

SEQ ID NO: 136968 - DNA, 1293 bp, Homo sapiens
aaataaaacatttggccagacatagtggctcatgcctgtaatcctagcattttgggaggccgaggtgggtgggtcacttgaggtcaagagttcaagaccagcctggcaaacatggcaaaaccccgtctctacaaaaatacaaaaaaattagccaggcgtggtgacgtgcacctgtagtcccagctactcggaaggctgaggcaggagaatcacttgaacctgggaggtggcggttgcagtgagctgagatcgccccattgcactccagcctgggcgacagagcgagactccatcttaaaaaaaataaaaaaaaattataggctattttctatcgtgaaagttgtgtattattattgtgaagaagcttattagttttttattggtgacaaatctgtattctaggtaatcctcctcttcccaatccttttggtgatcctaatttatcacaacctataatgccaattcagcagaatgtggcagacattttatttgtgagaacaagttatgtgaagaaaatcattgaagactgcagtaattcagaggaaaccgtcaaattgcttcgtttttgctgctgggagaatcctcagttctcatctactgtcctcagtgaacttctctggcaggtaaaaggaaaataacatttgtatgtttataatttgatttgttattcctttcattaagttactcaccatgtcttacttgtttttaggttgcatattcctatacctatgaactgcggccctatttggatctgcttttgcaaatcttactgattgaggactcctggcaaactcacaggtggatactctttttgtgactggaaacaattaggcttgcccaggtgttagagttaactgaaattgacagtcaccacattttttttaacctattggagttctagtgaatgttttatcttaaacctaggacaagggtaaataacaggttctccccttttcctcagaattttatttccttttttattcttttttctcactgcctaagtttcatacttaataagcctgtttctttagaatgacttttttaattaaggaggagctagcttgggcatttggtaaatatttgaatttcattaatgatgcccgaggattattttatgattatattacatttgttttagaattagtcacttgaagcaacttagtcattagtcacatgaagtataatagtatatgtaaaaagtcttcaggtaagtacggtttccatttttcatggtacttatattctgtaaagtcaccacagacactgagttagcaaatactgaaccattactcc

SEQ ID NO: 136969 - DNA, 2138 bp, Homo sapiens
ctgaataatattttgttttatggatatatatacaccacattttatttactggcacataatctttttaacacaaaagaaacaaggcatgtttgtgcccctacaatcatgttttaagttagttagttcagggaaagacaggactagttggctttgtattattactctgttgtagtttgggagaaactgaaatgaaatcctgtgttattggcaaatcagccaaattgtactattgcctgtcaaaatgctttgcctgccatgtattctcattattagaattcaaatactgtacctccaaattatgtcactgaatcctaacttgccttcagagatgcagttttataaaaggtattgatgtgtagcaaattaccctcaactacagcagtcataaacttagttataacttttttaaagtttgcattactctcgagtgtcctgaattcacttcaggtaatgtgtttaaattacatatatggcagaattattttggactggtaataagttagtaagagcacagactctggagtcacactgctccgcagctatatgacctcggcaagctgtgtaactctgtgccaattttctcacctgttaaaagttttaataataaggccaggcgcagtggctcatgcctgtaatcccagcactttgggaggccgaggcaggcggatcacgaggtcaggagattgagaccatcctggctaacacggtgaaaccccgtctctactaaaaatacaaaaaattagctgggcgtggtggcacgtgcctgtagttgggctgaggcaggagagaggcgtgaacctgggaggcaggacttgaagtaagccgagatggcgccactgcactccagcccaggccgtctcaaaaaaaataaataaataaaaaataaaggtttaataatagtacctattgtctaatgttagattaaatgactaaaagacattattgagtggcacatagtaggcactcagtatatattagctattagattttagatgtttttattttatatctggttctctttcagaattcataatgcactgaaaggaattccagatgaccgagatgggctgtttgacacaatccagcgctctaagaatcactatcaaaaaagagcataccagtgtataaaatgtatggtagctctatttagtaactgtcctgttgcttaccaaatcctgcaggtgaggatttttttcttataattttgtagaaatcttaatcagaattaaggattctgttttaaaagaagagaatcatgagaacttggggttgtcattttaagttaactttgaagtattccaaatcctcttatctatatggttttattttcttttgcagggcaatggagatcttaaaagaaagtggacctgggcagtggaatggcttggagatgaacttgaaagaagaccatatactggcaatcctcagtacacttacaacaattggtctcccccagtgcaaagcaatgaaacgtccaatggttatttcttggagagatcacatagtgctaggatgacacttgcaaaagcttgtgaactctgtccagaggaggtaaaaaaagccaccagtgtgcagcagatagaaatggaagagagcaaagtaattctttattttataggccagtgtttatgtattaatgatattattaaaagattatgttgaagttttgggttttgaaaaatgtttattcggctgggcatggtggctcacgcctgtaatcccaacactttgggaggccgaggcaggcggatcacctgaggtcaggagttcaagaccagcctggccaacaaggtgaaatcccatctccactaaaaatagaaaaattagtcgggcgtggtggcaggcgcctgtaatctcagctacttgggaggctgaggctggagaatgacttgaacccaggaggcacagattgcagtgagcggagatcgtgccagtgggctccagcttgggtgacaagagtgaaactccatctcaaaaaaagaaaagaaaagaatgtttattctatgtcattttaagctaatgaagggagctttcttttggagaaatttctgtgaaattgcctgaaatgtagtagttctgagagaatgcaaatcaggttttttgttttgttttttttttttttgttttttccccaagtt

SEQ ID NO: 136970 - DNA, 1288 bp, Homo sapiens
aaacgaaaaacgaaagctgagtgcatagagttggaaaggggagcgaatgcgtaaggttggaaaggggggcgaagaggcctaggttaacattttcaggcgtcttagccggtggaaagcgggagacgcaagttctcgcgagatctcgagaactccgaggctgagactagggttttagcggagagcacgggaagtgtagctcgagagaactgggacagcatttcgcaccctaagctccaaggcaggactgctaggggcgacaggactaagtaggaaatcccttgagcttagacctgagggagcgcgcagtagccgggcagaagtcgccgcgacagggaattgcggtgtgagagggagggcacacgttgtacgtgctgacgtagccggctttccagcgggtatattagatccgtggccgcgcggtgcgctccagagccgcagttctcccgtgagagggccttcgcggtggaacaaacactcgcttagcagcggaagactccgagttctcggtactcttcagggatgagtcatgtggcagtggaaaatgcgctcgggctggaccagcaggtgagccgcaagaaccccaccgggctggctgctgcgtgaattcctcccctgacctaacctggctaatggcgcagcgctaaccggcacccttacttttcattttctgggtgccccgggctggcgggtgtgagtgccccggggctatagagggataggaatgttggttggggctgtcgcccgggcccggtctcggcccgctgtattgtccccgggacgagcacaatggcggcttttgtgtgtgcgtgcgcaggcgggcggagggggaggaagtgcgcgcgctctcgcggggacgcgcatgcgcgaatcccgactgattagtgacctgggggggtttgcgggagtgcgcagcgcggcgggacgcgactggaggcccttttggcttggagggcttcggccttcacggctggcgcagcctggattcccgtccggaggacctggcggcacccggtgtttgcgtgcctgcgagcaaggggtagaacgcggcccaggaatgtgggagggggcggccttcgctcggggtaatggcggcggcctcttttgtgtggtgctgggcggcgctgtggctcacctccgggagacggcgggtctcgggcgggcgaaggcctggaaaggaggatggaatgggtttcttgttttttcccgggttccttccgctggctttttcgcttcagcccaggttccgcagggtccgggggccctgcgccgcagccggggaggctgcgtt

SEQ ID NO: 136971 - DNA, 2020 bp, Homo sapiens
attgtgctataacaagtgcaaaaggaaagtttgtgttcctaccgtgctttaaagtattgatggtagcaagagaaagcgcagtggtgtttttgctcatagaaattctggaaattaggtgcctgaagtcttacactcattttttaaaagtatagcatctgcttccagttttcagtgactccattgatgatgcatgcggtttggccgtatcatactgagctttaaacacaagatttataaacatggtatgtagtgcatcttttgcaaacaggttggcagcggtactgtgtgacttggtcttttgtggcttttttgagaaaaatgaaacactttgcatgtatagttttttctcccaactacttgtgagtagttcctggttataaaacgttatgaaggtagcacataacccttttctagaatgaagaggcttttgagctaccagtgtaaggggataggtagaaatagagatgaaaggcactaagatgtcctactctttaagagcattgaacgccagttgtgccatttattcaaagtcatctttgaacttatgttaaaatggggtaaaaacaggtaactacttcaggccgggctcatgcttgtaatcccagtgctttgggaggccaaggcaggtggttcacctgacctgaggtcaggagaccagcctgggcaacatggcgaaaccccatctctactaaaagtacaaaaagtagcctagcgtggtggcgcacccctgtaatcccagctactcggggaggtggaggttgcagtgagccgagatcacatgactgaattccagcctggatgacagagggagactctgtctcaaaaaaaataaaaataaaaacaaacgaaacagtcaaactacttaagagttgtgcttaacatagtgttctgtaagtggtaggtatattgctatttttttgttgttcttaagagtactacccgactaaaaatacttgggcaatatttagggatgaagtatctaactaaaagaacggccacttcgaaatttgtcctgacatttttcaggtgtgcattttaggtttaaaatatcaagtattacggaaagttggcattggaaactttcataaccggcactaaaacgaatcctttatctatttgacattgaggaataattttgagattcagtgtaagctttagtttggtgattagggagcctgtgctatggaacatgttagtgaaaatttattttgaatgcatgaattaaatttggacagtttctactgaacagcacaagcatcttggtgtgccgccttctgtagtatatacaatagtaatattgcatttgcttagagcattgcagacttgaaaacattcttagtcacattctcattaagggttggtattagccctgtgaggtggactgggcaactacttgaatgcagtactagcaaatgctagagggcaggactagttttctcttaatgtagtatttgagcacatggggtgctaaccatctcactctcttctagtttgctggcctagacctgaactcttcagataatcagagtggaggaagtacagccagcagtaagtacaacatcttgtgggtttattgaatattagagcttaacatcttaagatttcattgggcttatgtaaaatttaagaaatttgcctttcaattttttactgcttaaagaattatgtagtctttgtgttatagaattatgtagtacttagtgatcaatctaaagcatcgttgccttttttttttttttttggttgagatggagctttgctcttgttgcccaggttggagtgcaatggtgtgatctcggctcaccgcagtctctgcctccgggttcaagcgattctcctgcctcagcctcccgaatagctgtgcctttctgataataaaacatcaatgactagctggctctcttgagtaaaagcagctaatcattggaaagaaccttattatatcaaattatctctagaagagtttttgtccattataaatcctgagcccagtttagaggtgatgggaatgtgtccctgt

SEQ ID NO: 136972 - DNA, 12071 bp, Homo sapiens
ctcccctttgcagcttttccttgtttatttattgtatgttttgcaacttactggcatagaaacaaaagattgtgagatatgttacatgagtaatcttaaattgttacagtaatacttaatgcttttgttgacagttttgatgacagttctcttaaatctagcaggcctttaaaaaaatcacattaaatgaccactggtggctaaatgtgctcaatttgtggatttcaactattaggttccaaatcagcttttttttatcaaactcctttcagagttctccttatgaagcagtaacccatttaaaattagattcttatttttcccccctctcagtgtccaggtaagtaatcagattggaaggctggagattttaatttcccagaaccattttttagtaacagaaatttaaatgggaaggttttttggcatttaattaattttatatatatatatatttttttagaagggcgctatattcctcctcatttaaggaaccgagaagctactaaaggtaggtcctcacaagtaacttcgtaggtctattttttgcctcctttagaagttagtaaagcctaaggaaaaccaggcatttgggggaggtctaaacatggtgttgtttttctatgcttctgtcagccttggttcaaatactagagcttaataattttggaagaactcatctaatgttacgcagtgggaaattcggcattcctatgtcaaactgttctgacgccaagggcatggttttgtacagtttcactagtgttgtgctgaatctgtttgtaatcattcacagcatggttttagtttggaagaggtgggtgccctactgtgtaaaccaagctgtataatgataacaacctggttatttctgtcttggcaaagttgctagaaatgaagatgggcttattgtagaacagttaacaagttacagcgttggaagtgattctctggtttcatctccttgccttgctgcttttgaaaggttttgtccaaaatgtattacaatatctggtgtcttttcccattgtaattgtaacgtagtgatagatgacagctagtatatgtttcatattatgagacagctgttcgggtgctttatattctgtaaaatagaccatccaaaatttggaggaaaagggaaagtcaggaaaaccaaagattaggagggaagatactgtataaagaaggcagataggaagagtggagagtccacaggggagcacatggtttgctgctgttcctccatctccatatgtagtctgtattaccttcactgtcctggcaatgcatggatataaaatctgtattatttctaccagaagatcactttggctttttttttttttttttttttttgagacggagccttgctctgctgcggaggctggagtgcagtagcgcgggctcactgcaacctccgcctcctgggttcaagtgattctcctgcctcagcctcccaagtagctgggatcacaggcatgtgccaccatgcccggctaatttttgtatatttagtagagacggggttttgccttgttgcctaggctggtctcgaactcctgacctcaagtgatccacccgcctcagcctcccaaagtgctgggattacaggcgtgagccaccatgcctggctggcattatattctttttaggggaggttactttggaatttgtctttatcatcatggatgttctcaatattcctagtatactagctagaattgaccctcgtgtatatggcagtatcatagaggttttagagctggtagagatctggcaatctaacttaactctttcttgctagcaaaggctgttggtcacctgactggcctaacggtaggaggtagaaggcagaaggaaagtaactgaattgagaagctgtttctgtttaataaggtgttgctgaagctagttaaaccctctacctgtctttaaaccctctacctgtctttgggttaatttacatgtttgtcatccccttacctggatatttatagctgtacccaggaaccttgtctatactgagaatatatagtgatgagggtttttctttttcccaggtattcctgattgtcatcaagcttatagtagatgaaccactaaaataatactacaatttgacattagtgttcttgtactttatactattgaaactgaaaaatactgtattaaaccaagtaatctgacagtctatgaatgttctaaatgaataccacctccaagaaacatggaaacaatggtaactgtttttcctagtaaactcattcacacctataaaatgaatggaaattaaattgttatggtcacacaacgtcataatgcgttacaggcaaagctgttgaccacttagaggtagtattcattgagaaacattcttagactgtcagattgcttgatttagtgtaaagtaatttttttttttttgagacaagggtgtttcactcttgtttcccgtgctggagtgcagtggcgcaatcttggctcactgcaacctcagcctcccgggttcaagtgattctcctgcctcagcctcctgagtagctgggattacagacgtgggccaccacgcctggctaatattgtatatgtagtagagacggggtttctccatgttggtcaggctagtctcgaactcctgacctcaggtgacctgcccgccttggcctcccaaagtgctgggattacaggcgtgagccaccatgcctggccagtggacagtattttctagtggggagaattaaagaaaaactttgtccgggtgtaaaccagctttaaatcttggttctcttacagtgccatggtagggatagtcagtggaggctttcaaattcagaaagattgataataccttaacatggttcctatttctaattaataataaaatgtatttgtgcttttttaatcaaaggtttctacgataaagacagttcagggtggagttctagcaaagataaggatgcgtatagcagttttggatctcgtagtgattcaagagggaagtctagcttcttcagtgatcgtggaagtggatcaaggggaaggtaagtgatttcttaatcaccttacgtgtatgtataataacagtttaataagtcgttatcctgaccacctgtttggatgttaagcattatgtctgtttggtcattgtattttcttagccgtaagaggcttttactaaattgaacctgttacttagaaattagatgaaaataggaatatgctcattggcataatgaaatgagttattctatttctcgagttttatatgttctacttaaaagagtaagttcatctagtgaatggcctaatttggttgggatttttgtggactctataacaatttctaaacaccttgtatttttgattacacaagtgtggtgaactgaccccacgtgcctaatagctgtggttagtcctgtgtcctgatttttcgcaaacaggcctaaaactcttaaaaacatcttagttcaggtaaggattattttctaccttttatccaaagtctgtcacacaggtgaattgtcctttaagtgacatcctagtataactaggacgattgatatttggtgtgctattttcttgttttccctaccattaaatatatttggatgagcactttaaatgaaggttgtgagctgtgtgccgatttcaaataaaatccttattcttaattttggcatctgtgaggccttttaggctatacaactttatagaaatgtaaagattactgattttagaaaacgaggttatgtaaatgatgctggttagagagccttatttgtcaagtaactcagaattggattgttgacatccttatggttagccataacttaagtctccagatacagttctagagtagggataagaatctgataatggttaaatgatatgattctgattaattgcttgtgctgttcaggtttgatgatcgtggacggagtgattacgatggcattggcagccgtggtgacagaagtggctttggcaaatttgaacgtggtggaaacagtcgctggtgtgacaaatcagatgaagatgattggtcaaaaccactcccaccaagtgaacgcttggaacagtaagtttttgaagtgtatgttacttgtgatgaagccttactagctagtataacaaatgaacttatccattttttgatttgagggaactcttttctggaggcaacactgggattaattttgagaaatacgatgacattccagttgaggcaacaggcaacaactgtcctccacatattgaaagtgtgagtatttttgcttgactttttaagacacagagaggttaaatgttttcatgttacattagaatgtgagatgggcttcataaagtcatgtagaccagaggcttcatagatttgtggaaaaggagaagttgagttcagtgtcaccattatgaataatttattacctaaaatagaaaatgggtcaaacataggaacaacccaaagtcttctccaatgtgcagtaagcctgggggttggtttttctcaaagtataatgtgataattttacttaaactataaactgagttaccaatcagctgttggttggttgtttccattattagtataaaacagaaatagctctagatagcattcctaaccccattgaatttcttaacagttcagtgatgttgagatgggagaaattatcatgggaaacattgagcttactcgttatactcgcccaactccagtgcaaaagcatgctattcctattatcaaagagaaaagagacttgatggcttgtgcccaaacaggtaagctcaactcataagagtaaaacatcatatttcttctgtaaaggactagacaataaaatattttattttttatgggtcatgcagttttgcagctgctctgcgctgctattggactgtgaaagaagccatagatgatacataaattattggttacggctgtattccgtaagagctttatttataaaaataacaggctttatttacaaaatagtctcagtttgctgactcctcttagaggtggagcagagaagccactttttggaaaacttaagcataaactaaaagtactaattattagtaatagggtagttaaaaaacactgtcatctaccaatgtctgtttaaaagtaatgagcaggatttgtttgtttgtttttgaacagggtctggaaaaactgcagcatttctgttgcccatcttgagtcagatttattcagatggtccaggcgaggctttgagggccatgaaggtagatgtttctttataaaatgggaaattgtagaactttgtaggtggccattgagagggctttctaaatgatgctaagacttaagtagaatgaaaaccagttttcaagtgtaatctgtaatctataaattacaaaagggaattatgttgtgatgaacttttcaaacagggtaggtagagttaacttaaaaattaacttatttcttaggaaaatggaaggtatgggcgccgcaaacaatacccaatctccttggtattagcaccaacgagagagttggcagtacagatctacgaggaagccagaaaagtaagtatgagttccagtgattattagctttttcattgattctaattaaatgttttatgaacatgtaaaaattttgaccttgaagttcataacattttttttgcttatagttttcataccgatctagagttcgtccttgcgtggtttatggtggtgccgatattggtcagcagattcgagacttggaacgtggatgccatttgttagtagccactccaggacgtctagtggatatgatggaaagaggaaagattggattagacttttgcaagtatgttttattttgtttttgtttttttgttttgttttgttttgttcttttgtttttggcagagttgcgctcttgttgcccaggctggagtgccatggcgcgatctcggctcaccacaacctctgcctcccgggttcaagcgattctcctgcctcagcctcccaggtagctgggattacaggcatgtgccaccacgctgggctaatttttgtatttttagtagaggcggggtttctccatgttggtcaggctggtctcgaactcctgacctcaggtgatccgcctgccttggcctcccaaagtgctgggattacaggtgtgagccatcgcacccggccaagtatgttaatttttaaatgtatgggatgcagtattaaagttactgcccattagttttgtggtgatgttaacattgtctaaatgttaaggctgagaagtgatgtatttcagacatctaactttcacaaaaagcttgttcatggtaattttaatgttgaaaaatcagtaacatcttggttgagacttacaacaatgatcagctcgtgggacagtcaactaggatgggctaatttgactgtgtaatcttgaatgacttatgtagtggcaagaatcctgtgctgtgtctgtaaaattatgcagtgtgaggcaccatcttaatgaatatataattgtaataacctatacaattgtatttgtaattatactaacagccatactaaaaccatgttgatttctcctcaaattctaaactcaggcttgttttttttcatgacatgacagatacttggtgttagatgaagctgatcggatgttggatatggggtttgagcctcagattcgtagaatagtcgaacaagatactatgcctccaaagggtgtccgccacactatgatgtttagtgctacttttcctaaggaaatacaggtactgtttgatgttgcaaattttatttatttagaaatttgtttatctcaggtaataataaaaattttttttctttcagatgctggctcgtgatttcttagatgaatatatcttcttggctgtaggaagagttggctctacctctgaaaacatcacacagaaagtagtttgggtggaagaatcagacaaacggtcatttctgcttgacctcctaaatgcaacaggtaacattatgaattttttattttattagacatgggggtttctctttgttgcccaggctggagtgcaggggttattcacaggtgtgatctcattactgatcagcatgggagtatttgacctgctctgtttctgacctgggcctgttcacccctccttaggcaacctggtgctcccttgcttccgggaggttaccatgttgatgccaaacttagtgtggacacctgataggcatagtacactacagcccagaactcctagacttagacaatcctcctgcctcagtctccagagtagctgggactacaggcactcaccactgcacccagctaaaattatgaataatttaattgctctggtaataacccatttgggctgggtgcagtggtacagtgcatgtagtcccagctacttggcaggctgaggctgtagtatgccatgattgcacctgcgaatggccagtgcactctcagcctgggcaatttagtgagacccccatctcttaaatgtatttggattacctttattacttttcctcctcaattcaaaacatgctgtgttgaaagcccgtttttaagaagatatatatgtattttaattgacacattaaaattgtgcatacataagtgcaaagagaactaagccatgttagtgacaaaaacctataatttttcaacgacaggcaaggattcactgaccttagtgtttgtggagaccaaaaagggtgcagattctctggaggatttcttataccatgaaggatacgcatgtaccagcatccatggagaccgttctcagagggatagagaagaggcccttcaccagttccgctcaggaaaaagcccaattttagtggctacagcagtatgtataaacatctttcttttattcaaattgagcatgttcaagtatttgttttcttttaagtgggccatatctcataaaagttattttccaggtagcagcaagaggactggacatttcaaatgtgaaacatgttatcaattttgacttgccaagtgatattgaagaatatgtacatcgtattggtcgtacgggacgtgtaggaaaccttggtaagtatttgattacttgatggtttcattgttttttgctgtgatgtgtgcaggaaagaacttgctaggatctaaaatacatttttaacaatgaaagtgacaaagattttgctcaaagcacttgtttaaatattacgtggtaatattttaaatatttctacgtaggaaagtaagaatagtagcaagttactttatggaagacctttgtttatatacttttttgggaactcttttaggcctggcaacctcattctttaacgagaggaacataaatattactaaggatttgttggatcttcttgttgaagctaaacaagaagtgccgtcttggttagaaaacatggcttatgaacaccactacaagggtagcagtcgtggacgttctaagaggtgaggtataaatagtatataatgaggggaatgggtgttcacttacagttcatagtgtttcctctgcatgcataacgtccaaggttaactgtacagtatttaaaaagcttaatcatcttaggcttcctagattctttggtaaggggttgtattagaatgggtgacactctgttggggaaaatatggctggatggggaattgtttgaatggaaaaattagaaattggtcattaggaaagagttaggttactttagtggaatttcatcttcatgtgaaccaacataatttttttcttatagtagcagatttagtggagggtttggtgccagagactaccgacaaagtagcggtgccagcagttccagcttcagcagcagccgcgcaagcagcagccgcagtggcggaggtggccacggtagcagcagaggatttggtggaggtagtgttaatctgtaacttcatagctttgggaagggtttttttccttttagtcatctttttcaaagcctaattaaacaatttaagttcagcactatagaaacttgatggcaaattacgtaagggaaggattgtatttaatgatggataacttcattaatttctctctctttttaaatctctcattaggtggctatggaggcttttacaacagtgatggatatggaggaaattataactcccagggggttgactggtggggtaactgagcctgctttgcagtaggtcaccctgccaaacaagctaatatggaaaccacatgtaacttagccagactataccttgtgtagcttcaagaactcgcagtacattaccagctgtgattctccactgaaattttttttttaagggagctcaaggtcacaagaagaaatgaaaggaacaatcagcagccctgttcagaaggtggtttgaagacttcattgctgtagtttggattaactcccctcccgcctacccccatcccaaactgcatttataattttgtgactgaggatcatttgtttgttaatgtactgtgcctttaactttagacaactttttattttgatgtcctgttggctcagtaatgctcaagatatcaattgttttgacaaaataaatttactgaacttgggctaaaatcaaaccttggcacacaggtgtgatacaacttaacaggaatcatcgattcatccataaataatataaggaaaaacttatgcggtagcctgcattagggctttttgatacttgcagattgggggaaaacaacaaatgtcttgaagcatattaatggaattagtttctaatgtggcaaactgtattaagttaaagttctgatttgctcactctatcctggataggtatttagaacctgatagtctttaagccattccagtcatgatgaggtgatgtatgaatacatgcatacattcaaagcactgttttcaaagttaatgcaagtaaatacagcaattcctctttcaacgtttaggcagatcattaattatgagctagccaaatgtgggcatactattacagggaaagtttaaaggtctgataacttgaaataggtttttaggagaattcatctacttagactttttaaatgcctgccataaatgaaattgaaatggtagaatggctgaccacagcaatgaccagccctcattagggccctggatgatttttggtctaataacgcatgctagtgttgatgttttttggtcaagagggtatgaacaggaagaattaaatgcagcaggctttattttaaatgccgattcacattactctgttcaagctgcgttgagatgttaaactggcttactatagacttcgtaaaaatggctccagaagagtaacaaactgaaatctttgagatcacacaggttggaaatatgtacataactgcacaaggtgtcaattctgctctacagtgcagttttagtcagttttagttgcataggtttccattgtatttatagtctgtttatgctaaatctggccaaagatgagcattgtccaccactaaaatgcctctgccactttgaattctgtgctaattttgtggccagaatgcggtgatcaaaacgctccatctttttacagtggcataggaagacggcaaaaatttcctaaagtgcaatagattttcaagtgtattgtgccttgttctaaaacttttattaagtaggtgcacttgacagtattgaggtcatttgttatggtgctatttcaattagtctaggtttaggcccttgtacattttgcccataactttttacaaagtacttcttttattgcacattcagagaattttatatatatgtcttgtgtgcgtgtccttaaacttccaatcttactttgtctcttggagattgttgaacgcagcttgtctaggaaggggatgggactagattctaaaatttatttgggaccatgggaatgatagttgggaagaaaactatttgcacacgacagatttctagatactttttgctgctagttttatgtaatatttattgaacattttgacaaatatttatttttgtaagcctaaaagtgattctttgaaagtttaaagaaacttgaccaaaagacagtacaaaaacactggcacttgaatgttgaatgtcaccgtatgcgtgaaattatatatttcggggtagtgtgagcttttaatgtttaagtcatattaaactcttaagtcaaattaagcagacccggcgttggcagtgtagccataactttctgatgttagtaaaaacaaaattggcgacttgaaattaaatcatgccaaggttttgatacacttgtcttaagatattaatgaaacacttcaaaacactgatgtgaagtgtccagattctcagatgtttgttgtgtggattttgtttagttgtgtgtttttttttttttttcagtgaatgtctggcacattgcaatcctcaaacatgtggttatctttgttgtattggcataatcagtgacttgtacattcagcaatagcatttgagcaagttttatcagcaagcaatattttcagttaataaggtttcaaaaatcatgtaaggatttaaacttgctgaatgtaaagattgaacctcaagtcactgtagctttagtaattgcttattgtattagtttagatgctagcactgcatgtgctgtgcatattctgattttattaaaataaaaagttgaactgcacagtctcctttgttgttgtcaattgtggtttattttcagaggtgtaaataaagtgctcttgcctgaaaaattgtaaaatgttattttttgcttgtcatccagtgctattttttgagatgcctcttggatacagaatgactcataccataagtatttgcaatgaaagatgaagatagtattagtttgaaatacagtgaaacaggatttttgtaatagacggaaatctaaaaggcccttactgataatacagcatgtattagaaattggcttatactttgaacaatttgacatgggtgggagtctctttgttctttgaagtatctattatgaaggatggttgaacagtggaagaatgagcaggataaaagtcaagtgtgtcagtagtccaacaagtgatggtaagtatatacttagggaaggaatcaagactatttgggcc

SEQ ID NO: 136973 - DNA, 1028 bp, Homo sapiens
ctggtctcaaactcctgacattaggtgacccacccaccttggctccccaaagtgctgggattacaggcattagccactgtgcctggccctggctagttatttttaaactccagttattttccagagctatctcccaaccatcaccattacggacaatgccctggagtctgagggttggcagtgccaggtgagggatgctagtgtctgtgagaaactgcccttggggagggagtggccaccaaccagcccaactgggtgggcagggctcctgggagaaacaggcagatgctgcacgggaatgaggcctgtgtgggcctcatgctgaagcttcaggggcggctcggtgtgagtgcattcagggttcgattctcaccacccccagtccctgcctgggcctgggtgaggtttgagggctgacccgaggcaagcccagagcaaagacaaggtgcacattgggctttcctgaggccttctccctccagttccaagccctttctcaaactgactgtttccccaggacatggccctgggggcgaggccagaatcccttgtggcctcttttctctctctctctcttttttttttgagatggagtttcgctcttgttgcccaggctggagtgcaatggcgtgatctcggctcaccgcatcctccgcctcccaggttcaagcaattctcctgcctcagcctccccagtagctgggattacaggcatttgccaccatgcccggctacttttgtatttttagtagagacagggtttctccatgttggtcaggctggtcttgaactcccgacctcaggtgatctgcccgccctggcctcccgaagtgctggaattacaggcgtgagccaccatgcccggccgttttttttttttgagacggagtctcactctgttgcccgggctggagtgtagtggcgaggtctcggctcactgcaacctccacctcccaagttcaagcaattctgcctcagcctcccgagtagctgggattacaggcgcccgccactacgcccagctaatt

SEQ ID NO: 136974 - DNA, 1090 bp, Homo sapiens
atatttatgagggatataatagcatgctctttgtctttgagaaaattcttttataagagattcaataaataagcaataaaaaaaattggagcaaggcacgtggaacactgtgataaataggacatgacttcctacctcgaagaggttctaaagaacagaggttgatatttatataattactaacagtcaacttcttgccattcctcctaccttgaaaaaaaaatgaaacttgattgactcattggggcacaatgtttgcttccaacagccagtatcattttaaacgtgcaccaaaagctctaccgttcctcacagaaagcagaccgtattcatagcctgcacacttcaaaacaggaactgtccctgctacagaaacccgaaatatatccagacttcttgtgacaagttggagagctcagcggtgacatcatttgctaacaatagatgcacttaaaattaatgaccatctccacatcccctggcactttaatttaaaacacactctagcaagcacagagaatatttctctgactgcgagtcacaagcaatacggacaatatgttcccgagaagcaggcagggatagtgctctacctccttggccagaaagaaaatgactaagtgagcctcacaaaacaacaccttggagaaatcagaagtggctcgcagcagggaaatttggggcaagagaaattctcctctggacacacagggctcctggaagtgccccacttctcagatgcataagtgcaaatacctccacctcctccccccatgttaacccctggggtcttcccgctgttcacagcataatatctgaaacccttaacttcttttacagggtctttcacatgtgacttcctctacactgagtcttcaaagagagtcaggggttgtgtgtttgtgttttttgtgtgtgtttcttttgagacagggtctcgctctgttgcccaggctggagtgcagtggcatgatctcagctcactgcaacctctgcctcccgggttcaagtgattctcgtgcctcagtctccagagtagctgggatgcgccaccaccacacctggttaatttttgtatgtttagtagtga

SEQ ID NO: 136975 - DNA, 1108 bp, Homo sapiens
atcattccgatggtgaaatccctgcatgcagaactcattgacttctcaaagatgttacctgttccattccactaatacatgtcttctctaaagcagtgtctttatgacctagctgcatatacttacatttctgaattcagagtaatttcagtacattgctgctgctgctgctgctgctgctgctgctgctgctgctgctgctgctgctactgctacattacaattgtccactaagcaatcagagaaaattgctaaaagcttctttactgcttccattccatcagcagaacctttttttttctttctttcttttaaagaccagaatgaatgtttagagtactaaatcttattagtggtcaattgaagtattggagagccacattttgaaggttctctcccccacccaactccattccccacagcaagaaagggagtgtttttatatgttgaattctttgttaaaaagatgaaatgtcctgattttccagtcacaagacagtaattactttgcacatacagcatatcccattttaatgctaaaaagggaaatgtcactcaatttaattcatctggaagtttcccagtgtcaagataacattgtagcctttttaaatgcaattaaatgtatctcttgtcaggtgagatgatttaaaatctttgctcagagaggaaaacaaatggttgacctacttcttgctatttgcattcagaaggcatcgtcccagcccatcctattggtggcagaatatctaaagatgtcgcaaagtcccccactgcagtagaaatgcaggaggtgttcctgttccccgtccaattccttcttaggctgctagagacagccagtgggccaagccttcccctgtgctccaggcaggcctgggctgcagctactgttacctttttacagcctttgatctgatcgctgcagagttcttttgtttttaaatcacttgtatttgtctcttcattaaggcttcaagtttatttcttgaaaaagtttagtcaattgaaccaccctccaggaagattcccagcgtggaaactgcccctgaaaaacaaggcagcccaaagccagctctcttttgtcccccactgatgtcatgtcctt

SEQ ID NO: 136976 - DNA, 1885 bp, Homo sapiens
tggcacctttaagtagaagaggaaaaaatacaacttaatttgtcatccaagggcagggacttgttggtgcaaacacagctgggccctgaggcctggctccagtgagtgtggaggaccaaggggacgggggcaaagagctccagccttgccaccgtagccctctcgccaattgggagagtggcttgaggctagggcggggggcttcctgctggcctgtttgggccaccatagccactgtaacccacacctggcatggccctaccaagcctgactctggggacaggcacagctaggcctgagtgggggtggcatgtttcctgaagagtatctgttttctctggttcgtctgctttgtcatggaccctctgttgcatgttgagcaatcactgtctcctctgtcatggagcggacttggcctcatgctggcatatggcatatcagggtctggccttgactgtttctgacactgggatgaacaaaaatgtgaaaagagaacgaatccaactgatttctctcttctgtttgcttttccctcctctcatgcccacccctacctccatctcatcaccatttaggatgaatctcttcagcgtctgcagaaggagtctgacatcttacagagaacatatgcacactacttcgatctcacaattatcaacaatgaaattgatgagacaatcagacatctggaggaagctgttgagctcgtgtgcacagccccacagtgggtccctgtctcctgggtctattaggcctctccccagatatctgagcataactgggagcacctcatttgtggaaaagcctctttgttatcggccttgtgtcagcaggtcatggtccctagagactacctagttgtagtgtgacctacatttataattattgtcatgtccgaatagataggaggagaaaaacaattacacactaatttaaagagacagtatcttttttaatcagttctcctaaactttaataaaatgtatctttaaatgtatgtattattcaatcctttggaatgttatatttttggaaatcatagctttttatttccaaggcccctaaaaactgcacaaaatagatgctgctttctataatctattttaataataataaacaatgattctgttaccttgactgggggtggaacactacattctttttagagtctgattttatggattggaatattgggatatctttctttcctttatttatttgaaataattagtgtagtgattacaaaacagtcataaatttttaaaggccttttttctctctttttttttttttagaatagtatttttttttaagtcctttatgtaacatccagataatgtgatactgtctctttgaagcaccctgtaaaccttttagagatttgaagttgggtcttgactcttaatgcatgtggacagtcgcgagcgtttatgctgtcggtgtgtctgtgttggacaaaacaatctgtaatctacagcaaagtacattctacattccgttcatggggcacacccaggggaataagaataaaatgctattatgactaagttgtaaacctatgcacatcccttgcattttgggcaactttataaaaaaaaagaaactgatttttattaataataatcatgtagtgaaatgtgtttgtaattttgtctcaatttaatttgttgtaaggtggggtggggggaattgctggtttcaccatttcagatctgtgttgtctaagagtattaacgttttaattaagcaaagaaatgatttttaatctgtatgtaattgttttaaagcacccattttaagagaaaatactgtgcaatgaagaaaccagtttaggcatttgctataaactgaaatattccaaaagaatcatctataacagccctgt

SEQ ID NO: 136977 - DNA, 1066 bp, Homo sapiens
gtcacctattaactgcctgagagaggggaatccttgtgagcaattccatttcctgtccctgaagtaactctgaacctcagccaggctaccacagcaccaaaagtggcacccacttgagacccgtaagtagtgcagagtatggcccaaagaccttcaagaacaagcgaggaaatgtgtggtgagtctgctgaaaatatgaggctgactagacaggaaaatctcaatcaggatttgaggcatcttagaatttttgaaagtacaataataaagtatagaaatagaaaaagctacaaaaaggaggagaaagcaaatatgctaaccacagggctactttagttactgtgataaacattaaatttggctctgaacttcctgacaaccagggcaaaaaaaaggaaatcaaggaatataacctgattcgtagacataagaggcatttggcaatgtgaggaacatggccaccattgatggttttatgcagtgagtgcagtctatggatatagaccaagggtgtgaatgcagtgcagagatgggcaatctgcaggaagctaaactaatgttccaagcagtttgttttctgctgttgtaatgtgatagctggaatggaaaacatgataaggactgggtagctggcaggctgggccactgagtgcagaaaaaaaccatttcatgcccagggtgtcattctctacttcatctgtgggttccgttcagcatccaggctgggtggacttccatctagcacttagagtagctttggggatagaagcaaataggattctttcccatctcagttgcccagaagcaggctatgggatgggtatatgtgtgtgaccgggagtaggggtgatgagaaaaccttgtctcagctgaccctgtattcacctgatctatgagcataggaaggaaggaaaaaaggcctaagataatactgacataaaggatatttctaagtgaagatccctgttagcttgcttgagctatatatggactttgtcataatgtttgttcctggcttaagtcttcagccacaaaaggattggcaaagaaattgccagttacctct

SEQ ID NO: 136978 - DNA, 1205 bp, Homo sapiens
catcacttttcaatagaactttctgtgacaatgacagtacttgatgtctgtgcagtccagtacagtggccactaaccatacgtggttattgaatccttgaaatgccactagtgagactgagaaactaaaatttgaattttatttaattttggcttatttaaatttaaccatatgcagttttccatttttttattctccttttttccttctacacaagacccaactgcattaaggcatacagtgagttatattaatcttgggtcatttcacgtcttcctcctgtggtggttcatgaagggataaaatacatctcacctgaacactgaaagtttcaccaaaccagacaattcactggctactatggtgtgatgcacacagataaatatggtttctagaatttagttctgcaaagccactgggggtgagaacaggggatatgagatatacgctaaagaatccacagcttttaggaagagactgggtttgagtaaatctgttgggagtgtagtaagctcatcagctcagccttttaaacctcttgtgccatgcgactttgcagatacaaccagacctccaaagaaagacgaagaaaatggaaagaattattactttgtatctcatgaccaaatgatgcaagacatctctaataacgagtacttggagtacggcagccacgaggatgcgatgtatgggacaaaactggagaccatccggaagatccacgagcaggggctgattgcaatactggacgtggagcctcaggtaatgcccagcctccccgaatgtctgacatcctgcctgcatgccaataagcacagattctgaaatcaaaaatgccatcagaaagtcacaggtcacataataatttcataaaccacagaaaagtatcagtaatggaggcgttgggggttcacagtctagaatgccagctgactaatcgttggactcagtgcacacaccatgtatttaagaagcagagattattctcttaagaggtttattatatgcagaagctcagtaaggttcctgattgtgtctacgcctgccagaaatcctacgatcatctgacctcaggatgaggctctggcactttgttatcacaacagccaccttccctctctgggtacagctcacgctggaccatcagagcctctaccagcacattatgttaatctccagtgagaaactgatcctggggcctgggt

SEQ ID NO: 136979 - DNA, 1039 bp, Homo sapiens
aggtgatattcacagtcatttggccatagtgtttctaggagtagaaggttctcttaataaatgattggctaaagtaatgcagatttcggccgggcacgatggctcacacctgtaatcccaacacttcgggaggccaaggccagtgaatcacctgaggtcaggagttcaagaccagcctggccaacatggtgaaaccccatctcaacaaaaatacaaaaattgtctgggcgtaatggcaggtgcctgtaactcaggaagctgaggcaggagaatcgcttgaacctgggaggcagaggttgcagtgagccgagatcgcgccactgcactccagcctgggtggcacagcgagagtccatctcataaataaataaataaataaataataaagcagcccagattcctttattacatcatcaaatcaattttactgaatttattttaacccctctaaaatccagggtttattcaatattctttaaaaaaagaaatgtcagtatgtaactgacagcatttgggtatgaccatacaaaaaatattacaggaaacacagacatacaattttagccctttgtgagaatttccaaatgtgtgtgagaattggaccatgttgaatttcaacaggaatgggcatctgctcaggaaagttttgtacattgcttgaaattgcttttatcatagtgttaagaggcaggtttcagaaaaatatttgttaaagtatttctcctcagtctgtagtgattagagaactccacttttgcaaaggtttctgagctcagactctgcttcatgattctttccatcctgatccaccatacacaggctgcccatgtaatgggcgacaagttttcaggcccaggaaagcatgtaactctccttacatattcaagactttccattgagtggatatctgggttacagtaaagcttgtgagatgctcattgataagcttgtgcaatagttacagaacttgccttagaatctagcatgccaccttcatcaactctgttgaaagaaagaaccatgaagttaaagaccagct

SEQ ID NO: 136980 - DNA, 1069 bp, Homo sapiens
gagtagcttgcattgccatggagaagaccaaacaggagcagcaggccagctgtacttggtttggcaagaaaaagaagcagtacaaagataaatatttggcaaagcacaatgcaggtagggaaaagcacaactgttactgaggctgggttaagcatctccaagacctaaaaagatgtaatattttaattcagtcttcagtgttctctatccaaaaaattctaccatatgagatcttcatcaactttcaaaacctttaagaaacccctacctccaattaatatgttgattatttgctagatattttacagagctatactttataggacaaaaatgttattttgaaatagtatcctctggaatgaaaagaatccaacacgttaagtcctcccctgagaaatgaaagcttgagagtttgctgagtagccaggattcttatctatccttggctgggattggtcttgaacagatctcctcccgcctggctcctgcctggcccttgggcgtggccctgagataaacatctgagggtagaggtgtgctcttatcagagaactgtgccacaaatggttctgtggttggtttgagagagtacaaatgacatggacactaacttggttttgtccatttctgtgagtcgtcttcttccctcatggtatttccaagctaccacaagagcaagaatcttatcttggccttccctttatagtatgtatgtttgcccatatggaagtttgtattcaacttaagtcaaaatgttcacttgtcttgttgaaaactggaattaataccaaaaaggcatgatctgttgttgcaatagaatccccagaagattcacagggtgcaacttaagctaaagaaaatgcatggtgatacacaggagtgctaatacaagaagttattttcaataacttcttaatacaactccttttataaggaactttttctgaggaattgaaagtcctgactggcattaggttagttcccaaggtttcagaaataactccaaaaattagaaatgtggcccaaaaaatcaagtgaatctagtcatgcatacccagattgatggcat

SEQ ID NO: 136981 - DNA, 1048 bp, Homo sapiens
aattgtttgagttacacttaactttatcagcaatgtgtagacacactgccagttgtcatataagcattctacagcaagataccaacccagagttcttgctaattttatatcgtgtgctgctttagggttaaaacctatcctgactgctagtatttatggcttaaaggctgccacgcagtcatgacaacgtatccataatgccagcatcaccaatgcaggtttaaaaaagagcgagcatacttttctataattagaggcctattctgttacagtaaaagcataaattaagtctttatttttattaaacaagtatttcaagtgttccttccaaataaaaacagcaaagttttgaagctatactcatcaaagattactagtacattgtttctagcggtagaagttttttgtgtcgtatttccatgcatcgtttttgctttcaccatctgatgtcctgtttgtattgtaactgttggtgtgtggttatgacattagagctaacttctctttcacatcactatggcatcctttcttacgaactcctgttttatagatctatgtaagagcacaatttgaatatgatccagccaaggatgacctcatcccctgtaaagaagctggcattcgattcagagttggtgacatcatccagattattagtaaggatgatcataattggtggcagggtaaactggaaaactccaaaaatggaactgcaggtctcattccttctcctgaacttcaggaatggtatgtttttatgcgtgttttgctttgcttggttataaaaacaaagccctgaccatccattttccaattttatattattttagagtgtaaaacctgtttgatatattccttcctttacgagccaaacaaaatttaaattagtcatccaagaattctatatcttcagtatctagtgagatcctagttgcagagtcagggcttcattttacacaaaaagaaaggaaggtctggaaagagattggatgagcagccctgagccaagtcatggtctcacagcagagccctccactcctatatgctg

SEQ ID NO: 136982 - DNA, 1061 bp, Homo sapiens
aaccagaaggtactgttagttattaatacaacataagtttctctttttttttttaaatggtcgaactagtttggggtggaaccagtatcatagatgtaaattctatgttcttgagtaagaagaacccctcttaccttctttgcctttgaatagtagaaaaaataatgatacttctctcctagctccacctccagcctttttggccctcctgttccctggcagaattcaagcttgtggttggactcttcccagctagggcaatacttcaaaaaaaaaaaaagaaggctctctggccacctgcatctgcatcccccaggtccttggttaaagagtagacccctgcccctcaccctggctctactgacttgagtctctgcgggtggcacctggagatcagtcttgctcactaacatatgagaatgctcttctaagggatctcattacctttaaggctgacaggttctagaaatgctcttaagtcatctggggaaaaaaaatgtcttttaaaaagacatgcacatttctaaggcttaaaagaactctacagaagcaaaaattaaaaagtacttatttccttcctctccttgttcttatcgttaaagttgatttggacactaagggaatggagcctggaaaatattttgagtgtatagaatagtagagagaaagcaagcgatagaggagcctggatataggaagagtggctgtggctcctaggatctttgctggaagtgtaatattgttataggcttgagattattgttttaatcaatctgctaaaatagtcttaaaaaaagagttcttctctgatgtatatctcttttacccttactagtaataatatttattctataatagaaagattctgaggtgattgtaacatgtgaaatcttaggtttgtttctcttcagattgggtcagttagtaactcttgacacaggtactaaaaattattaaatacttttcaaacctaatctttaataaaaattaggcagttgggatcttcagcacgataatttatggtaatgtttgtcatcttatacttgatagggttttaatat

SEQ ID NO: 136983 - DNA, 1478 bp, Homo sapiens
ggcgattctccagaaagtgctaacggagacatggatatggagaatgtgaccagagttcggctggtacagtttcaaaagaacacagatgaaccaatggtaagtaggaagagaaagttttcaatactctcataagatcccagcatgagttatatcaactaacttcaacctatgctactaggagttggggagggaaggaagacatggatagttttaaagaaatcagtttccagatcttcagttcccccctgcccttcttttctagaattgttctgcctgaaactgtcttaggcattccggttctctttctcacctctcctttcacaattgcccttcaaccaaaaaaaggggaacatactgtaacattcctccagggtgtaaaaacctctggggcagcaaagaaagggacaatttgaaatattggtattggtattgagaaagtgaatgtctagtaacattgtaaaaatcatccttttataaatcttatagttttcagatcttttgccttcaacaaaattagaggaagattaattcagggggcattcaaagaattgagtaacactgctgaaataaatttcttccactcccagctacctacttaatatgaatcaatttactcagtgcttgggagtagagctggaagagaattgatgctgaaccttgcctccattctcatagaattctcgtagactgagaagatcaaggaaaggctccttgatgttaactgaacagagcaaggggagtgaggggaagcaggggaatactattcagcaaaccaaatagcacatgtgtaaacctggtagtaaaaaggctcttatcatagtttcccaatggaaagaaggcaccatggctgaactgcagacagcaaggtgagtggctggaacagaatcatacaagtgttggaagacatgttaaggattatgttcattatcttaaaaacaatgggaggctattgaagactttcaagcagggggataatattagatttttgttttagaaatatcactctagagaatgtatgagaggggtcaagagtggatgtacagaaaccagttaagaggctgttattgcagcagtgcagggcagatatgatggaactctgaacttgagggatggatgtcaagatggaaagaagtgaacacatttaagaaataatgaaagagtaggtaatatcagtaagccttaacaatggattgacagtagaactgagggagaagcaaagatcaagcacagcccttaagctttagtcttctaaaactgaatggacgttgagacagggaacattggataagttccaagttggaggagaaaccatatctttagaagaggaaaaaaattcaaatttatgcattcatatctttttcctcagaacatagaaaagggatattaggatatagaaaaacaaattacctacttctgaaagttgccttttagattaagggaaaagttatagcagtgactctatgaccatgatttttgga

SEQ ID NO: 136984 - DNA, 1155 bp, Homo sapiens
aatatttttctttgctgttattaaagtataacatattagcaattctcccattgttagacacatgggtttttttttttttcattttttgatcatgtcagtctttgtgcaaataaacatttttcttttagaaaaattatttcttataaagtgaaattactatgtgaaagactatgaaggacataatcccttccctaccagattttagacagaaagtctgtactggaagatggtgtacgttcactgagaaatgagacccatgcagtggaggctgcccggcctgcccacttggtcaggactagcttggaggggttgtctctgacttcaccaccaagggctcatagaagggaattaagatatcgctgatagaggcatgaatcaccaccctgtcttcacaatacgcagatagaagcagagagactctggggacaattctttggctcaactggacagtgaaaacctgctggtttccccctaaccctgcttaggtggaaataccacacctctgtatttaaaaataaactaggagaggagcaaggacccagagagagtatgtggttttgtcctctcatttcactaatagagaaactcggagcataaaatacaccaaggataattggtttatcatcttgaaacaatatgaattaacagcataaccagcactctaatgaacagggtattcggataagaaagctctgtcatttttgcttgtttgtttgttcttccctgaggcagtagttgagtagcacagaacattctagttatgatgctaaaatctaaggctcgggccatgtgacctcacaacatccccctcctgccccagtaggaagcttttgtatggttttcacaggttgaggtgagagtcctcctggatggatggtggtatgatcctgccatccagttgtgccaaagcaatcctttattggcttaatggttggaattcagttgagtgtaatgcaaacctctgaatccagccatatgcagttagaatagcagcaggtgtttactcagaaaaagaacagaggctttttcatgggttcatgtcccataaataacttacacaggtaaactccatcctggtggtaaaggagaactttttaaaacaattttatttgaaaacaatcaattttacctgtgcagaaaaatgttaatgactaa

SEQ ID NO: 136985 - DNA, 1048 bp, Homo sapiens
tcttgtactggcccagatgtactgattttttaattgccttttttgctgacagaagaaaactttaataatggatttagagcagcgtattactaggccagctgcactccttcttgcaccttcaagtaaggatatattccccatcatgattttactaaaacttgatttaagttagcatttcactgctaagctattaaactaaagctttcccggaacacctaactcaagagcatccaggaacattcttcttggccattaaatacagtaagcagttgtccattacatgtccatcttcaacttgagttatgtagtacaaactgggccatggtattgggagcagccctgaaccttagtccagggaaaatctaaattccagggtggaactcttgctccttgatttcagtcactagatttaggaatttacacactttttaagatgagaaacaaatttagtgtaagatttgtaaaattttcaaaatgaatgaaatgaaatcttcaaatgaattcccttcaaatgaatggagtttgctatctccatgcagatagtcatctgtatgactattatttgagtgctttcaactatttaaaataaattgatttttagcaattttgtagaatataaaatttcaagaaaaacaatttttggtgcaggtaggataggcattctttgcacgtcaaaaaagaaaaatggcctgagtgattttgatttctttttgtaacttgtaatatcccaatgatacagaattgtgtttagatttgtaagaaggacaggttatagaagttcttccagccgggtgccatggctcacgcctgtaatcctaacacgttgggaggccgaggtgggtggatcacctgaggtcaggagttcaagaccagcctgtccaacatggtgaatccccgtctctactaaaaataaaataaaatacaaaaattagccgggagtggtggtgcgtgcctgtaatcccatctactcaggaggctaaggcaggagaattgcttgaacccaggaggcggaggttgcagtaagccaagatcgtgccattgcactcca

SEQ ID NO: 136986 - DNA, 1293 bp, Homo sapiens
cctgggcaacagagagagacccccaactctacaaaaaactttttaaaaaattagccaggcatggtagcgtgcctgtagtcccacctgtttggaaggctgaggtggaaggattgctcaagcccagaaggtcgaggctgcagtgagccaggatcacgccactacactccagcctaggcaacagagcaagatcctgtctcaaaacaaaaaaaacacttgcctgcagagacagggttattgtggaatcacataaggtagtaagtataaaagcactttggaaattataagctgttaatacaaatataagtattaaaataatttcaaatgtggctttaaggaaacagtactataaaagaaattgttttctgtggttaagtctttctcatactttgttttcaattcttcagaatttactcagaaaaaaatcattttaatcaggccattttatgaagtgtcttggtacaaaggactctgcaaagtacaccccagaatacagaggtaaataggatacctacagtcctgccgttaaatcaactgccctctgaggtgaacttgtgtactttttattgattgattttgttttcaagatagttacaagtttattcagaggttttataggaaaaacagcctttttagtctttgagaaaaatagttattttatatgtgacagtattgatcttcaaaatgaaaactagtaacatcttaattagcatgtgctgcatgtgttatattaataatcactactgcctcggggtttaaaatctaaaacaaatagcaatggagaagcccgagaagtgtctttgtgtctatttatatcttataatgaattgaaacaccatgggatttttagatggttggtactgaactacagatatcaattatacacacatctatccaaccaagaatgtgttctgtggttctgtttgtcatacccaaagaaagaaataacggaactagaacaggtgttaatggaaggtgttaaaataatcaagggtgaagacagattttgaggttaagccaaaaatatgtatttattccatttgaaaagatgaaggagaaatggaataaaaactctaatttttctacctaattacagaaacttaaaaataggggcacttttcagagcttgaaatagacaacttgagtacaactagggaagtgcttcttttcatgattgagaacccatcaagttaatcatatttgggtacaagataagactataaatcagttcagaagaggtgacagatccaaggaggtttaatagacctgttggaattgtggctcttgcctacttta

SEQ ID NO: 136987 - DNA, 1049 bp, Homo sapiens
accatcctggctaacacggtgaaaacctgtctctactagaaatacacaaaaattagccgggcgtggtggtgggcacctgtagtcccagctactcgggtggctgaggcaggagactggcgtgaacccggcaggcagagcttgcagtgagccgagatcacgccactgcactccagcctgggcgacagagtgagactccgtctcaaaaaaaaaaaaaaaaaaaaattaagagataaaaaaataaaaaaccaaaaccattttataaaatgctcagatttccatcttaccagtgtaatattctcaagaatcatttactaaaaacccatagggtccatttatatgtatatgtaaatgcgtgtgtgtgtgtgttctaaatttttatttatgcattttttatttacttaactcctgaatcatgtgtcctctggcctcagctttttttctttctttcattagagccactccatatttgtcatctttgatttttgtactcttggactagcttcatcaatattcatatattaccactgggactgaggccctgggcccttcctaaagcctgaggtttctgtcccacagttagtaatataggaagaattaatgtgctaatgcttctttcctgttggtaccatgagcatctgtcagtatttatgcttctcctctcctctgtttatacatgtgtgtgcacctacacattcacatacacacacacacaatttcttaccaattagtatgtgcttgtaccttgtgcaaaatgacaagatcttgaggtgatggataccccatttaccatgatgtgatcattatgcccatatcaaaatgtctcctgtaccccataaatgtatactatgtacccacaaaaatttagaacttttttaaaatgacaagatcaactttcccattccagcagttatacagttcctcattttgacctttaccaattaggatgtgaatcttcctcttttgagtgaaggtgatttccaaaaacattcagaaatgggaatcttagagaagagactgaggagaaagccttgccatttttctcttgtgct

SEQ ID NO: 136988 - DNA, 1072 bp, Homo sapiens
tgggaagcttccatgccctctgtggatgcaccaccctccaggaacctccatgtgtgcagctatccggaaactccctgaaccctgtccttttgggtttctatggaggcttcattaccattgaccattggaggtcaactcaaccttcagcccctctcccctccctggaggttgggggtggggccaaaagtcccaaccctctcatccctccttggtctttcctgtgaccacccctcatcctgcaactgcctaggggctgccagccatcagtcagtcattggcatacaaagatagcccttacgccattctaaggattttaggaattgtattccaggaaacggagctgtagaccaaatatatatttcaaaatatcacgtccatctacactccggcccttggagagctcatctagttttgatggctttaaatgctatctgtacaacaatgactcctgaatccaggcctctccccctaggtattctttcttaattctgtatacagtttggctccctgacacttgactcatgtcaccccttcctactctccctgcttactccattcccatcatatcagcctccttgctgttcttcagactgcaggcacatttcacctcagcacctttatatgacccttccctagaatactcttccctcagatatcatggcttgttccctcaccatcttcaggtctttgcttaggtatcagcttcttagtaagaccttccctgaccaccctatttaaaatgtgggggaaggaatgccaccagtattccctatcccccttcccctcccttatctttctccatagcatctgtcaccctaagacatacctatatgttacttatatgtttattgtctgtctaggtcataaaatataagctgcataagtctagggatttttggctcttggttcacttctgtctagcacctagaatgtatctggcatgcagtaggtgctcaatgaatattaatgatttaatcaatgaatgaatgttcgttgtattataccatgctacttcctcagattatgcaaaacaataaaatattttaaaagtagattaataatgtatcttaag

SEQ ID NO: 136989 - DNA, 1044 bp, Homo sapiens
taacaaaatattactaactattgttaattgctataattaacccataaaatcaactgaacaggatttcagagtcaaattcatatttcaaataacagttctcagcatttggtttcattggggaatttccatttggcagtcaagtcatcttttttccaccgatttttttctcatgacttcctgccccctcctctcctttcccctgcctctgcctctgcccagggtaggcctcccaactctttcctggacagctacaggctctgcctgttgactctttcacctgcctctgctctatatatttggtgactttcaaccatgtgaaaattagaaaatttaaacttcttcatgaggtaagaaccacataaatacctactacgtagcatgcagaattcaatagggagtgccagtgtacaagacagaatacctattctgggctcaatgttttcaggaagcaattagataagtaatttttttcacctatgtgaacttgattttatggagaggtggaggagtggtgagagtatatgtattggtaaactttttatttggattgttattgttctattatttttagttttcaagtgaaaatcccattttatgtaaacatttttccttaatgttgttttaaatgtaggacgtgttggaacacctcattttatggcaccagaagtggtcaaaagagagccttacggaaagcctgtagacgtctgggggtgcggtgtgatcctttttatcctgctcagtggttgtttgcctttttacggaaccaaggaaagattgtttgaaggcattattaaaggaaaatataaggtaatgcatcatgaacattttctttttccattgagattaatttatcctgaaaaatgtttttttgaagttactgtctgtctttgcccactaattgactgccaggtagttaccccatcagagaaaaggtctttgcttacatcattgatccagtggccttggtaggcaacataggcctcaagtaaatttctgagtcattgtcagctgagctatcaccctggtgaagaaaacatttatgaa

SEQ ID NO: 136990 - DNA, 1043 bp, Homo sapiens
tgttaggttttgttacaaatttaactgtgtccctagaaacacattttaaaaaattattatttgaactaaagcatattttgctttctctcttatctaatattcaccttatttacttctgaaacaccaaacttaaatgttatatggtctggtaatactataaaatagtaataatataataaagaaaagacagtaatttaaaatagggagacagcataacttaaagtcaataagttataatttataatacattagaaataaaatgtattgcatatgaaaataacttttaattcatgcaagtagatctgcaaaatcttgatggcagtatccaaatgcagtatcaacaatgtgactatattgacagtaggagcttaaataccttgaatgtcttaaagtacttaaagtaactaaaaagacagtctcatttgaaatcaaggcagaggtgtcattcaagcaatttactcagtagttctaaaagcgaataactgctgacattagagtagccttatcaccatgaatcacgtttcactttgaatgttcagataatcaaattttagctgaaataaaggttcatttatgtagccgaaatcaagaaatactcacagttcaggttcgcctgaagtaaaaggagcagaaccccaagcttccctagacactgagactcgtcttggttgtgtcagctgggctcttccatccggtcgtggtgcaattggttggggttctcttcttttttatgttcatatgtggtggtagggttttttttttccccctctttttttttttcttttttcggtatgacaactctcagattccttttgaaaatattaaaaagccctactaccatggaacaactttaagctcaaccaacactgaactttaggaaattatttatatcttctttatgaataccttccaacttgacaattgtggaatgttttcctccccccgctcaaaatttaaaagttttataaattctaagcagaaatatgtattttctgtgttttgtaagaaatgatacataatatgctatatggactttcaaagca

SEQ ID NO: 136991 - DNA, 1067 bp, Homo sapiens
tctcggctcactgcaacctccgccccctggcttcaagcgattctcctgcctcagcctcccgagtagctgggattacaggcgcccgccaccatgcccggctaatttttgtatttttagtagagatggggtttcaccacgttggccaggctggtctcgaactcctgacctcaggtgatctgcccacttcggcctcccaaagtgctggaattacaggtgtgagccactatgcccaacctgtgatctaagattctaaaaggaaagggcaatctagaaagaatgtcaggctaccaaaaatgaaactgataatgcaacctgcattaccaggaaaaggaaaagggtgtctgtagaggaaccacctatattgtgtggttatgtagggagctctcataggttcagggaattgaggcacaagaagtaatgtgattttgagagctcaagtagctgaaatgacgtgaaaaactcacctgtgagtagttattttggattttttttcttctctcatgttagaatttaagttccattaggattaagaaccaagtcaattttgttcggctctctgtacctaatgcttagcataataaatattattaaatcaaagagggaatttagtagaaatgtatatgaagttctacatgtggatattaaaagcagctgtacaagtacaggaagagctttagctgcattaacaaacacaattgcaattgctctatcactagcgtagtgtggtggcaacgaaaaacccatctttagttgaattcctagatacgtgatgtctgaaatgaaaattgttactactatgctgcttctgtcccaggctggtagggtctcacctggaatgcagtgtttgatccacagcagcacacttagaaaaggccatggaccaaatggagagaagaactcaaatcatgtcaaagaagcaagttgaaggaaataggcacgttaccctggagatgagaatgctttacaaagccatagagaaaagggtttcactttgttatatgtgtcttcacaaagcaaaacaagaaccaatgatagaaattgcagagacagatgttgcctccttttaa

SEQ ID NO: 136992 - DNA, 1015 bp, Homo sapiens
gaatgttagttcactgagcatcattacatgtttcttgtgtacgtatttgaatgattctgtaagatgtataccttgtagatgacttgctggatcacagaatatgcatgttcaatgttactttatcaaactgtggctgaaatgaccctattgtttataaacctgttttaagtaaggtgtggttttaagacctattgctaggctattgaatcgttagcttatctgttaatttttactatacagtatttaaattctttccctttttatctaagcagtgatagatagtgggtgatctcattttttaattaggattttattaattatcttttcatctgttatagagatttaggcataaatgaatacagtggcaaattatacaagattttaaaatgataaatgaacatatattttctgacacattgtcagttcccaaatcatttacttttaaacacacttcaaattagtatcaagtgcttgattttaataactactttagtcacttgagaaactatggcactttaattattttgctgttagagccataaatttcacttaacttcataatctatgttaagagtattagcttaaaaatgtattttgaaaagattttacatacagatttaaaagttagtaccttgaaatggtttacagttaagcaaatgaaatatcacaaatacaagcagagctttgagatctgagttttgtaaatgctagaactttgtttcctaattttttagttcttcaaagaattaagaggctgcattatataattcattttagtatgtttacctcaagtacttttagaactagactgtattttcactgccacagatgtatcatgcagggagtatcctggtttaaattctgaagtgctttcactcctacttggttcaccttgaaatcgtctaaaaagaagttggcacattattttgcgaatgttactggacatcaggaaatacatgactggatctaagcaactattgaaagatgagagaaccagcatgatctcattggtttt

SEQ ID NO: 136993 - DNA, 1030 bp, Homo sapiens
atatattgcatgtttctacttggccaggtacatttatttactcattgagtcctcctaacaaccctatgagttaggtactactataattcctgttttcttagtagaggaaatagagcttacccaatgttacattgtaagtgatggcagcagaaataactcaggcagtctgactgcatcattcacccttttaaccagtcttttatgctgcctctcagtttgttatttaataatgcttaatattattgggataagaaaacctattggattcagccttaccataattcttgccatggccttaatgatgggaccataataatccgtatacattggccaagatcaatcccctggactgtgttggatgggcaataccaacatttttctagcactttttttcttctaattttccctcatctcctagtgaacagccaattctttctgtagatatgctaatgcatttaatcaggtcatctcctggtctaagagactttctgtctctgaagttgttttacatatttgtactcaggtatttggattttgtagttgaactcttagaaaacatttctattttcatgttctcaaggaacacctgatttcgactcctctatactatttataactgaaataccaagctatctaattataagataatttcatctgcaagttctttagcttggtccttgaggaatgcataagtgccagtgtttatttcaatttattgattagaaaaatttttagctttgcttctagtgtctgacaaaagaaaccataagcaaagtaaaagacaagtgcatagtgttagaagttatttgcaaactatataaataacaaaggatttagaacccagaatatataaagaactacttcaacaattttttaaaaagaaaaaggaaaaaaaaagataagcaactcattaggggaaaagggagggggaggggtatagatatgaataggccattcacccaagaagaaaactgaatgagcaaaaagtatatgaaatgatgcttcatttcactagtaatcagggaagtgc

SEQ ID NO: 136994 - DNA, 1058 bp, Homo sapiens
agattttaaaattaccaataaacactagccatagattgacccttgtattctaactaccagaaagcagacaagtcataaaccatttgcttctttatcctagtcatgaaataacgtgttctgaacagaagcactgacagttgagtttaaacagaaaacagcctgttagtttcatatgagtgggatcctttcaatatgcttaatttttgcttctgaaagtttctgccatctcaacgttcagtataactgttttttgagttttatgaatatatgtttatttatttttaaaaaccaaagagattttcttggtgattattgtcaaccaagctgtgacatgttaatgatgtagtttagtgtccctaataaagtcacatgaatgcttttcttaatattgtggggttttccattcaaaagtcaaccatatgattgcatatgtgctgaattagactttgtaaagagattatatagtgtcttcttgaatgttttatctaataaaagaaatataatggggtctgtgctacttctggccgaagcaagacaggtgagaatgttttttgtttctattaaataattcaattgctgacagttatctctttggtgtagaacataaaaaatgggtttaaaaatactataaggaaggaagcaaactattagtagaatctggatgaccaaaagatgtcttttcacagaactgtaagtcaaatctttctccataatggacgtacaggttcttatttttctcagatggcttacaaaagagtagtatgatgttagtactactaaaaaggaaaatccaataaatgtggttccaatgagacctgcaatctgagagatcatggctcctagttccatctgccgattgtagcataggctctcttctccttctgtagcctctatgactgagtagtatacggtaactggaatgattatgcccagtacaactccccatatgtaaatgcatagttttctagcaaagttgggctggcgaaattttttcagtaaatggccataaaatattttctcatagcatgaagtagtctcttgcgaggaatccttttgca

SEQ ID NO: 136995 - DNA, 1798 bp, Homo sapiens
cagggtttcaccatgttggccaggctgatctcgaactcctgaccttgtgagccaccacgcctggccagtaagaccctatctctatcaaaaaataaaaattagccaggtgtgttggcacacacctgtggtcctagctactggagaggctgaggcaggaggattgcttgagcccaggaggttgaagctgtaatgagctgtgattgtatcactgcactccagcgtgggcaacagagtgagactccatctcaaaaaaaaaaaaaattcttttgcttattagaagtgaatccttttactgttcctctccttctgagccaggagtagcgtgtgtgatatagccagaggtttttctgtcaggtgcaactatagctgtagtaactcttcccagtgttatcaattccatttgagtgtaggggccatcagaggaaggtttgtggcattaggctgctggattgaaatgcttatgcttagcagattaccagtgttccctctgttctccctttgtggtttgccggcaggatttcctttcaccttgtcttcccagatttgcccgtaactcccaccctgacagagcacaaggccagtgataggcctagagtcctcagcaaattgaacagaatgggccatcttcctcttctatccagggagtagaaacttacttccctgttaagttgtttatcctaaattttgtctagtcttaatggtttgtgttcctgattatagtttgaaagctgccttaatgagagtatgtgtatgcctgttttctacagtttaagataaaatcttgttggcctttgagtcaaaatttgagattcctgaaaccccaaatttgtgtttgactgtaactcacacagacacattaaaaacactgtttttttgaaatccaaactttaaaatagggtaagttttgaaggtgattttaaaaccaggcacagtggcttgcacctataatctcaaaactttgggaggctgaagcgggaggatcgcttgagcccaggagttcaagaccagcctgggcaacatagcaagagcacatctctacaaaaaaaaaaaaaaaaatacaaaaattagccaggcatgatggcacacacctgtagtcctagctactcaggaggctgaggtggtgagatcacctgagcccaagagtttgaagctgcagtgagctatgatcaccactgtactccagcctggacgacagagacagaccctgtctccaaaaacagaagtgatattttaagtaaaatatttactatgccattaaatagccagttcttcaattacataaaaaaattcaacatgatttaaaatcaactgtttaggaaagcatctatggtgtaaagatatccatgatgataatgagctgagtatatagttcattcttcagtataggaaattaaaatgtgagtttatcagaatgagtaacttaaagagaaattgcatatctcttttcctgcctttttaaatgtaagaatctctagaaatattttttgtttaaagtagtggtagagctgtaaagtgattgttttttaaataattatttttagaagttgtattttttgggttttttgtttttgtttttgagacagggtctcgctttgtcacccaggcaggaatgcagtggtgcaatcatggctcacttcagcctcaacctcctgggctcaacagatcctcccacctcagcctcccaagtagctaggactagagacatgtgccaccatgtccagctaatttttctattttttgtagagacgtggtctcactatgttgatcaggctggtctcaaactcctgggctcaagtga

SEQ ID NO: 136996 - DNA, 1134 bp, Homo sapiens
tcttcttacctcagcctcccaaagtgctgggattacaggcgtgagccaccgcgcccggtgttgatattctttatatttcagaagccgaaatccacacatttttacatgggtgaatagaatactcacatttagttaattgaaaatttttaatgttggtgtatttttcttaagacattcatccaaaagatatttattgagtgcctactgtgtggcaggcactgtcctaggaaccggagctacgtcagtgaagaaaacagacaaaaatcactgccctcatggagctgacattctagttcagggaggcaatactcagtaaacaaatgaactacatagtaggctagaatgtgaaaagtatcacagaaaaaactagagtggtcagaaggttagggagtgtccagagaagggcttgcttttgtaaatatggtggtcaaagtaggccacattgagatgatgatatctgagcaaggacttggaagagaggaagcgggctaatctgacagctgagggaagagcacttcagttaaaaggaacagccagtgcaaagaccgaaagacaggaacacaagtagcctgctcgaggaacagcaaggaggccggtgtggctgaggcaaaatgtgcaaagaggagagtaaaaaggagacaggagatgatcctgcctggctcagaccagagtagtagcagtggaggtagtaaaaaaaaaaaaaaaattagttagattcctgatatattttggagattatgccaataggatttcctaatatatctttggtaacgtaggcaaaacttagttttattcaagaccctgttacaggggtattccaacatagtggtcattgtaaaacttcaagaacaatacatttcacatgctaataatgtaaattttcacttggtttgatttgttaatatttttgccaataaagcaacctatgagcttttctttccattcagatatatattcagtgacttatctgtatgtagatttggtttgtatgtagatttttgtttctgcagttaaagtttttgtctaagttttctttccttatatttaataacgaaaacagaagagcattgcaatattttatttctctaagaaaaatttattttatcatctgtttcatctagccaagaatattct

SEQ ID NO: 136997 - DNA, 1045 bp, Homo sapiens
tagtttcagagttatttcttatatccccttcagtcatgaaggatattcactgggtagagaattctagattggcattttctttccattagatatcattccactatgttctggcatccattgatgtggagaattcagctagcaggggctgtaacttctctgaaggtaatgtcattatttctcaggttattaaaaattatttcatcttttgttttctgtagtttgtgatgtgtcttaagagtgtgcgtatgtgtgtttgaaccttgccttaggttctttgttttttcaatcagtgtattgatattattcatggttttagaaaattctcagccattatttcttcaaatgttgcttctgcccctttatctctttcgtcagctttgtgaccaaattaaatattggtagaggtataccttgtggtattttctatgtcttctaccttcttttctgtattttgcatgtttttttttctccatgctttggtctttttgtttcttctgtcctctcttactggtctctttctcttcagtactgtttaatctgatgttaatctattcactaatttttaaatgttaattatatttttcagttttatgtttctatttcctttttaaaatctactgtattattttttggccgggcatggtggctcacacctgtaatcccagcactttgggaggctgaggcaggcagatcacctgaggtcaggagttcaagaccagcctggccaacatggtgaaatctcgtctctactaaaaatacaaaaaaattagctggacgtggtggcgagcacctgtaatcccagctacttgggaggctgagggcaggagaatcgcttgaacccgggaggtggagtgagccaatcagcctgggcaacaagagcaaaactccatctcaaaaaatagatagatagccagccagccagcctgggtaacaagagcaaaactctgtctcaaaaaacggatggatggatggatggatggatggatggatggatggatggatggataggtaggtaggtaggtagatagatagatagatagataga

SEQ ID NO: 136998 - DNA, 1106 bp, Homo sapiens
ctttgggattacacttaaatttgaacctgtctgtagcaatttgctgaaacatattttaaatacaggttcagttttgaagacaggctgagttgggttatccccacaagttaaatatttatttctaagtgacacatttgggcttgtctttagtagtatctggtacttgagttaagctgtaaatcctaaattggctggccaaggaattttaattaccttattacagagcgattacatataccacggggagacttttacaataattaaatattgatttaaaacacatccgacatgatgtgtatcttttaaaataatttttttgtatcttttaaattttttatctttaatatttttaccttttatatctttaatttttttgtatattttaaaataatattagcagtttgtgtttttgtagctcacaaaggcgataaactgaaagctctttttttattattatttttttttggtctagtatttatgcctggggaagggagtgtttgtgaaatttatttatactgatagagtggaactgattactacttaccagcaaacttgctgcttaagggaaaatatgtttgtctcataccaagcaataaatatctgtactgtagcattttaatctatttgaagatttgctcatattttcatagctagtcttatataatctattttgattttttctttttatgtgtgatgatataaattgctatttgttctttcagcaaagtaaacatctcttttgactcacagtatcaaaatgtttagttgattttagttttgcaaactgtgtgtcagggatccccaagaccacccccaggcttgatgattcactaagaaaactcaaaggactcagcatatagtcatattcacagctatgatttattatagctaaaggatataaagagaaatcagcaaaaggaaaagatacattagctgaagtccaggggaaaccaggcacaagctttcaagggtctccccagcaatgagttgtgacaacacatgtgaaatggtgccaaccagggaagcttattagagactctgccctgggtttttattgggggctggtcacataggcatcttccacttggcacttaaccaaattccag

SEQ ID NO: 136999 - DNA, 1040 bp, Homo sapiens
acttagttatttctcaaaagggccagaagcaaactagaaatagaaaattgttcttttgtatcattgttttgtaaattcacctcaacaattggccttgcacagttttttgcatcctccttatctcctgggtttcaaacaaaccaaaaatatcgattactctaagatttaaagtcatgtggagcaaaaaacaaagccaatgcacttgtgtatagttccacctactggctaggtgagagattgcttctatagctgctacgtagactaagctactccagaattgccctcatgtttctggcaacagatgtaattacccctggtatttaggggctcattgctcaggttatgggttatctggatcctttttacagtttttgtaacatgacacccatacagtgtagacaatgaaaggcaaaaaaataaaataaaattaggtcagttagttttgttgtttgttggctacttagaagcagcatttatcattttggtggagaaaaggctagacaaaacagcatatttggatcatgagtgagtttcttaatatggtgtccatatctgtctttgccacagactatgtataaccaacactcctttttttcttcctaaactgaagtcatgaaattatatggcccgagaatgttgtttatcatgttagaaaatccttagaactagttgatggctgggctcagtggcttacgcctataatcccagcagtttgggaggccaaggcaggaggatcacctaggggtttgagaccagcctgggcaatagagtgagacctcatctctacgaaaaaattttaaaaattagccaagcatggtggcacacacctgtagtcccagctacttgggaggctgaggtgggagaattacttgagccacagaggcagaaattgcagtgaaccaagatcatgccactgtactccagtgtgggcaacaaagtgagaccctgtctcaaaaataataagccggacttggtggcttacacctgtaatcccagcagtttgggaggctaaggtaggtggatcacttgaggtcaggagt

SEQ ID NO: 137000 - DNA, 1040 bp, Homo sapiens
ggaaagtattaagaaatgtgtactttttttattaaaagctcactctatactgtatatagatttaagcttgcaaaaaatatgaaaagctatagtcaaagattttaaagggtaaaaagttaagctaagtttaaatgggggatttcatctctctagttagagaagtatccatgttaccatagatcacatccattcattcatcattcactctaattgtcttttgttcctacctaatgaagtatgctgtatgtttgttttacagatctaaagcgggaagccagtatctgtcatatgctgaaacatccacacattgtagagttattggagacatatagctcagatggaatgctttacatggttttcgaattgtgagtgtgtattttaattcttaaagggtaaaacttgaagcaatgttggtgttggataatgctaacacttttctcttgaaatttagcagtagttgtgaacttatctgttcagaaagacctaaagtcacaagaaaaaaggattatgtcatcataaggtttacagtggcaaaggaagcaaaagctgggcatattcagttactcttcatgctttcagcatgcttcagagaagagactccaaaaggaaattgagttcagaggaataggaggaccccaaactataaacttctgaccagtagaagtcttagtgaagaagagtaggatgaaagtggaggcatccatgtagcaagactcttggcaactaaaaacaagtaacgacagacttagttcctcttttgatataatcaccatatggcatataagggcaattttatagatcacagtgtatcttgatttcaataagtcacttgatatgtctgtcgcagactttttgttggtaagatggagaattgtgagctaaggatagtacaactgggtcatccagctctggtcggatgattgtgtccaaagagattatataaagctttataggacagcatcctacagggttttatctttgatcctattctgttcaaaattgtaatcaggccgggagtggtgactcatgcctgtaatctc

SEQ ID NO: 137001 - DNA, 1060 bp, Homo sapiens
ctttcctagttgtcaaatgaggagaatgatactgtcctcatggggctggtgcagggattaagggtgatgatatctgtgaagcatctcagcttagtgcttagcacactgtaggtggtcagtaattttcctgttctctgttgtgatatatcctctactaattctggagttatctttatcttgcctacctcaatccattctctacaatttccatttgtttatcttaattattttgtcttcctcttacttttttcctaaataaagctacaggagagtagattttctgtactctgacaagacatacatttttcttcttttaatagtgttaaaacaaatgtccaaaaaaacctttaaataaaaaaccaaacatgttcaaggaagttaccatcttttctaaactctgtcagcagggtggctgataaaataaattttctactcattagtctgagatgcttattgaagactgctaatttaggaagtatgggcctgctatggtctgaatgtttatgtcccccaccccaaatttatatgttgaatcctaattgtcgaggtgatggtattagaagatggcgcctttggaagggctctgccctcgtgaatgggattagtgctcttataaaagatgccttagagagatcacttgcccccactaccatgtaaggacacagtgagaagatgccgcttatgaaccagagagcagcctgcattagataccagatctgctggtaccttgatcttggacttcccagtttctagacccatgagaaataaattcctgttgtttatagaccacctagtctatggtattttgttatagccagcccaaacagactaagacagggcccttttatgttctggcttaccgtatttaactatggctattttactagtcagaacccctcttttctctagtgtatgtttctgtgacttagatttagtttgagggcattttcatgtttacttttttcttaaaaattttcccaagattattaacagatactaaatgaacttccctcttccatttcaattttatatggtatctcttttagatctttctcttaaa

SEQ ID NO: 137002 - DNA, 1042 bp, Homo sapiens
ttggtttccaaacattccaaattgttctgtacaggcaaaccctgactgatataactgatagcatcatcaaaaactgtcactcgttttcctcaagaaacatgaatatttaatagatttaatttacataggaaatttgtattcattttgtggaataattactggtttagttaatgaatctctataccttccttttgcatgcagaaatcatttgccaaaaccttttatttgcagttgcattttcttagtgtcatcatttgcttgactatggcttgcaattgatattgttagaagtaatccagcaaatttcaagatattaaggcttatacttttgtttaattttgtcatgcaaaatactatagaatatgcttccagaacagtttgatcatgtatttttaaattcccatcccatatttatcaaattatagtttataaatttaatatttaaaatgaaaactcattctttgaaacattaatgaattatgttcattatgtgacataatacgtcacataatataaatgtgcaatattttttgagttgtcagataatcattttgagcattggtattattaattatagattcttaaggatgatgaaatccttaaacttggctagtatttaaaaaacgtatttgttaattgtggttctatggggaaaaggttttgtgtttcttggaatagtttgagcaaaactgctagagaccagcttctagctgctgtaataattttcaatgaaacacctccttttcacagttcctgatcataatagtcatttaattattgttttgctcattggctagtattttcctaaatgggatttcccttagatttttttttgtttttcttcacttttaaagcaaatattctttgtatagaatttcatatatttctgtagaccttatatctttttttccccacagggcaagttctatctgtagaccttagacaataaattatgagtactgttttagcaaactgtacatctttggctgtttttcctaatggttttgtgtatgtgtgtctgttttgaattttttcaggctaa

SEQ ID NO: 137003 - DNA, 1429 bp, Homo sapiens
gggttaagtacagaaggtaagagatggatttcaagtaagttatttgatgtctggctttattccatctccaaaatccatttaccaacctaaccttcatctgggggtggggaagcagagggtatgatgtagagggaagtgggtggagacagtttaaactctattctagtttgtcagaattctaggacatagtatttgaaagacagggtaatttacagagttataaaatcatctaggatttctatgggcctatgttttttgactaggaagaaagcaaaaatctgggctttttttttagggtctaattttgaattatattgtgtgggtcatgggatgggaaaggaaggaggtgaaataatggcaagaatgataattgaagattcagaagaaacttagttacctcaaaatgcatcacttactacctttaggattatgatttagtggaatcaaaagattcatatctcacatttggcttaagtcacatatgatatatgtgtaaaaatttgaaaggtcagtactgttaggactttcaggacttaaaattttgtttcaatacattattatagataatcatatttatatgtatatttataaacagtacgtaaacattttaaagttttattttgtttgttttttaagccatagtttcatgtaactgtgacatacatgctcatacttcagatggcacaattgatcatgatactaacttttctaattagcccattactaacttttcacttttccacagttcagtaaaatatgaatccttctttagtccttccctttttaatcccaagagcaatacagttgataatttagattggaaaatctagggcagtgtagcctatttatattttatccagttattttactttgggaagtagaagcccacatattgtgagcttcaagtttgtctgttcctggagatctttttttcttttaaatacttttgtgaccctttgaattattattattcatataatgattatggaagattcttagaagttgctactcacaaagaataactgatttgtttttagtgctttaatatttaaaatattatggtaagatttagagattttatattttatggttttatgctctagaattggctattattgcttttgaatataaattattttataaatctagcaacatttaaaattgacttttaagtggggtttagaacaaaattatatttccttacacctttaactgcctttaagcttaatattctatatttgatttttctctacctctgttgtctgaccaaatactgaggtaattttgtataaacctaattcattaaacatatgttctgatcctgtttataaacttagtaagattccaattttaaatcacaagtctaagtcagttactcagttaccaatattaaattggaataatataagccaaattctcttaagcattg

SEQ ID NO: 137004 - DNA, 1005 bp, Homo sapiens
ttcataatttgtatttgtgttgttattataaatactaaaatttagattatcatgtccaaagtccactgataataaatgctacatgggcaacggggtggagtgtgacagaagagagaggtttcttaaccacaagactggactgctaatgtgtaatatgagtacgggggcaggaggtaggtattttatatggtgtttcccaaacttacttgaatgcgaaactttcattctttaaggactccacaagatgccaatttgggaaaccctgacttagagtgttaggtaattacatttttgtttctgttttacagtataattttgtataatcctgatgcaactgaaatgaatagagagaggcgtattggtgactgagatatctttcactagcttatttaaattagataatttaattttatttaatttagaagtaggtttacctggttatggagatctttaaaacatggttttaaatgagaagagattaacggtattccacagaagtatcactgaaataaaaatctcttaaggaggataacaacttcagagtgcagatattaacctccgccccctagctgcagagttgtgattaatggcttgcaacaatactattataggataatgtagcatttggaaaacaacctatgttagtggcatattaacagaacacaccccttagaaatatgatttacaatgtaatttcagacttccagacttccataattattagtttccatttacaaagagtggattatgcacagagaatttgacaattgtgataatgctaggtactagttaaaagtaattaggtttatgaacactagtagagaaggaggagtgaagaggaggagaaaaaggtcaatagtgaatttcaaaaaagttgtttctctactaaatattttcattgggccaatttctgatgtataggcccacatttagaaaataacaaaatgtgaatatatagctcttaacataaaaatgaaagttatggttttcttgcaccagccttaa

SEQ ID NO: 137005 - DNA, 1050 bp, Homo sapiens
gggtatgccatgagatctagaatgtgataatcctggtagtgcagtatcaattcttggacaagggcaattctaagtcaaatagacatgctgaattcacttgaagcagaattgaagaggtaggaaacatagtcatttagcataacctgaaacctttactccaaatgcattatgtaattgagattaaaacttgttgggaacatctaagtgaggggtggacaaccttgtttctgtaaagtgccagacggtaaatattttaatctttgcaggccataccgtttttgtcacaaccactcaactctgctgtagcaaaaaagcagtcatacacaacgcgtaagcgaatgatgagtgtggctctactccaataaaactgtatttacagaaacaggtggcagtctggatttgtcctgtggtctgtagtttgctgacccctgatctaagtgatcatactgcccagctccattaggtgtactataatatctatttcaaaaaggaatgcaatctgagcaagatagaataatattgccttccctctgttttcaaggagagtagaaatggcagcaatggagggacagaagtacatggtttacttgtacatatggtcattgtgcctctggaaaccccaaggtctatgtatctgaactcagagcaatttattaaccacactctttttagatttagtctgattatggtctttttgtttatttgtttattcttaactgattttactatgacacagtatacaaaatcctttagggaaaccgtataccacttctctttgcaatgaaatttctaatcagggcttaaagtagtattttcccaagtgcatgacaggtattgtggtaggctgtgtttttaggtggtaccccaataagtcattaaataaacagtaataaacagaattatatacagtcttctttcagtctttcttattaatacatttgagaaaatttagttttaatgtagcataaacaaccaacatagactctgtttttggtttttgtttaagtgagaatagccctcaagttcacagcatttggaaaggaacaatac

SEQ ID NO: 137006 - DNA, 1019 bp, Homo sapiens
agattctgtctaacgtgagtttctattaaatttggcaaattcctcagtaagttacaggattctgtatgtatcaagaattgaatttggcaatgtggaacagaaaacccaaataatagtggcttaagtaaatttggattcatttttctgtaatgaaatgagagaattaaacattccagggttgatagggtgcctccatgatgtcattagggccctaagcaccttctcaccttcttcccagccatccttgttgtgtgctcctagttataagatggctcctgaggctccagtcatcccatttgcgttccaggcaggctggaagacagggaggagcaaaatggtgcctgtcagctgagtaagacctcttaaaagagctttgctgtaaaccacatctattgaagtttgcttttatctcattggccaagctgtatcacatgactgtctcatctactgcaaagctaggaaatgtatttttacttaagcacattggaacccagcaacaatggccttctgacagcaaaaaaagaagcagatggatgattaataatctttgctacagtacacctctttagctatccagtccttactcagttatcttcccacacaaagaacatgcttaccccttccttaatgggaacacctccaaagtcttatctagttactatatccaacttttaagtctttgatttcttggtgatgtacagtcctctcaattaggtctaggtgtggcttcttgtggtctggtgtcccacaaactgccccctccttcattgttacatagatagaaaaagaataggataactttagtaaaagttcccacccaaccaaaaaggagagagtaggaaacgtagcatttaacagatcctattgggcaggaaaagcaaagactctctgtcctgccttcttggatggcccatttggcaggccctggctctgctctaggggaatttcctttgcctgggaaagaaatttgtaagggaagccccagcatccttgaagaactctgtgatcagtgagaaatt

SEQ ID NO: 137007 - DNA, 1063 bp, Homo sapiens
tctttaaaagtgattttattttcttgtttgatttatagacattaatacttctcaactccttatagggctcagaacatgttaggtgaaaatattgcataaagagatttgagaatgaatggggcaatgataaatttacactgaagtcaaagtaaagaaagacttctgagtattttgttttccccagcttctttttaaattgcttaattttgttggagctttgatgtgtggaacttactacaagtgacaaatgtttgtggccaatcagatggcacatcctgttccatctgatattgaacatcctgtttagtcagtgaggtttagatcagtggttttcaaagtgtggatcttctgaccagtagcagcatctggaaactcattagaaatgcagattcttaggccctgctctggccctacagaattagaagccctggggttggagcacagctatttctgttgtaacaaaccctccaagggaattctgaggcacgctaaagattgagaaccactgtcttggaactctagatcaggggtcagtaaactatggtccatgggccaaatcatcctactgcctgtttttgtaaatagttatttggaacacagccaccgtcatttatttaagcatcatctatggttgcttttatgctatggggcagagttgattagttatgacagagaccaaatggtccatacagccttaaccatttctccagctttttacacaaaaagcttgccaatccctactcaagataaagcattcgtgctgttttctttcctttaattctgaactgtgaacagctaaaatcattaggtaaacgcttgtgtttgcctttacacctgaccctcctatttctacagatccattcttctctctcatatcaaattattaattcaatgagtagagacttgtaaatgaaaataacatactactctaccctttccttttctgttaggtagtggtggtagcctgtttaacaattccatgaccttttctcactgattgtgtgctggtgtgtccttggtttttctgtactctagtgtaatctaacttaatcatgtattgtaa

SEQ ID NO: 137008 - DNA, 1270 bp, Homo sapiens
ggaggagaaagaggagggagcgtctctgccgccgcctcctggtccccagcgccgatccgccgccgccgccacctccctccgcggcgatcctcgctccatggtcctgccgcggccccctctgtagcccgagctgctccgcgacgcgacggagccggcctcggacagagggagcggtcgcggcctcgcggcccgcgcgggctgacgagcggagagcgcgacgccgcgcggtccccgaggatccgcacgccgggcagcgcggcccgagcagcgcgagaagcagcgggcgggcgggcggcgccgggcccgggccgccctcgctcccgcgccccggccccgccgcccgcgccggggcggtcgcctgcagaggaaggcgccgcagtctctgggcctcgcggccccactcgagcgtcctcggcaccgagggctcgcgggtcctgaggggaggaggcgatcccggggctgggcactgagctcttgggcgcccccacccccgttttcgaagccctccacgctgcggccgctatcccctccggaccatggccgacgacgacgtgctgttcgaggatgtgtacgagctgtgcgaggtgatcggaaagtgagtctccacgcgagggagcgggagtgtggaaaaatgcatttcagtgatgccccggtcttcccgcacccgctcggggcctgccccctgccctccctccttcccctcttcccctctcgtccttctcatcctggagtatttatagacgtgtacctggagctcctgccaggcgggggcctgggggttctcagcggtccattgaggccaccgagccgaggttggccaccccgtaaggcgtggggccggctgcctgcattttatctgacggttgcacagggacgtggcacagccgattttatagttgcttcagttggggttattgttaccttgcatgtaccatagaccatttttgaaacagagcagcttgcatttcctttgcttgtgtggtgagagagtccagggttttaattgtggggtgtgtgtctattgtgcgggatattagacagatgcctttgtgtacaccccatgctcggattggagggggtcatttaagacggggtgctttcagtttcagcaaattccctcctggtgtacacgaacgtggaaagagttgggggcattcgaatttttaatgccttgttatgcaatgactgttcaatcagtgctcgagactcccctcgactgttgttgggatggtggttagcgtggtagagccgtctgctttgagtcaccggg

SEQ ID NO: 137009 - DNA, 1034 bp, Homo sapiens
ccttccttctgaaagggcttctgggtgccatatcaaagtgtacaccacctgattctttgagtgtcattgtttgagttactcatatacgatagacttatgggtttgttaaaacattgtcttgaccaattaaataccaggtaaaagagattctgcagtttgacttcttatggcaacagaactcaagtggtctatttattgcctgtgaaatgatgtcatccttctactatggaagagttctgagaacatacgtgtttgcataagtgtgtgtgtttgtgcgtatgtatatgtgtcctccaatacaaaataaaggcacttttctctttatctctcttcctgtaaaccatatctccactttcccagccttgctttatctgtctcttctattcagtgtttttaatactacattttctcgtaacagaagggaatgtgagccaaagccacagggaattgaccttcttgtgttgttttctacagatgctaaggattagctaaaacaggcacttttgaggggaaggattacccaaaagacacagtaggttctagggcaaagaggtcagtattctggcagaggtggtagtcatagcagctggtatcaaatggcaatgatggcttgaggacagtggggtaaacactggtcactaggcttctgtttgggaatcatgagggagaggcctgctttgtacctgtccacagtatttcactattcccagtgtcatctggggctgtggattaaacatggagctggtgaaagcttataccttgcttcaccttcatattaacttgctccatctgggacttaagtttttcaagctattgaaaagcatttctctcaccaggactgcttgttggcaagggcctgaggaggaaggcaagacactgttattgttcctaccactgtttcagtcttgatggcagtgtaggtagctattctttggtggcatttatggtaacatttaataacatttatggtaaagtaaaacaaagaaaatcccagagaccttatctgtaattaatgggaaatggtggcagtaagt

SEQ ID NO: 137010 - DNA, 2399 bp, Homo sapiens
agcctcatcatgattgatatattgtcgcctatgttgccatcattggtaaaatgtttgaaaattaggaattttgttgcctttcatccctggctagaataccacactgacctatcctccccctactaggtgttaataatttctgagttatccctgcaggatctgattcagaaagagaaagctgatgggagggagtaagtagagtggccccacagtagccatttttatatataaatctttcgaggagactctgaacatgctacaaattaatgttgggtagagatagctttatctgaacccaacattgtttatcctgaacaggccaagagaagagattggcatgaactgttgctttgccagttccagccagtaccagcaaaaacatacatgtatgttggagcatcagaggaaagcagctcctggtggagagtaagaaaaaggagtatttcagcttgtttctctttatttatttatgtatttatttattcattcaaaaaacacttgttgagtacctgcaatgaagtggactgctgtttcccaaaatctggtcccactaggcaagcctcctaaaagcaatatggttgtagatcactggaaaataaatatgatgacaatgtgttatatacattgactaggggttctgggtcctctcccatctccataccatctgtattctgcaattcagagttctttctgggattttattcttagtctttttcttgttcagtctccagaattccttaaggagcgcggtttttttatttttcctctgcctgattacctgctcttcctccctttctatactttatgctccatacttggtcattagcagaggtgaaattaccatgtagctgataaactttatgctttatggccttataactgtaggttgcttctggttctcattctaaataaataaccagtttcatactcagtcctgtatttgcaattttgctttcttatttcttagagaggatacccaagttatatataagttgtaggtcccacaaaacctgaatctgtccatagtcactcttaattattaatttatttccatttgggggaagtagagggcatttcttgcacagtagttcacacctctattccagaggccagcttcagtgacactggaaaaagcacttgacttcctctaatgccatctccatcagtcagatctgagtgattttaatactcaaactgaccagaaacattgctttctatctgtggtaccttcccagatggttcacagctaaaatgaaagtagttgcaagtgtggctcgtgttagatcctggacataaactgagtgtttcatgagcgggtgagaagcatcacttcccaagcattcttgtgaattcagaaacataccatttttgtgtgtgcttggcagtatcccatgaattacttaatagtccctgtggcagttttatatgcctttggatgttctttataacttttattaggacttgtacactttgataggttacccacacattcataatacatcaccaatccatagcatcagcagtgttatttctattatatagcacccagaagagtacatattctaagtgacattactcaaaattgatccatattagcaacattttttaaataactctctacacagagaatagcagcatctggatgtatctccttttttgtcattataaaacataaaatagactatgtcttacaaccacaaactctttttatctgcctaaccaccaattaaataattatatatagtatgttaatagttgagaggggaaataaccctgctgatttgttggtctagtggtatctttaaaatgctctggtccttaaccatcattcatcatctatcacccattcctttttgaaactcctttcatgttttcagcgatgctattggatcctgaatttttatcccatactgattgctgcttttccatccctttcattgtgctcatattcttgcaaacatctggttttgaaaggtttcactgttcatcactttggggctcttggtactctctccctctctttctcattctaggacttcagctgtcccttatctatagaaaactctcaagtctctgatttgaatcctcttccttccctgaactcctgtcccatagcttatctgctcctgggtatttcacgattgaacacttcaggttcaacatgtaccatagctactgtgctagccaatccagcttcttttcctcagttccttgactctgttcttagcaccaccatcccttctataatttttgacataatcttttcttttatcttctgcacccttttagcagatccttctcactcttctttggggctatctctcttctcctttctctatgatgacctccctccccccatcaccaggacagactcttttttaaaagtattttgtataaat

SEQ ID NO: 137011 - DNA, 3055 bp, Homo sapiens
atgattgagtccacaacataccacaatttccctttttgctgaaatatatcacctgtaaaaattattctgctaggaccattttaggcattttaacccagaacttggcagcatgtactgtgtggttttgcagtgattaagaaaagcttccatttaagaaatgccacttatttttggtgtcttagttatttaaatactctgaggttcaatgtgggctgagcattaattttttgctgtttaggacacttctctgcccctaatttatattttatttttctaaaaaataaactagggtgtttttacttcataaactttttaaatactaaacaaagaatacaagaattacatttatttgtgttctgattttttttttttgaaatcttcatggttgaaggagcttttggatttatctggcattaaatgggaaattttagcatttagtcaatactaattgatttgaattgttacataatcctcagctattgtgaaaaatgtatttaacaatagatctaggtatagcataattgcatacattacagagaccaataatggagaaaaagaaacatggaacaccattattggtgaatattgggtcacaatctttgtgcagttatggcatagaaatattttaacctatgaaaaatcttgcagtatttgcattcaagtgtactcagaaagactaaggttgtattctagttttatattacatatagggtgcccagccctgtgatttagaaagtgtagacacccgataaatagttgttaaggaatatacttgtatgtaggagatgtatagatttcataatgatagggttttttttttcattgtaattagaacttcaaaaattgaatcaaaacattttctaaatgttgtgagcatttgagacaaattgattgttgggactgtttctcctcctttatcatgacaaatattttatatttttaccagcaatttgtattttccttcaaacaatctatttcttgttatgttgccatctgtcattgtgtattagggaaatttaaagtctttgaactatggttttgtcatccaagaagttggattaagttatatgtgatatatcttctggtatggatttttagtaattagtcaatttcatgaagatccgtctctttagctttctttcttggaccctcctcaacgtttttttcttctatgctttattctgggaagagtttgcattatctgtcatactgacattcttcacaaacttgaatcagggcctgggtctctccacaggtgctcattcacactttccccatggcttctctgagactttgtttaaaacccttttctagttgttgctaggcaaaagtaaacaaagcacactcaataacaatatttaattgattgactaagagtgttaagaacataaaaaacagatgataagatttaagagttgaagtaattatatattaaccatgtccaagggttatagaatggtggcctgtaagagcccaaagggactgaaacagaggctcagaggggtccagggaattaccaaatgccacaaaattcttagctgtttaacttgtccttggatgcgtaaaatactgacttccaggacagtgctctttctgtacctcacctcactggacctgctttgtcagctcatccatagatctgcagtaaaccttattattgctttactttgaacgttgatgctctaaagcatagtgactactgcttaacagtaatttatatattataagatatcacaaggaatgttattgctttctgaacatttaaatttaaaaatatgggacaccctattaaataaaatgactttcatatgacaaatctatttccttgttggaaaggccattcctggtgcatttaggatatgtagagattgttgggatagtttagatcagtgattcttgaccttttggaccaaatgtctcttggaaaatctgatgaaagctattggacgtttcaccaaaaaatgcgtatttttacgcatagatgtttttctcctctgcaccaggccaatgttctggaaacctcttctgcgtcactgtcctaatagtgtaattatttttagctgatactgagacttcacgaaagtggtgaaaaatatttcagaggattcattatatcattagacagttactagtaatgaatttttaaatagaccatgatgaagagtcaaaacattcaggctggacacgaaggcacctacatttgctatattagctctatgataactagagaagtgaaattgacatgttttgaaaagaaagaatttgggagaaaacattggtgaaggaaatggaaggctgtggtggttgagatttcttttagtagttttcaaagattgtttatttaaagtatcattagcccatcgtctattcagtgacttgtgtgaggcatagaatctgtgtaacctctgtgtcacaggggttacagagatgagcctgaaatgctcttcaaagttggttcagaggtccaatgtcagcacagaggagggaggagttaattccacctggaggaagtgacaaggaaaggatttcatggaggaagtcatactcgacagaagtgtcatagattttggataaattctgaaatgtaatgaagatgacctttaaggtgaccgtttccagattaaatgagttagcttggagctgtggcctaagttgaagaccattttcttgcttgtatgtatctgttcattcattcagtaaatatttgtcaattgtgcatcactgtatgccttgagtaaaatttgtggggtttgctctcgcttctctgctttgggcatattgcctcaaaaataaaatgcctcttcgaaaatctgatgaaatctgattgcctcaaaaatgaggcaatatgagttgatatttgactatactttttattgcccttggagtgttcagtccaagagtccaaatgtgcagttatgtaagaattcttttggccagagaccacttcactgaataatagagaattaacaatgtatcatgcagtgtactctgtgcaattcctaggtgatgatgcatatcaaagttgaagaaagatgtcactttcgggaataaagag

SEQ ID NO: 137012 - DNA, 1017 bp, Homo sapiens
gcaagctgttcagatgcgtcttccattagttcagaacttgcccgtttttcctaatgtgattcatccatgattcttcagagtcaaattaataaagttgaaatgcctgcagggctgccacagggttggtgtatgtttccaatattgttgcatgtttgtggcctcttcaaaggctgagtagtgagatctaaatcaagaccccaaagactgaggtgcaacacagtagaatacagtgttaccgcttctagtgtcttcatgctgaatttgaggcacttcatttagaacgttcttactttgtaaaggaacattctgcaaaatgcctcactctttttactgcttcatttaggattatttgctttaaagatagtgtcagcattctaaagacatcatgtttggaaactcccaggagtccccttgctgtctttgttaaagcccagaaatttattggagtactaattccagttttgttcattatatcttaaaatagttgttgtagattagaaaaggtttgaaggacagcactgatggttactaaaagagagaataaacattatatgagggcacattaaagaagtcacagaagcacttcatttctggtattatggcagaatggaaaccctaactcctcattgaaataagtaaaatgctgaatacaatatgctgtgctcatctgacatggaagttagaaatttgtagatctcctggatgttgcatagacatctcaaacgtaacacatccaacactagacttctgatcttccttaaggccgctgttccagctgcccatgttagaagatggcaacttcgaaaaaactcagagtcatgctcaacactaccagaccctcatttgttttgtcaggaaattccgttggccctgccttcaaaacatatccagaattcaacgcttcccaccacttccactgctatcccctggtgggagccaccattatatctctaggccagattactagagtaggctcctgattttcctgcttttactcctgccgcctacattctgttc

SEQ ID NO: 137013 - DNA, 1057 bp, Homo sapiens
atgttttcaagtgcaatgagtggcattcaacaaaaaataatcaggcaaacaaggaaaaaatgcatgacaacatgcttgagaattggtatacacaacaaaatagacacagaccctttatttattaaaaaaaaaaaaaccacggaagggttgcagctcaccaatattcaattattgattaaatcattggaactttccaattaataaaaacagctgaaaagcatggagaactgtatttatgagggaggaagtaaacaattttagtttatgatagagggtttgcatatttgtaaataatttagtgatatgtgaatctttttataccttcttgtattcttttcctatgacgcattctttcctggaagtgttttaaaatagcatctagagccatcaatgtggactgatttaagatttcacctggtggaaattagggaattaggctttgggtggctcctccagcaataacaccagacagaagctcacataataatttaaatgtttcataaaggatctaaactggcagaacatactacagtgttctttatcttttatgcattgtattgctgaattggccttaccaataactttaccaaatgatggtgcttagtgatgagtgttagacaggattgtgccccagttcttgagtggatgaggaaagattgccattttcagttgctctttataggggagatgtaaggcacaattaacttttaaaaaaataaatggggttatttttttacaagacaccttttttccaagttttaactaaagtcctctgaccaatttttctctttttgcagaatgagcatgttgattacgtagatgttggtggagcttatgtgggaccaacccaaaacagaatcttacgcttgtctaaggagctgggcatagagacttacaaagtgaatgtcagtgagcgtctcgttcaatatgtcaaggtaaggctgacttttcacccaagtgactgatagggaagcattttatttgagaaaacatttggtttgtttttagttatttttctttcaaagcaattgtaaaagtaggctcttgactttgaagt

SEQ ID NO: 137014 - DNA, 1408 bp, Homo sapiens
gacagagtctcgctctgttgcccaggctggagtgcagtggtgcaatctcggctcactgcaacctccgcctcctgggttcaagcaattctcctgcctcagcctcccgggcaatatttatgttttttaataaaatttttttccaaagcaaagatcagttttgcattagactattccttgactatacgtacattttatggaggaaaatgtagatttttccagatttcagttaaaggaggaattataacaaggaccagctgctctgaggctgcccctgagctattacttaacctcagcccctctcttctccatagctatttttgttttctatgtaaaatgtctttgcccatttctctcagagtatgtattagcattttccaaagctgtttatgttccctcagtggtcgtcttccacccctgaagcttcttaagtctctatttttactccttagaaacagaaaaggtacatgtggaagatttctaagtttcacatttcaaagttctctttcttttgggaaagaaaaagttggaagtttaaaaatgcctctagaacaaacctatctccacattccatcaactgtataggaggcaggaaagcatgttttatgagcaaaggctttgggagcaggaaatttccattctatgatgtactagctactgccgctgggctttagtttccttatttataaaatggaaatatcaatagcgcttgccttcacagggttggagtgagcattgcacgagataatgcatatgaagggctttagccagtgtcaggcatagagaaggatctcaataaatgttagtgatgatggtggtgatgatgataaaggatttggagtctcaaaaagttgtattgcagcgttacaacataacattttcagataagaaacgagatcacatattctgccaaggttatttgaatttgctatgtggaagggaaaattacttctctgtcacttaatggctgccatatattcttactcagttaggaggtgtgcttacacgtgtttgtgatgtcttgtgtccttgccctgatggtcagaagttttgttttagccctttaaaaaatccaatacagctttcagtattctgcagtgcatgcagtagactttctacaagtaaatgttttaattaaaaaaatcaaattatcatgcaaattatactggtagaaaagattttggccttatgaacatttacaaggcattgatttttaaagtaaaataaattagcaaataaggccttataaactacctatttctggtctatttcctagggactcacctctactcaccattgcttctcttagcactttggctgttacacaatgaaatgaagttaatggtttctaataatgaatgagccatcttcatattagaggtcttggtaccaagcaatagaaaccaactca

SEQ ID NO: 137015 - DNA, 1019 bp, Homo sapiens
gatactaggatatgctacctttatttatgcataatttccaaataaatagaaataaatttaaagctattatttactgtaaattaaaaccagccaacacagcaccagggagattctgcacattttattaaattggggcctgtataggtataatgtattcagttgccatcaaaggtaatgtttctgacacagtagagggtctggttactttgcaagtcttaggttggttgcttttttgttgttttagaacaccattcaaatttaagatattactctttttgattgattctgtttgcttttatgttctaggggaaaacatatccatttcggggcgcctttccaccagtatggaatcccattgcatatttggattacaataatctgtggaggacaatagataacatggggaaggaggtaaaatgtgtgttcagtttgcacatgacccattactgaaataacaatggcaactgtttaatatccttccatagtgcagggaacattgctctggacaccaatgcatatcatttcccatgtacccaaactgcaaagttggtcgtatttccacttcacaaatggaaaaatgagtgcccagagattatgtaatttactcaagacctcatagcaagggaaccagcataccaacccactctcttatacaaatgcctgtgtgccttcaactctatgctactgagcatttatatgacatatttttgccaagtatctctacttacagttgtctgtctgtctgtaatgccattttagatagtaaaggagagaaggacttgctgccccaaagcttctttacttagtcttaggctctgtaatatcaatttgggacataaaatggttattagctttcaataacaatgatgatgataattgtcatcattataataattacatataaatttgtacatagacatatataatattatcactactattattgttttggcaatggcattaggacacagaatccaaagaactctaccccactccctgtctctatatagaattctatg

SEQ ID NO: 137016 - DNA, 1042 bp, Homo sapiens
tgatatccccaaatcacccatagtattagggtggcaataggaagattggatggtgtaggcagatggtatctactaggaatgactttcagagtcagtggggacatgtgaagatagaaaatgtgtttgcagagatactgtcttctaggaatgagacacacttgctgaggggaggcagggaagggtgtatgttttgggggcaatggtgccatccagaaatgaaccagaggagtaggggatagacaggaagagtcaatggtatgtggcaggatgctaccttccagaaatgacccacaggtatgtggggagataggaaaggttggatgatgtgggaagaatggtatctttcaagaatgactcaaagttctcaggggaatggggagacagggacgggtagatgatgtacagtgatggaatcttctaggcatagaggacagggacaagcttttgtgaaggccttgaggtgagaaggatattggcatgtttgagcaactgagtggacagtgtagctggaccatagtgatgacaagagcaagtggtataaggggagtttgcaggactggtctagaggctgatagtgcaggatctatgggccacattgaatatttgtcctttctccactgaagatcgttgaaaggttttaagcagagggttttttgagtttggcacttttaaaagccctcattggctatagtgtggaggatacaagaggagatgcaagatgaccaagtaggagccaccactgctatagcctggacatattggtagcctggaccagggctgtggcaatgaagatggagaggagaagatgggtattgaaagaagcttattgatgcttagagagaacctggattagcatacttggagctaactcataatttctttttttttttttaattatactttaagtgctggggtacatgtgtacaacatgcaggtttgttacataggtatccatgtgccatgttggtttgctacacccatcaactcgtcatttacattaggcatttctcctaatgctatccctccctgagccccccatccc

SEQ ID NO: 137017 - DNA, 1471 bp, Homo sapiens
actatccctaaaagcaccctgtaactttgtctataatatggctctatctgcatccttacctgcctggacaacctcagcccagaacacaggaatcaaaggaaattagaaacttcatcctctggaataagccctgtgcctgccccttctcagggctccctccacaccctgcactctttgacatttgaagcccacagacttgctgatattccccttggtcagggcagcattggcatagtggaacatttcttcgggttctgtgatttttataaacttgtaatggcttttctttgccagaagctgtgcagggaatgatcattgaattgtcttggtcaactctgcctctgtcctaatgaagtcttctgacagttaagtgtgcagacgttagaggtgtggcctgtgactttctggaggttttctaatcagtagccagtaggattttccttccttgggctttcataatgtttcctttcttacctacctcctcctgtaggaacggaagtttgtaggtggatctggtcaagtgagcgaacggataatggacctcctcggagaccaagtgaagctgaaccatcctgtcactcacgttgaccagtcaagtgacaacatcatcatagagacgctgaaccatgaacattatgaggtaactcagtttagtcaaaaggagcatatagtaaataggccttgtgtcttttgcagtttctaaccagatataattcaagcagtagcataattaatgctgacatgtttccgcctcagtcttccaaattaccagccttggttgacctaccttgatctgttttgttgcctcacagttgcctcattttctcattttgtatgtttttactgctcaatgttgtttagaagtgataaagatgatttttcacgcctgccacaaagactgcagctcacatttgaggtaatattttgcttgtgtgtgttttagtgcaaatacgtaattaatgcgatccctccgaccttgactgccaagattcacttcagaccagagcttccagcagagagaaaccagttaattcagcggcttccaatgggagctgtcattaagtgcatgatgtattacaaggaggccttctggaagaagaagggtaggctgctattattcatgtttaaactgtattatatgaagaaatcacagtcttttaggattattgaacagaaggtattgaacagaaacaaagtattttcaaactggtagaaaaaggattagaaatcttggtctgtcaatttcctcatatccttggccacacataatgaccccaagagcacttgttggcaatgggagggaagaaggagatcacatcagtcataaggccaccattgccctgactcctggcatctgtcctgcttcttactttttatgagcagagtgaggtcaacaggcaccatggaaagagcactgcgttgaagttacacattccgggacttcgcttgcttgctagcatcagtctgtagc

SEQ ID NO: 137018 - DNA, 1030 bp, Homo sapiens
aaggcagaagggcagaaagggcctagctagttccctccagcccatttataagggcactaatctattcatgagagcagaatcttcctgatttcatcatttccgcagagaccccacctcaaaataccatcaccttggaggttaagttccaacatttaaattttggagggacacatacattcaaatcatcgcagctagcttgtgacaaaaagtctggagtagcatatagcgcatactttttcattacaccacactaagctgacattttcttttggatttcctgctttccctccttattaatagtaaaataaataccagcctgtaggtagacatttggttatgattccacacagtggctgaacttctcaaaagttcttgtaaggcaaaacccttactaaatatgtcattgacaaaaacagtggttcccagatctgactgcatcaaaatatcccaaaagatgtttggaaaatatgtttttataagacctatagattgtgattgagtaggtttgaggtggggcctgtgtatttgtatttttcaacaagcttttcaggtgattatgataagcaaccagatttagaaaccagtgaataagttcaacgagatgatttgcacagtggcctcttttattcatcacttaggttctgttatttttagagccaaattaatcaatcagtgcattgttttaacatccttgccttacatatcttttccaaaaatttttaattttaaagggaagaagggaaagggaaagataatttcctatgtttgtgtgaacacatccttggctcttctaataatatgaaatacagtaaataatgacttgtaactattataattgtttttaacattcatgaatgaaaactaactacaatgtgggttgattggatttcaggtttcactctgctttaataaaaattttattacacatccagaaagtaagttaagcaggcctggcgcattggctcacacctgtaatcccaacactttgggaggctgaggcaggcagactgcttgagtgcagaggttgaag

SEQ ID NO: 137019 - DNA, 1077 bp, Homo sapiens
agtcatctcttcatagactaggcaaagagtaggctgaggatgggttttgactgaacaaatatttattgagtacctactatgggcagattactcagaagggtaatagccttaccctgctattaattagctgagcaaaatcaaacagatctctgcagctccctgagcctcggtttcctcatctctgaaatgaggggcttgaatcaggctgagagagacagacagacagacagtagtcttgagacttcttcccattcttcttttcctttatgactttttatgtataatgtgagcagctctttgaaggaagccaaacttcctctgactatcctgaaatttaactatccacctaaatatccatctaatgttgcatgacatcatctcaggagtggcatttgtctctcccttaaaccttccatggaaaatggtaacaataagcaaagtttataatctgcctcctcctcctgattttatacatatgaggtgaatgttctggaagttataaaaatggtttaagtgtgaggatttagataaatttataaggttacactttgtcccatgttattcagagaaattgggggcatgtctttaaaatattttctaatgtaattggcaacataaaattgtatatttctaaatctctatttctttattaccagtaagcttgagctccccccgccctgcataattttgtctcttcagcttttaatacttgtcttacagatttgactcaaaccttttgccacatttttaagcaaatatttttccagttgcttgttatcccttaacaaatattttagagcattttcaaatgtttaaactatattaaaactataaaaggtaaataggaaaagtatataactggatcagtgtgaacctatgcaaacaaatccagaaataaaaccattaatttctaaaacaggtgattttagtaaattagacttttaaaaaaattcaccatgagtagttgtgagtttaaaatgtatttcgtttcaaaaagagtttatataagtacaaccactaactttttcagacatgaaaataccatgttctgggctagtcatttagataatgaattat

SEQ ID NO: 137020 - DNA, 1028 bp, Homo sapiens
tgaatctagagtctcttcccaggtcaaagtcatactaatttgtttttccatgtgtgaactcaattcacaactcatttaggaatatcagtgctttcaatccaccactgaaagcaattaggagaatgaaattacgtctttttgaaaaaaaaaatagaatggctgagcgctctttcaggggcttgtctctaaactgttcaaataataaactttctgaatgtgccagggaaattagagaaggttctctcatgtcccctaggaaatagttttcatcttaattgccgctttttcgtggaattcccatcatacatgtttccagcttagaaaagtggctgggaaaaaagcctttcttagacatttgtttgtcttctgcctcctccctcccaccctttccttagcaataatgcctgatagatggggaagtaaagtctgttattagggactccagagatttgagcagacctttccacaagctgaattgttgatggggtttcctatagacttagctctaaagacttcagaatctgcatggatggatggatacccctctctcccagatactggaatacttcatgtcttccctaatcaagaaaatgggaagagcaaagtatacatgttttgccacatggtacttcacaaaaggccattgcttggtactatcatgtttccccttaagtgagttagaaaaacaggattttctttattttcttaatgtaaactttttgttaaagcaacgatattattgactcgcagcatttcagctttgttttctcttttgtattttcttccccactgaactgcagccagtgcattatgaagagaagaactggtgtgaggagcagtactctgggggctgctacacggcctacttccctcctgggatcatgactcaatatggaaggtattacgcaagcactacgccaattaatccaagacctgtgccaaatttaaaaggaaaagcagagttcaatgcaaattctagaaatagttgtcaaaatccccatttcttatgtcctagataatacttgtat

SEQ ID NO: 137021 - DNA, 1144 bp, Homo sapiens
gttgtcttcaagtccttgataaagaagtgcaaggtttggttttgcatcacttaaatgatgtattttccatcacttacaagttctttttggatgtctgattttctgagaaataagcacaaagatcagcaaccactttgtaaaactacctggagtgagtaggagaggcctgggttggaatggcaaaaaagaaaaacaaagacagaaaaaagtcttcttagaccagaaatctcccttaagaaattacccttccccagcccagcataccgtggcagtgtttatctcctgctatgtgaatgtcacgattgacgagagcagtgtcagactttattggaaaaaccacatatttgcagtgagatagaaatcaccgctcttctattaacatttattctgtgctatgatataatttcagcaaacaggacatcaacattgagtgtattaattttttcaaactatactccttgctttacactgaggtggtggtaaatgtgcaaggcatgccccttagcctaaggaagctgactgagacattagaggaagaggatgaaaacaaaggaaggtactaggtaatagtaacagttctctttcctctatcagagcccagggcttggctctcttccttgatcaaggccattcttttcagagtttgaaggcaaaagcaggtctcaaagtgacagtagatgtgaactggttgtctcagcctggagccaagtttctgaaaagcagctttggaagcctcatgtgaaaaagctggcttgaggaaacttgccattcattcaaggtgggctgtgggcccttcaagtaagacctccccttaatgcacgtgtgatccatcaaaggctactatttatttacactccaaacagtaacacctcaatgggaaccaggttttcctattaatgggcctcatatattttccacaaaccaccgaggtctatgggtgaaatagagtggaggaaagaggtgtgggtgtgtgctgggggatggggaggtagggacagggaaagagacgaagattggcgggggtggggtgcttaaaggtccacagagtagtgcagtaatgagaatcttgatggattgatatagggcacccctgcaccttgtgtcatttactttttacatgcccctagataagtactgtggcttg

SEQ ID NO: 137022 - DNA, 1025 bp, Homo sapiens
ggttggcagaggataatagcaggaaatctaggaaacacacacttttaggctcagacaggagagccctacacataaggagcagaggataaggaattgctaatggctactgggcatggagccttggtcctgtaccctgaggcagacccatctctgtgagaggatgggatctgagatctagtccgaggcctgtggtctgcactgggcaccttaactaccctgttttcatcacagatccctttggggcagggatatggctggcacccaggtgctgctgatgtcttgctccctggttgaatatgactttttgcacgcctgctgaatactgggcccttgaatccacctggattagcctctgcagaaccttgattgaataatctgccagcaacactgggaccctgctgctcttccctgcccgcctatctgggtcaccctactaagctgtgcatatggcgtttttggcactgccagcctggatgggttggggtggagaaagagcctcactggacccgggtgactctcctctccttggcttctcaaagaaggaaatcctggagctgagtggctaaagacaaaatgtagaaattctccaggctgacaacagggtaggacacctaaggcagaggaagtagcacttcccgcaggtacaagccccagggaaaggttcttgggccatagtctgctgggtggaccaaaggcctatagaaattatcagagccttccccgctttcatatctttattctagatttttcacccatccactttttcatagagccctttcaaatagggaacccaaccttctgaggtcaagctatgaaaagcgtcattttagcatgcctgctgacccctgggaagcactggacatatttggagtcctcttcttaccatcagcaggatcttgaaaaaggaggcagtcacccactgaaagcactccagaggaaatcaaggagaaacatgaggaagagctgacattaaggaggccggcagaaagaagagttcagagggtgatggggaaggaagaatcatt

SEQ ID NO: 137023 - DNA, 1031 bp, Homo sapiens
ttgttagaggcactgaactaacacccacgaactccacgtaagcaattcctttggaatgtcttgaatttctatcggaaatcatcctcacgcctcgagcctttcctactgtagagaaaaactcttccaaatcctttggtcgaattcctgccgccagctgcatacagaagactgtccttgcatctctttcctcaggagttagattatcaataggttccctcacagggctcttgtcttttctgagtggacttttgcttcgggaacgtcctatgcttaatttgatactataaggcaatccagtctttcctcagatggcactgttaaattttggtccgcagtaaggacttctgtagcggcctctaaatcttcaatctcgacttcttgagcggctccgtcgcctctctgcttcgacttcgcttcctttcacggcttttgctctttttcctttctcgatctgtactttgcttccgttccttacttttgcttctctttcgttcacgactacgacttctgctcttgctttttttcctttttttgctacgttcttcatggccgttggccctgctcaacttgttctcatcctacttgtaaggagcctcaagcattgcttcaatattaatatcgtctgccattttctctaaacgcctctgtcggctttcgggcgcctgtggtgctcgtgtttgggaagagactgcggctgctgccaccgccgctgctgttgctactgttacgcccctacgcccaggccgcgggaccgcccagcccgaatgtagggctgcgatgacagctaggcccaagcgaatctcaaaacaacaatggaattagagaagcccacgcggggccgggcgcggtggctggtggctcaagcctgtaatcccagcactttgggaggccagggcgggcgaatcacgaggtcaggagttcgagaccagcctggccaatatggtgaaaccccgtctctactaaaaaatgaaaaaattagccgggggtggtggtaggcgcctgttatcccagctactcgggaggttgaggca

SEQ ID NO: 137024 - DNA, 1050 bp, Homo sapiens
agcaatgcttgaggctccttacaagtaggatgagaacaagttgagcagggccaacggccatgaagaacgtagcaaaaaaaggaaaaaaagcaagagcagaagtcgtagtcgtgaacgaaagagaagcaaaagtaaggaacggaagcaaagtacagatcgagaaaggaaaaagagcaaaagccgtgaaaggaagcgaagtcgaagcagagaggcgacggagccgctcaagaagtcgagattgaagatttagaggccgctacagaagtccttactgcggaccaaaatttaacagtgccatctgaggaaagactggattgccttatagtatcaaattaagcataggacgttcccgaagcaaaagtccactcagaaaagacaagagccctgtgagggaacctattgataatctaactcctgaggaaagagatgcaaggacagtcttctgtatgcagctggcggcaggaattcgaccaaaggatttggaagagtttttctctacagtaggaaaggctcgaggcgtgaggatgatttccgatagaaattcaagacattccaaaggaattgcttacgtggagttcgtgggtgttagttcagtgcctctaacaataggattaactggccaacgagttttaggagtgccaatcatagtacaggcatcacaggcagaaaaaaacagagctgcagccatggcaaacaatgtacaaaagggaagtgctggacctaagaggctttaggtggactcattacacttttaacataactgaagatacgcttcgtgggttctttgagcctttcggaaggattgaaagtatccagctgacgatagacagtgaaactggtcgatccaagggatatggatttattacattttctgattcagaatgtgccaaaaagtctttggaacaatttaatggatttgaactagcagggaggccaatgaaagttggtcatgttattgaacgtgctgatgcttcgagtactagttcatttttggacagtgatgaactggaaaggactagaattgatttgggaacaactggtcgtcttcag

SEQ ID NO: 137025 - DNA, 1188 bp, Homo sapiens
aaatgatggcatgaaaaatcaccctatgtcagtggcccaggaagctacgggcagaattttggagcagggaggaaaactgagagactcattcctcctgaatatactcctgactagtagcacttctttctttccacatctgacttttacatgtttactacctggaaaatcatgtctcagagtctctcatctgctttttacactccttaaaattttcttcatatcaaactgacatatgttgatagtcaaaaattatcaaatcattctaaaaagcttatttcaacaacagcagtctctggccacattcttctccaccccccagacccattcacaagaagaagccactttcagcacttctagctgcttctgctatttaaaatagcatgtacatattgagtgcactgcacatgatatcataattgatcatttgcagatactgtctgctaacttcctgttatagtgactgaaaatttagcttaatattgatttacattgctatttattcttttggaatgctcttaggatcttctctttattcctagtattctggaagttcatgatgagagagagagagagagtgtgtatgtgtgtgtgtgtgtgtgtgtgtatgtgtagctatatatagattcattgtgcttaacaccctataggcttttctagtttggagtcactgtcctttggttctgagaaactttctattaattatttaataatttcttctctattatgagaactcctattgctaagattttaaggccaggtgtggtggctcacacctgtaatcccagcactttgggaggccgaggcaggagacttgagctcaggagttctcggccagcctggcaacatagtgagaccctgtctctacaaaaaataaaaataaaaaattagccaggcatggtggtacgcacctgtagtcgcagttacccagtaggctgaagctggaggatcacttgagcctgggagatcgaggctacagtaagctataattgcaccactgcactccagcctgggcaacagagcaagaccctgtatgaaaaataaataaataaataataaatagaaagattttagagctctcgaatttggatattttctctcccagattttgttttttattaggatgcatttactaagggatttccttaagtttatattccagcccttctactgcatcttttactatcatat

SEQ ID NO: 137026 - DNA, 1029 bp, Homo sapiens
gctgaggtttagagagatgaggtattttgcccaaagtcacatagtgtagaagaagaagagctctgatttgaatcctgaacttttcaaatgcacatcctctgcttctaatcattttgagttactgtctacaaatagccagtagattaggatgtcttgacagttctacctcctccttactgcttgcttctactctctcctctccatttccactatcatcattcttgttctgacccacattgcttcttaaatactgcggtgccaccacattggtctttcatccaccagtgtctaaatgtttaaatccatctttacatatagcagctaagtaccttctaagagcaaaaatgtatgtcatcttattgcacttttactcacaaaccttctgtggtgtctctttgctctctaaggaaggaccagctctttaactttgaattaagctccttctccatagtggggcttagggttcgcagctggagcattgttctcaaatagggtctgaagtagggagtccttgtttgagacaaaaggagaaaccaaaggaacagataaagccaaattctatgtcagggaactagggtccaaggtatcaggagggaaacccagaagagggcaaatctagttggatgtgtatgtgcattgaatcaacctggaataattttctagattatcagttctatttgttttgttttgattttgtttttgtttaactctatttgcttttatttgctagcagccgtgtgagggatcctgccgtgaaggaactgagatgaagtaggcaggccttggactcagagttcttcacagatatcatcccccactcccaaaactccccttcctgttcccagtagtccagccacatgggccgtttagcatattacacatatacctcctgccttccccctcccccccccttttttttttggccttttcccttgctatttcatcagtaggcaatagctcccaatggttttcacttgctgaaagcttgctcttccttcaagacccatttcaagtggcaccatatccatg

SEQ ID NO: 137027 - DNA, 1056 bp, Homo sapiens
cctgagctcttgataatgtctgtgcctgttattaacactttgtacagcttctcagatgtattataccatcttcttgccctctttttttttttttttttttttgagatagagtcttgcttcgttgtcgcccaggctggagtgcagtgacacaatctcagcttactgcaacctccgcctcccgggttcaagcaattctcctgcctcagcctccgaagtatctgggactacaggtgtgcaccatcatgcccggctaatttttttttatttttagtagagatggggtttcaccatgttggccaggctagtctcaaactcctgacctcaagtgatccacctgcctcagcatcccaaagtgctgggattacaggtgcgatccactgcacctggctcttcttgccctctttgaatctttgaggatatgattctttctcccattcctctcagcctccttcccttactcagctcccacttctctggttggcagattgcctttcatcttcaagatctgctctgctaccacctctgctgtgaagctttcctggatttctcgctatatgtatacacatgtcagactggatgaggggtactttctcggagcttttggacatatctttattgtagcactttttctgcttccttgacttggctttccctctagtctgtgattaattctaggatgtagatattgagggttgggggtcaaatctggtccattcctctattattctccatcatttgacataaagttaatatttaatcagtgtttattgaatgaatgaatgaatggattcatggacaagggatgtgtgcagacagaacacaatagaagaaatatttcttaacaaataaggggaagagatgttgaagtttattagtaatcaaattattattgattaaaatgagacatcatttttacttgttgaattaggaaacactttttatggccaggcgtggtggttcatgcctataatcccagctttggggaggctgaggcaggcagatggcttgagcccaggagtttgaaaccagcctgggcaaaacaaaaagccaaccccg

SEQ ID NO: 137028 - DNA, 1032 bp, Homo sapiens
gttggtggaccaaggctgggaaacattaatataatctaccctattgctgtcctttacttcacggaagcaaattgtaaatttagtgcttagaacatggtaatgatctcatcctgatttatctaggacaattatctctccttttatatggttttgccctatttttatttggactactctgtgtacattgctattggtgttttttattgtaagcaatctagcatcttttaaggaagccactagtctatgaatctatatgaacaaaagcaaaaacaaagacaaataaaatcccaaagcactcaaacataggttcttatcatgaactaaatagattcttggacagtattcatagcctgtcttcaaaatggaaatttccatatatgtttttgaaaacagcattttgaactttcctaaaagcattaaatataaataatgtgatgttgtagaaagaatgctagcctgggaatcaaaaagatggagatctttgatttgattctgtcactgtctggtggtggtgtttgtattggtgagggcttagttttaaaaaggaatatcctctctggctagttaagcaaaaaaaaaaggaatttattaaaaggagcctgggtggttcacagtgtctttggaagggctggagaaacaagctcaaggctgaactataggaacagtgcccaaaacagggctgtagaacttgtctgatgagaaaatgacctctgttaccaccacccatgactcattgctgcacttgcattgctgccaagaacttgattttaccacagccataactaccactatttctggcaatcgtcctttaccacccctgaaggctgggctcctttgacaccaaacgtggcccaccctgagctgcttttcttctgttaatcccttctgaggcacagtcttaagtaagcttccctgattggtagagagcctgggtcacctgcatatttctaactgcaaggaagtctgggaaattgagctctgacctctatgttggggtggtaggaaacttacgtgggaatttccccaaatata

SEQ ID NO: 137029 - DNA, 1516 bp, Homo sapiens
tgccagagtgaccttcctaaactctgatcggatcattcttctgctcttaaccctgcatcagtgtgtcacatgagtttgcctacctttagctccgtatttccatctcactagaagaatacttttgtagaagccaccatgtattgagcacttactgggggctaagcatcgtgctaaatgctttatacctactcttcactggtagcctcctgtcaagttgttacttgtttgcttccctgcctccacatcagctcctgccaagtgcaatagatgtttgctgaataatttaatgaacgatcctatttctcaaggaacgttcagtctaaagcttgcagcaatcaagtaaataattgatttccttgcaccagggaagggccatctggctcttacttagggaagtaaggagaagctaggcctgatcctcactagccaagtaacttgggcaactcacttcacctacctgtatctcactcatttgttcatatattggtctctgaggtcccttctaggctctgacaactggaaactctgaaaatgtaagtttataatattcttgtaaaatgttctcttttcaaatttgtacattgagatagtagagaagagcagaggcaagcaaaggcaggactgcagcataggcctatgggcttggcctctgtggccctgactctcttctgcttagatacctggcactctcagcatacacctggggcttcggggcccagacctgctgctctgggcagtggtccaagcccccagcattgccctttttctcagagatgtgcatctcctctcagaaaaactttgagggtaggagctgataaactacctctgtataaggtgccatggtcaataatggattaatgtgtgggcctctcggagatatttgcctcagaatagacctgatggaatgcagggacaggcagccatcaggaaacagaagtagggaatggtttttgttttttttttttttaatttttttatttgggtagggaacatttctcttttgccttgtgggaattcaccacttctgcttctgtttcattgatcctctttagaatctttttggcatggtctatcagattcgcctgtgagagctgctgatcgttatccaagagagtgcagataacctttcttagagccttaggatagatacctggtggcagtggtgggcagatttcagcagggagcagggcagggactaagcttggcagggctagtatttcatgcagttgggaacataggcagggtggggcttcccagtgagggccctggactctgaaccacaggcagcagcagcagcagcagcagcactgagagcccaatgccaaggaagatgtggtcagtccatctctctggccacctccctgagccttgatctacccatcagagatgacacctggccccatgtagcctgtgtgtattttggttagctgagtgcttgtctcttctctccacctggggaagctctcagagggcagggcccatgcctggttcactcttgtgtctttcccagatgcct

SEQ ID NO: 137030 - DNA, 1018 bp, Homo sapiens
ggcaatgctgttcggtaaaaataacatattgataaaatcttgattttaaatgtggactagttcggtgtacaaacatgtttatttgggagtcattgcctaatatggaaaaatctatctggaaaattttattttaaaagtttacctataagtgataatatttatgtgccatttatatacatacagtgccaattttgtctcatttatatataaaatggctggggttaagttgctaagattgatgtctctgtgtacatcacatcattcatatcagtttggatcctctgagaagcagacgccaagacagaatgagaagtgtgagagatgttgtggtggaaatttctgagaaggataaagggggagggggcaggagtgggcaggggggaccttcagaccgggaggcaggttgaacccctatggaaggagagcgaaaggaaggaggaggggtgggtagggagagcctcagctgacaacacagctctgagaaagtctcaaccaggctgatggggagccccagagcacagactgcccatcagagaggtcccctgtcaggcaggaatcacctggttctagtccccctgctgtgctgtgtcattgggtgggaacagcttggggagagtgtggccccagcagcgacattgcctgtgaactctgtgtgaatccggaaggtatggcagctggagtctgtcagccaacaatgctcttctccacagggtctctcttgataggaggcctgagaagcgccctccatggctgccatgccatctctccatttgtagtcttagggattcaggttatcataaaaccttgaaccagtagctattcgaaaacactgaatctagatgagaaactcagtaattgggagtttagatttctggagaccagcaggcctggcttgggaacctgactccacattaatagctgagggaccttagatattgtatttttcctgaacttcagtttcttcatctttggaatgggaggaacaacagtgcctgtttgatagaattgctatgaagat

SEQ ID NO: 137031 - DNA, 1064 bp, Homo sapiens
taagaaacatttacaatctattctgtctgaagcctgcttcctggaggctgcatctgcatgataaaacgttggtctccacaagcccttatcataacccagacattcctttatattgataataactccttcaaccaattgccaatcagaaaatctttgaatctgcctgtgacttggaagcctctccccggctttgtgttggcccgcctttccagatcaaaccaatgtacatcttacatatattgattgatgtattatgtctcactaaaaatgtatgaaagcaagctgtaccccgaccaccttgggcacatgtcgtcaggacctcctcaggctgtcacaggcacatccttaaccttggcaaaataaactttctaaattgattgagacctgtctcagatactttggggttcacaatgccaatgctgatttcctgcatttttgttcttgttttaccatgttgcagaaggtaaaatcctggttttgataaggtatatcaaactgttatataagatgttatcatcggggaaagctgtgaaaagggtattcaggaactctctgtactatttttgtgactttttgtgagtccaaaattactttaaaaaaaatttttttaagaatacagctagattatatggtctatggcatttgtgctatcacccaccatcagcgttacaaaaagtgagtttaccatagggcagagtcctgcaaatacaaaataaaggaaggtaaataattttttttttaatatttcaaataaacttgcagctggtttgaactcgggggggaagaatacataaataaccatgacttttatagattaaaagttcagaacaaaatataaatcagcctaaaatttaagtcaacaagtcaaatagtgactatcagtttcttcctaatttgtgaactaaaatcttataaatgacaaggattttatgttcaaaataactataattagtgtgcacagaggatgaggcagcaagagggtagtcatctgtaagacaagaagagaggcctcaggagaaaccaaccctgccagcaccttgaccttggacttccagcctccagaa

SEQ ID NO: 137032 - DNA, 1047 bp, Homo sapiens
cagacgaaagtcatataaaaacattcagtcatttgtatatttctaaatattccaacgttttataaaagcagctaactatagatcttatacagccaccatagcgtagcataaactgctaaatgccaaatttcaattaataatgaagtagtgggtgcctgatgtaattagagagtcctaggccattagatccagggtctgggctcagttctaggataaacaagctgaatttgactttagtcaagttttagacgtaaattgccagaggtaaaagggccttacagatcagctagccaagtcctgcattatagttaaggaaactgaggctcagagaggtaaagtgactaagccacaatcacacatatagttaatggcgggaccagaaccagaatcagtgcctccaacacccagtctcagactctggttcctgctccatttctccttgagaatgattcttcatttatatgatgaggacaaccgtctatatttgcttcctactcatggaggtactgggatgatgactggaaataactggcgtgagtgatgcattttgtgacttggacagtgttcgtgttctgtgttcagacagttatgattatggaatagtcttgtttttgtcttggccccatcatagtctgcttttatttaaatgaattcaatgaaataacgaagtctttgaagggtgggtgcagtattaagcaaaattcttttgcctgtttttagaaattctcccaatgctacgggttttaagcaagtagtacacacactgtgtttctcggtggaaacagtattggcatttgaggtagaacaatttttccccaatgtagggttgccttccccacactgcaggatataaaatatacacttggcccctggatactcaatggtagcagcacctcctggtcagggctggccctagggtgaggcgatttaaaacatcaaaattaatgcaagccaggcgtggtggctcatgcctgtaatcccagcactttgggaggctgaggggggtggattacctgaggtcaggagttcgagaccagcctggtcaac

SEQ ID NO: 137033 - DNA, 1004 bp, Homo sapiens
gataatttcactgtactcctgcctaggcaacagagcaagaccctgcctcttaaataaataaatagataaaactgaccatgaaccaaaaattgctgtattccgatgatgggaatctaggggattattatgctcttctctctgtctttgaaaatatttgaaatctttaaatgataaatataacataatataatataatataatataatataatataatataatataaacacatagaggcagccaatacttacttatatctaattgactattaccacatggaaacacagtaaggtcagattttctaatgttttaagagaattctgaaatccagattctaatgtaaaatctttggtgtttactgatccatttgtttaatcatagggcacaaaaaaattacatctggagcttgaattcagcacacagctcccattttgcaatgtccaatttagaataattgatggaattaaatggattctgaggtcatccatcataaaagtaatttatcttgagcatatgtctaacattgcatattttatttttaaaattatgatctgtttccaaaaagtgcaaagaataataaaacaatcactcatgtaccagctatgaagccttaacaaatcttaatattttaccatatttacttcaaaaagaaataaaatattatgaataccattaatgccctctttgtgcctctccttgattcctttccctctgcctctctaaataacactctcctgaagtttgtgtccatctttcccaaccaaatttatagaatttcacggaagttgtcatgtatccaaaaagcaataaatgtgttgttttcctttttctagacgttaaatagaggcttcattccatcaaaaaaatcaattgcatttatatctaccaacaacaaacagctagaaaactaatttttaaaaagactattaagaataatattaaaaagtgacatggatctaggaaaaaatctagcaaaagatgggcaagacatttagggagaaaatc

SEQ ID NO: 137034 - DNA, 1139 bp, Homo sapiens
gcctaaaaacaaaaaaaaatagatgccacagtttctactttgcttcactgttttaaatttaaaaacaaacacaaactccaattgctaacataaaatgatagaattgaaccatctcatgttctgtttcttttggtttacaatcactatgatattatttcttatttctaatttactctttattcttaggaatatgcagtaccacagtaattagagacaaaagtggtgcctaaaccagctctcacaattgtgaaccattataaaattaatatccgaacaaatacatgtgtctcaatcctcatgttttaggggctgactatatgcctgggaattctggaagctgactaccatttagactgcagtgtttattaaaggataagtaataaaattgtgctaaattgaagctcttaatatattattactaggcaaccaaaaccacagcttttgtttagaccttaaacctgctctgtccaatacaatagccattagctgcatgtagctactgagcacttacaatgtagctagttcaaatttaaatatgctgtgagtggaaaatacacatcagatttcaaactctaagcattaaaaattaggtaaaatattctattaaaaatttttatattgactgcatattaaaatgacaatgtcttggatatgttgggttaaattaagtatattattaaaattaatttcacttattcttttttcaatgtggctattgggaaatgtttgttattaaattttttattgatacatagtagatgtacatattttgagggtacacgtgacaatttaataattcatataattcacataatttgtaaagatcaaattcatgtaattgagatatccattaccttaaatatttgtcttttcttcctgctaaatactttctaattatcctcttttagctattttgaaatatacaatagattattgtacactatagtcactctactgatctatcaaatactagatcttatttcttccatcaaactgcatatttgtacacacacattaatcaatctctctttgcctctctctcctcaaccctttctggcttctggtaaacatcaatctactctctatcttcatgaaatccatttttaaagctcacaaatatgagagaacatgcaaatttt

SEQ ID NO: 137035 - DNA, 1156 bp, Homo sapiens
tgaatagtcatattggacatctttttgttgttggcttttcaagcttcctttttatgagttaccaattcatattctgctggcttctttttccctcattgatttgtaggagcttcttaaaaatactctttttaagttttatgtgttgtaaatagcatctcctagtccacagatttatttttcactttattttttggtgcattttatagtccagaagtatgtaactttagtacagttgaatttattgaccttttcctttagagtttgtgccttttatattttaagaaatcctgaccgagcaggaacccacatccaggaacagagccctttgctcctccctcagaatgaatggagaccagaaatcagatgtttatgcccaagaaaagcaggatttcgttcagcacttcccccagatcattagggtgctgagtgaggatgagatggggcactcagagacaggagatgctgttgaccggctcaaggaggtcctggagtacaatgccattggaggcaagtatcaccaggatttgatggtgctagtagcattctgggagctggtggagccgaggaaacaggatgctgatagtctccagcaggccctgaccgtgggctggtgtgtggaactgctgcaagctttcttcctggtggcagatgacatcatggattcatccgtctcccgccggggacagatctggtggtatcagaagccgggcatgggtttggatgccatcaatgatgctatgcttctggaagtatgtatctaccacctgctgaagctctattgcccagagcagccctattttttcttttttttctttctttcttttttttttttttttttttgagacagagtttcactcttgttgcccaggctgtagtgcaatggtggaatcttggctcaccacaacctctgcctcccaggttcaagtgattctcctgcctcagcctcccgagtagctgggattacaggcatatgccaccacactcggctaattttgtatttttagtagaggcggggtttctccatgttggtcaggctggtcttgaactcccaacctcaggtgatccacccacctcagccttccaaagtgctaggattacaggtgtgagccaccgcacccagcctggagcagccctattacctggacctaatcgagct

SEQ ID NO: 137036 - DNA, 1363 bp, Homo sapiens
tttagaaatgatataattattaaagatattaaacagactctgctgatgtaatatgataccaatttttatgttgttttttttcctggagttattactttgttataagtgtaataattgtacatttcttttttgttttttttttttttttgagacagagtcttgctctgtcacccaggcttggagtgcagtggcatgatcttggctcactgcatcctccgcctcccaggttcaagcgattcttgtgcctcagcctcctgagtagctgggagtacaggcacgtaccaccacacttggctaatttttgtatttttagtagagacgaggtttcgccatgttggccaggctggtctcgaacccttgacctcaggtgatccgcccgccttggccacccaaagtgctgggattacaggcatgaaccaccatgcccagccataactgtacatttcaaaaaaggctcttctgaggaaatactataacatgtctaaagctcttttttcttttttgatgtctgtagtttaaaaaatatcttcttatatgtaagcttctaattttcttgtttgtttgtttatcctggcagtctgggcagaattaattattttggggttacatatagttagatcactgattcgtttaattaaccttgaatgcatctgcttttcatttctaaaaatcattattttggtcccttcattaccaagaggccaaagtcactttaaaatacttagtagcatagtatgaatttactgtctgaagaacagtgattttataaaaaatataattgtgaaattgcagcttaaagagaattgtctcctcgatgtaatctagtgttagatgtcaataccaagatttcaggcttttgatagcattatgttggttaaacactaggccagttcacttatttctcagggctggtatcatacttcctcagaggctcctttgcccaaaaaagctttctgtattgttagttttgcccatagagttctaggttggaattgggaaaagcagcagaacaacatgtattagagtcttcatattagaaagtctttgcagatattcagaccatctcctttttataagaagtccctatagtatattttgtgtattgtaaacatatgacatttcatgctttcaagtttggttacaggctgcatgctttcgttatcgtgagactccttaacatttaatgtggcctctatctttggtttcttactctcgttagtgcctcagatacaatgctaaataaaactgggactttcttaataggaagtgattttgcttataaatacttgttttttctttttttttttttttttgagtcagagtctcgctctgtcgcccaggctggagtgcagtggcgccatct

SEQ ID NO: 137037 - DNA, 1049 bp, Homo sapiens
aacaaaacaaaacaaaaatccataatcttatatctgaggcagatagatttgaagttttagttttgttcatattcttgtaagtataagatctaaaaatgctttgccattagaggatgtttatcagggcatcatctggcattcatgtctgtttggcatgtattttttcaaaaatatcattccttgaagatcaaatatagtaaatccaaaaattgaaaatctctacgaatgaatgtgagcagcacttttaaagatacagagaactgtcacttgtactagattttaaaaatgattgatgttcatagccaccagaatctgaattcagcacctaagccatcgatcatgtaataactagtgtagttgtagtacaaggggactagatttgtatgtatgaagcacagattttgagttgttcactaaacagccttttaaaaatatatatgttttctttcttttggtgacattattacgaataattgcttattacttgtggtaagaggtaaaaaaaatgattaatacctaaatttagttctttggatgaatatgccagcattagtacagatgataattttacttaagctgattttgacttggttttatatggaatcaagagcatattttattccatagctattttgaagactcagttgtcatttctgttagtgtaaaagggtactggactgaagcagagtttcctaaaatgttcacagaatggagagaagtgtatattttaatccactctgcatgtcagtttttcagaagtccatttcagttcactcaatatgcaccattcaaatccacattttgtcattgccacctcccacttttccgcatttagtacacgtagtctttgaagtttttaaggcagagcaacataggacctatctgcatcaaaccagtttttcccacaaatacgactaaccttgaaaactcagtagaaggaaagtgaaaggggaaataaagtaacaaatggcttttaggctaattgcctaatattctttaggcccactttcatatttttatgacctttcttatatttaaaggtaaatatt

SEQ ID NO: 137038 - DNA, 1057 bp, Homo sapiens
cctgccttaccttcacctccggcccttcatctcccatcttcaaatgtattattttctttttttaaacgtctggactcaagtgatttcgctgagctccagactagttctctcaggaggacccctccccacccccattcctcccactgatgaaaatggaccctgctctgaccttgaccctactaaggtttggaggtgggggtgacccctcactactgtgtcattctgagttggccctggcttcgtgaccccaggctggtccccgggcctttgggaaagcagatgggggtcattgttgcagggtcctttactcttgaggccctggtctcaagaattgagttaaataaagtcagtagtttctatgtgggcatttttagctgtaggccagaactaatgagttgtaacagatttttaaaaagatgtatagaacatttctgacttttgattgactctacatttattttttgcattttgctattttgaagactatgaaagtgatgacgactcttatgaagtgttggatttaactgagtatgcaagaagacaccagtggtggaatcgagtgtttggccacagttcgggacctatggtagaaaaatactcagtagctacccagattgtaatgggtggcgttactggctggtgagaacaacgtctttttcattaaatttcatttgggggcctgacactgctgtcctttcatacatgggcaagaatcaccgtgcacaggcagtaggtctacactgttaattccagaagaggcttttctctgagttaaaattgatgtaatctacattcccaggctccctgttgagttttggcgatcccctcccccatgcccaccactgttcctcttctccctcctcatccttcttttgattctttatataatttccccattctcatgttcagcaaatgtcgtggatctgattcagtgatagtagataggaagaaatatatgagttaattatatgtaaatttttacatttcattcagtgctaactgctgaaaaaacctaagaaactcccacggtagaactggcctctagtattgtcagccc

SEQ ID NO: 137039 - DNA, 2376 bp, Homo sapiens
gcggcgggaaaagcgagcggcgagagcgaggaggcgtcccccagcctgacagccgaggagagggaggcgctcggcggactggacaggtacgggccgccgtcactcgcccggtcggctccggacgggcagtagccgctctcccgggaggaccgagcgcggcttgtctctggcggcggcggggcgggcacctcggtttggcgctcttcgcgccgcctccgctggggcctcgggctcgggcagggacgggtcggtggcgttccctgagcgttaacgagtaaactgtgtctgtctccacagccgcctctttgggttcgtgagatttcatgaagatggcgccaggacgaaggccctactgggcaaggtaaggcagctgcgagtcggagcgcggacaccgtctccctggccggcgccgcgctcgccccgggccccgcggccgggtctgtgctcattgtggccacggacgatggtcgaggggcttccggaaactatttcctgcctctgctctccccccacccccgggtaccctgcttgctcccttgcgaaatcgctcttttcctcttgtagctggaggaacagagacgggatcgctttggggccgggctcaactgggtcgacacaactgcctgctattttacagctttttgagggtaggccgatgatcttcgaggtgcctgtttagggtcaagggatcgtgagtgtgttcagattttcccaaatttcggacttaacttgcctctacgggtttaaaaaaattcttttccttcaagcaggctgttcgtgatgcctactgctaaccaaatgttttaggctttcttgtgtccccgctcccagaagggggaagtttcacggagtttaggtcggtgaagagtttgcattgggctgttgacatgtatctcgattgcagtgtgtgttacctgaagttaggtgacttgtttactttttgggtctttttggcatagaaataccgtagttatttgtaaacgtgttctcttcctggagcctcatttcctgtgtgtctgacaggggaggctggggaggattcggggtgtagtctttttttatttgtgtggaaagttgttggcactgtcatttagttaagtaatggctgctcctatcggcccaagatggcgggacagggtgggaggagaaagtgaaggggggggttagggggagggtgtagaggtaaacatggaaataaatagtagccgtgaataagcctttccttcggagtgtgtagctcagtggtgtttaaaaaaaattacccaagattatttgcatatagaattcttatacctttcataagcttggaagcagcatgcataagcctggtaaatgcttatcaacctgtagcacatttagttatccatctgtaagctattgaacaaaggctggagtctcaatctgtatgcatcagtttatatttcctgaccaaaatctgattgcaatggtatttgaatactttcttcgtaattgggaccgtgaaagttggagtgtgtgctatgggtgttgtatccgttagacattttcttttctagctgaaatcatagctttgcatttgacacctagctttattgttgcagttgagacgcaagtttgaaataagtctaacattttattcttaagttgatttttttgttgttctgaatttttgtctgtagcttggtttcgcagagtcatcaattcctttttatctgtaattacacatttgtttttatttcaaagtaattataaggtgttatattgcatataatcagaaaactaaatggaaataatgcttttcagtaagcccggcccctttgaccgatacagaaaacttgaattaaactttgactacgtaggtattaattggcttcattacaattattgctgtaaaaatgaacagtgactagctctggaaagatttaagcgtcagtaattgttggtctcctgccttaaagtttttttttttttttccaatttgagtatttaaagtattttatttaaaaatatttgactgctgtcaaagttgtcattataaaagattaaacatgatttaaattaaaagagcattattttgttttggagggattattgttggtctaacatgggttaataaaattgcttgcaaagataattcacgtggaaaagtttggccaaatcgattgcttttggttatggtgatgaaaaaataaatggaatctgatgttttatgttgagaatgtgtaaaatgctagttgattttatgtcttagaatgctcatattcatatagattcactgcgaatagtgcttaacattggatttcggattgtaatattaaaccctgcagttatgcactaacgagtttaaattttaaaaaagtaaccattttcaaatattcttggcaagttgtgcattac

SEQ ID NO: 137040 - DNA, 2398 bp, Homo sapiens
aattcttattcctatgtatattattggattttctttcaagtttttaaaattcacatttgtatgttaaaaaaaactcttgacctaaaagctttagaaagttgaaagcattaaatatgtctcttacttgtcccttaacatatgtacgtatacatatatacacacgtgtacatatacatatatacacacgtatacatatacgtatacacacatatacatatacgcatatacacacgtatacgtatatacgcacgtatatgaatacgtatatacacgtatacgcatacgtatatacacacgtatacgtgtatacatatatacatgtatatacatacgtatgtatatgcgtatacacatatatgtatatatatgcatatgcgtatgtatacgtatgtacatatctatatgtgtattccttttccaggtgtgcagtttattcaaaccactgatttctcatcgtctcccgaatgtttttgtcagattcagttatattagagtcattgaaagaattttttgtttgtaggatggccatttgatatacaatgcctggggttttggattaaaaaaataaggtagttaatacaatgtattattttttggtaatgtctttaaggttgtaaacagctagagcctgcgtaattagagttcttgtgatatagggtgatcttgaacagtgctcttgaatgctgacccttaatcttctggtaatgtaataattcaagattcttatttttaaaatttcagtggagttatcgaaaactaagcaaaatattttaacagaaattaacttgtgacttttttagtacatttttgaaaaccttttgggtttttttttttttaagtagggtaaggatttgagttaaagtagaatatatacgaatatataccataaatgtagtaagtttaaatatagtagtactaccaagtatagttatagtaataatgctaggggactggggaatcttatctgcgtcagggaactattgctaaaatacacagttttgaacaaagtatcttatttttaagtttttcttaaatactcttattggaaatttttttggtaattctattagtagaaagattatacaaaatacttagaagttatagattgtatatcacttaaaaatgtatgtgcttttttccgtaggacatattagcattaaaacagttggtgttttaaatttttttgataatagaagtagtttaagatccattgaaacatattttcttaaatttggtttgctggcgtgtttggtaggggaaattattaggtcagttctagaggtggcttttttaaattgtaatatttggatgttgattaaaaacattctcatttatgtgtgttttttgtttgctggcacttaaaggcatacaggttgagtatcctttatccaaaatgcttggaaccagatgtgttttggatttgggatttttttgggtttcagaatatttgcagaatacataccagttgagcatccctaatctgaaaatctgaattccaaaatgctccaatgagcatttcctttgagtgtcatgttggtacccaaaaagttttagattttggattttcagattagggatgctcaacctgtaaattcatttccagtgctaaagatggctagtgttttggttagaaaagtcatgagagcctgtctcaaaaaacaaaaacaaacaaaaaaagaaagtagccatggaaataatgtcatgctttgtgttttaaagagttttctagtttggaagattgtcttctgaacacttgcagtcttaattttttacgtggacaaagtcttatatacttggtatttcctaaagttttgatttgtgcctggtaataaagatatactaagattatagaacatatttgcatatttggtcacaaattagaactgcagcaatacataaacaggcacttttaaagttctggttttctttttcagtaaatagttctttctgtcgaatcaattacaaattgaaataactagagagcatttgactgccacctctagatactttttgtttttttttttaatttgagacagtctcacactatcccccaggctggagtgcagtagagtgatctcggctcactgcaacctcggtcttccaggttcaagtgattcttatgcctcagcctcttgcgtagctgggattacaggtgcctgccaccacacccggctaatttttgtgtttttattagaggtggggtttcaccgtgttggccagactggtctcaaactcctgacctcacgtgatcagcccaccatggcctcctaaagtgctggctttgcaggtgtgagccgccgcacctggccaatatcttaagctgttaagaaaaactgcctgagagatgaatttttgtgacttaggtgaagtgataggtcatgcactttaaaccaaaatg

SEQ ID NO: 137041 - DNA, 1098 bp, Homo sapiens
aaagtattgcaaatcaaccatcacccagctttaatagtttgcaactcatgaccagtcctgtttcatctatatatattttgcccctcactcatgttattttgaagcacatctcagcaatcagtcacagcatttaatccatagatgtttgtttctgaaacataaccgtgatgcccttattacatgtaaaataatttcttaatctcaaatatctgtggaccttgttttttgctgtatggaagttaagaaataattgcttggaaaatgagtagaaaacatgtttagctgagtatgtgatgtgaattttgtttgtattttgatactgctatagtgttctgtgatagaatattacataatatgtgacacaagaggtaatttttcctgagaactttatgaatcatagttgcttgagtctggatagtttttatttttagggaaaatttgttttcaagatacagtagttaaataaatattttaggtttctgaatttcaaatatcagaatgagaactacaaaagcttttgctttgcttgattgattggtgaaacatttgttgagctgctgtgggtgagggattgtgtcaggttctggggcaaccaataagacctggcctctgtcctgcagtcagtctgttgggagaggctgacagactgagtgatcatatgatgtattaagtgtaataataaagatacatgcaaagtgctgtgagctctgaaatgatggagtaattaaaacatttaaaactttttattatgcatcatttaaagtatgtacaggtattgaaggtagtttaatgaactcctgttttcaacggttctccacattttggagcagttaagtttttttttttttttgaggcagggtctcactatgtcagctgtcacccaggctgagtgcagcgatgctatctcggctcactgcaacctctgcctcccaggctcaagcaattctcctgtctcagcctcttgagtagctgggactataagcgtgaaccaccaagcctggctacttttttgtatttttttgtagagacagggtttcattatgttgcccagactggtctctaactcctgggctcaaggtatctgcccgtgtcagcctc

SEQ ID NO: 137042 - DNA, 1375 bp, Homo sapiens
cgtggaggctcacgcctgttgtaatcccagcactttgggaggccgaggctggtggatcacctgaggtcgggagttcgagaccagcctgaccaacatggataaaccccatctctactaaaaatacaaaattaaccgggtgtggtggcgcatgcctgtaattccagctacttgggaggctgaggcaggagaatagcttgaacccgggaggtggaggttgtggtgagccgagattgcaccactgcactccagcttgggcaacaagagtgaaactctatctcaaaaaaaaaaaaaaaaaaaaaaaaaagagttagaggtataaagttaaatggtgtttgaggaattgtgaatagtcaggtatgggtagagggtagcatgtttcagtgggattgggaaaagataactgaacatgtgagaagccccatcactataggccgtaggatgttttggggcattgttaaactgaactctctaatcaggtgaagtgacatgaccagaagtaggttttatgggaatattactggccactgtgagaaggatatggtgtaagggaaaggaacttcagtaccgatgggtagatagcaatgcatgaattttaggatagaattctgttcctaccacttactagatgtgtgatccttgggcaagcaagcatctttcagagcctcagttttcttatctgtaaagtagaagtagtaatacatttcccgcagactattgcattttgtgttaggggaaaaaatgtaaagtgtgtggcattgggcttggtgcatgaaaggtgctcagtataagataatatcttggataatggtaacgtcttggaagagacgagtttaaactaaggctgtggtttaggaatggggtgagatggaggcagacttaagagctcttgaaaaaggccttttcttggctttcataacatccttgctactttgactttgtatctgacaacatctcagtctttgcaaggatgctgtgttttaggtcctctttactcaccctgttcccaatttacatacatgtttgactgcctacttgactaccttggtatcttgaaggtatctcaaactgaacatatgcaaactgaatttataattgtctttaatattccttgtcttagtaaatgtcacttaccactacccatgccagaaaccttggaatagttgttgacatctctttttctcaattcctaatcacccgacctcatcatttctattttttttttttttttgagacaaagtctcactttgttacccatgctgagtgcattggcatgatcactgctcactacagcctgacctcccaggctcaagtggatcctcccactccagctacgtgggactataggcatgtgccagcacgtgcagctaattttttt

SEQ ID NO: 137043 - DNA, 1050 bp, Homo sapiens
tctgtctcaaaaaaaaaattcctacgtcatctctcacttacttagttctttttttcagaggcagccactgataaaagtttattgggtagcttttcacttttaagcatattctgttagatatttttatcacacaaatgagatcatattgtatattgttaaaatgctttgttaattttacctcttgctatatgaaaatactggtagtttttttttttagatggagtcttgctctgttgcccagggtggagtgcagtggtgcaatcttggctcactgcagccttcatctcccgggttcaagcgattcttctgcctcagcctcccgagtagctgagattacaggaatgcgccaccctgcccggctaatttttttagtagagacggtttcactgtattggtcaggctggtctcgaacccctgaccttgtgatccgcccgccttggccccccaaagtgctgggattacaggcgtgagccactgcacctgacctactgtgagctcttgattggaagaattggcaaattttgccttcatattttggttttattgctctgactgattaccaggccccatgaatattaattcattccgtgaatgtgtatagaagtagccatagttatactacttactatcttttttttttttttttgagacagagtcttgctctgttgcctagactggagtgcagtggcaggatctcggctcactgcaaattctgcctcccgggttcaagcgattctcttgcctcagcctcccaagtagctgggattacaggcacctaccaccacgccctgctgattttgtgtatttttagtagagacagggtttcaccatgttggccaggctggtcttgaactcctgacctcagttgatccacccgcctctgcctcccaaagtgctgagattacaggcatgagacaccgcgcccggcctacttactatcttgtatttgtaagattcatttattttcattatttcttcttggtttttattatagaaaagagaaaataggtaaatttgggttcttgattagttcaaaaaagtatagccttt

SEQ ID NO: 137044 - DNA, 1203 bp, Homo sapiens
gggaaaaccgctcgagcccaggaatttaaggctgtggtgagctgtgattgtgccagtgcactccagcctgggcaacacagtgagactccgtctctttaaaaaacaaacaaacaaacaaaaaactggcagagggcagtggctcacccctgtaatcccagcactttgggaggctgaggcgggtggatcatgaggttgggagttcaagaccagcctggccaagatggtgaaacctcgtctctactaaaaatacaaaaattaaccgggcgtggtggcgggcacctgtaatcccagctactcgggaggctgaggcagagaattgcttgaacccgggaggtggaggttggcggtgagccgagatcctgccactgcactccagcctaggcgacagagcgagactccctctcaaaaaagaaaagagaactggagacctgagttttaggacctgctgtgtatttcaatcacttaatttttatgtttcaccagttttgccgtttcttaaaatgaagggctaggaattaggaatttccaaaatgactgtatagcaccacaattttgtagctagtttttcatttgtatttttagggttgactcagttcttgaagattttgacctagaaggagggcacaattaaactttgttttagattataattttctttgattttagcctcaagcttttaagaccagaaactgaatgaatgcacataatgaaattgagatttgtatgcttttgttaatctaggttgcatgtttttgttaatataagattaaccatttagttagttttagactggtttgaaagtatttctttagtgttttgacttccccaaaccacttctttcttacagttgggattgttatttcttaggtcagatctgatgtttaaaattctaggcataatcactgtatattcctgcttgctagaactcatgtgatggcaaagttaagtgaattctcaggtatgaattgataagaaatatcacattgaataaatatatattaggtactgggcatgtagatattacaaagatgagtaaggatccttagtttgcctaagagtagcaagagtcgcttggcatcagctgagacactttctgatctattgaaagtaagcatttatttatttatttatttatgatggagtcttgctctgttgcccaggctggagtgcagtggcacaatcttggctcactacaacctctgc

SEQ ID NO: 137045 - DNA, 1615 bp, Homo sapiens
aggtcaaggctgcagtgagctgtgattgtgccactacactccagcctgggtgacagagtgagaccttgccttaaaaaaaaaaaaataataataatacttaagattattttaattgtaactctttcctcattaaaaaaaaaaagtataatgtgttgacgtttcaaaaatggtttagattcaggtagtttcaatccttttaaattcttaagtgtatttatggtgttttaaaagcagccaggcaaaggcattgccgaatacccgcaaacaggaagaatttccttctgatttacgacacatctttctggaaaggatatcaagtttaatgatgcatacacttttagggatttgttgggaacaggtcagaagaatagtaatattatacattagatactatgtctctttatacataatgtaaagtaagaaaacactctaataactaagtcggtggtggtgatggtagtggtgcagtagagaaacatcttttcttgatattgtctggattactgcaacaaattcttttactgatctgtgtcagaagtaccaggggtgatctgctatagttacatagtttgccacctctttaggatgtctgaataacaagctgttaaaaatgtaggaagttagtgggatgagagtttgatgtggggttggagtagagtgggctttgtgttggggaacagggaaagaaaaaatatggatgtgtaggctgggactggagccaagtactcactgttataggcagtaggaaataattggaagtttaagagctgggaagcatgacaataaatagcattgctggaagagtgggttttgtttgtttagggtatgagttgggctgtagaaacagaccagtcaaggagcaacaagtggcagtaacggtgtagtacgggcattcattggaatttgcggaaataataggtaaaaagaaaaaggggaatggttatgggagaagtgttagggaagacttagcagtaatcaattagatgtgtaggcataaagaaatgatttgactaggtgctgttaatgaaaaggaaagttaaagagagaatttttgaacagtgccagaaacttaatttttacttggtgaatttaagatgatgttgggatgtccaagtggaaaaagtctgataagttgtttagagttaaaagatttcttcttccttctttgtctttcttcttattccctccccacccctgcttctcttgtgtaaacagaagtttatagtgcacaaaagtgactcttgggaaagtatctttagttaaggatcaagatagtaaggtagaaccaaggaagaaagaggagtgaggaaggcagatgggttagaaaagaggatccaggagaaaaaaaagatatacaggagaataaaggagacaggaaccagtttgtcttcactttggatacctagcagccaataaaagtgaccaggatggagtaggtgctcattgatgagtgactggtataatactaagtatttttaattatccacaggtattatctagtttagtaccttaaaaaaaaactagtgcaaaatatacataacatgcaatttaccattgtaaccttttcagatgtactgttcagtagtgttagtctccagaactcttttcatcttgt

SEQ ID NO: 137046 - DNA, 1819 bp, Homo sapiens
aggataggtaaatgttaggatataaatttttaaactctatattaaaggctctgtatttcacaggagaggaaaaatgaaggcattcgaagtgagtactctgtcccacatcacattttcttatctcaacaaagttcttgaaatggtagtgaaagttttttattgtgatagaaactaaccaagtttctttctttgtggataccaaacttgcaagtgttcctgggagtatatcagagatttgagaattcacacacatttcttactttaatgactctgggacacattattaacagagcaatgttacggagcacttaattgttaatgggagaaattttgacaaaattattgggaaccttgagagaattagagctttgttattacccgtgaagataaagaaacaattaagtacctattgtgtcctgaacactgagataaagccttagagaagttttctagttttaatccttttatcagctctttgagtgttactaaaatagaaaggataaattccccaggatctcctgtagcaaatgacaactggaatttgtcatcaagccctagaactgggttctttccgttgttcattttctcctgcagttgtcctgtgttataaaaacgaatttatattgttaaaatagtgttatttttttctttgggagaggaaatgtgagagtgagagcatgtgcatgaattggagttaggaagtaagatcagaagcagttggtgtgtgaagtatatcatgtggagaagacaatggaaaggcagtatatggtagtttaaaactggtagaggtctggcaaaaagtcagtaaaagcagttcagtgtaaattgtaggtatttttattactctagagattctgtgagatctcacataattcaataaagttcttctcacctgtgggaaagatgcatattatttatatttgagagcagttttgtttatatcaacagggaccacagtaataatttagactttcaacttatgaataaaattatcaaagtgctcctatattatcttatttggcaagtattgtttccatgtatagatgggaaaagcacttatgccataactagtggctcttttaataaatacatagggaagctgttccttctatagaatgttgtattgaatatgtctaagatagaagtgaaattttcaatattgacttcttaggtgatcgaatggaggctatatgcattatcttggggaggaaatgtattttagggctttattttttgcttacatatttgtatttttttatttctaggctgttcgctgctatgaatctctaatcttaaaagctgaaggaaaagtggagtctgatttcttttgtcaattaggtcacttcaacctcttattggaagattatccaaaaggtaatttttttcttgttcattattgtttgatttatacatgtgttggattgtaattatttgtgctttatcaagaggattttcctaagaaattgtaagtgcatgagcaaactaaacaatgaggaagaaaagtagagtagatggaaatggaaatcatcaataagttggctattcagtaaaagtgaaaaccacctgcatgttcagtgcagttttgttctgccttgtgaaaatccttgctcttgaaaggccttcccatagtagaaagtgacccagtttgatatagatatttgtacattgatggatactttggaaaggtaacaaaaactcaccatttttctttatcctatttaaaacgtttccattttagctcaaaaatatttgaatgaaaatctgatcgttaagtagccatgttattgtaaacaagtaatacagagagatgatcacagat

SEQ ID NO: 137047 - DNA, 1007 bp, Homo sapiens
atttgccctttttatggtaccaagctgccaactcagaccattactcaggaagttaaaagcacccggaaaccccgcccttccaataccaaagaaaaaatccacattaaaagaaaattattattatgaccaagaacattttaaccttttgatgatagtaaacattttgatgtggagtggatggatgtgttatgcttgttttcaacaagtgtgtttagagggcaaaacacctggcagatagtttcagggctaaagtgaaggattgttagtatttcatattgatgttttattatgcgacttttatgttaggtcaagtgaatgttttcctaatgaaaatgcaattttagtctgagacaggcatattctgtgaggtttgaaattaggcttatttctcagcttagctctgttatatacagctgcactacctttaacagattatatataaacatcgctgagtatctgttgtctgatctgtaaaaggggaggaggtgagggatgacgcctcatggattttcagattgtgtgacactggttagtacttagcaaaatggtttcagtccaacagggtaatgggtgttaatagttacttaatactccgttagatattttatttttaattaaaactggaaacttatttaaaggaaactattgtaccaaaaaatagatagaggcatacctgggagatattgcaggtttgatttcagacccctgcaatttattgcgaatattgtaataaaaccaatcaaacaaaatttttttgtttcctattacatataaaagttatgtttgcactgtaagtgtgcagtagcattatgtctaaaaaatgtacatactttagttaaaaaaaactttcttgctaaaaagtgctaacaatcaactgagctttcatcaagttctaatctttttgctgatggagggtcttggcatcgttgttgatatgtgctgagtgatcagggtggtggttgctgcaggttggggtggctgtggcagtttgttaaaataagaaaaca

SEQ ID NO: 137048 - DNA, 1043 bp, Homo sapiens
agtcatcttttctgtgtaaagttttctgagcttggcatttctcttgagtttagttcctttaaaaaaaacaaacaaaaaaaggcttctatttctatagtagaaaatggtagaacctgttttgtgtgtgttttgggctgtggtttttcttacccttaattgtcattttgctctcatctactttctgtcttacaagaattccaagaaacaattttggtctgaagatggtataatttggtaatcatttatcttttctgtgattccagatgaatttgatgcagaaggaaaaaaggctttgtaaaatattttcttagcttttctggctggtgatatgaatgaagagtttaaaaaaatgtcatgtcactttatttggtcattttacttgtaggaatttattttaagtcttaaaatagtaattggataggggattgtgggaaaatggaggctcactgcagtcagtctattgttgtaggttatgttcctcagtaaggagtttcctttatgttcaacagctttggaaggtggagggtagaaccagtattggacagaaggagaagttaagctgtgacagcctttactaacttcatgggatgctctggagccagaatggcccttgagagctataccaagttgggccaagatagccaggcctttatactccaattattccatattgaacatgggccagcctgagaagaactgtgaccagggacaagttggctctctgcaactgaggcagcttctgtagaatctcacagatagaggctttcagcaagcaggattcccagcagttctttcttgaagtgggatatgagtgcttctttacagtgtctactatacctcctttttactcctaactctaaagctaacccatgaacctccgaagccaaattgctgatggggctctcagatagcttataagccttaaaccatggagattatgcagtgatttcacttctttgggttggaggacaccctgagagatacataaccctgggctgaagcccaagcatatgtatttagatgaatatatgtgatggatctta

SEQ ID NO: 137049 - DNA, 1053 bp, Homo sapiens
cagagagagtgggttattcagaagtaaatcaaatcaggccggtcatggtggctcacacctgtaatcccacactttgggatgccaaggcaggtggatcacttgaggtcgggagttcgagaccagcctggccaaaatggtgaaaccccgcctctactaaaaatacaaaaattagctgggcatggtggcacgcgcctgtaatcccagctactcaggaggctgaggcaggagaatcacttgaacctgggaggcggagattgcagtgagccaagatcaccccactgcattccagcctgggcaacagagtgagaccccatctcaaaaaaaaaaaagtaaatcaaagcagaacacttaacacttctgggagccttcacatcatctattttgtagaatatagaggggagaatagaaactttatcagaacatggtcaaaaaaaagccaagcccagttaagaatctgggccaggtttatctgggtatttggtcctcaggttgagaagaggttacaagagcagcagaattttaatgataagcctcagtgacttggatctggggcatagctgctgtcctgggatcaccctttttcttcatcttgggtattcccatggcctcttgtctctgttgtgtctcctgctttcaataaaccatatcttcttctttcttgtatatactctcctttaaggggagcatatttgtcagatttttcttcaggaaagttatttgggagataattttctttggagactttgcgtatcagaaaatacctttattctagcctcctaatagatcgcttgactggatatataattttaggttggaaataattttccttcagaattttgaaaacattgttctgttgccttatttctagaattacatatctgttgtaggacccttcaaactaccaagtcatagccttcttttctgggaatatttttggaattatttcctgaattttcttttttccttttattctttctttttggggctctattattgatatgttagacctccggggcacagtttttctaattttctgtttttgtcctttttgtt

SEQ ID NO: 137050 - DNA, 1043 bp, Homo sapiens
aaattaaaaaaatccttttctagctgatcagaaaaatattatgcccccatgttttcatctagtagtcttatgggcttctttttatatctaactctcttaatcctccacgagttttgatctttgaggaaggtcgagttgatctaaggggttagcctagatgctgttcaagtgcagatctgagatttgaccatggttttacgtttctgaactgaggggggcccagaattttaagttgtttggtctgaaatatcactatctactgggaggtgggtgtggtgggaatcttgttaccgtgtttgttaagtgtattattgactttaaagtgagacataattatgactcataattattttcctttcagcattatctgcataccagaggtactacagtttacagtctgactactggaaggttagtgtacatttgcatgctgatttcatgtttgtgttttgggcagattattgccaattatactcaaaattaattgagctcttgcttttttttgttaattacttaaaatattgcttctaggggaaaggtattggaaaagggttgagagtatttatgtttgtgctgtcttgtatgactctccttgtattttattaagaattagagtcctctgacacattttactggtcaaatgtaatagaagtgtgataagtaaaaatcaagcaaaactaaacaaataacaataacaaaatgattccttggttttcttttctaaagttggtacctgggagtaaaagaaggctgaagacgtgtatatcaggctaaaatgggaaggtgtaatgggaaagttatgataaactctttcttggtgtactctgtttataattggagctttgaggagagctgaacctattttttagaagacctacctaaatgaaagactgtgcatagcagtgaaacaattaatcatccactttcttatcttaatttaagcagtgattaagcatgatcttttacatcatgtttacttttaagtttattgagcagtgagtttttttttttaaatctgaattgctgtttcagattttttgtgg

SEQ ID NO: 137051 - DNA, 1057 bp, Homo sapiens
caaacaagggcaatgttttgagagttttcatgggaaatgatacagtcttgatttggctccttccagcttctttttatttcctattttaaaaaatctttaaagtaaaatctttaaagggcacccacttttttcttcagtaaataatgtaaaaaagactgcattgacatggctacatcccccaggacccctcagttgtttagggctggactaaatggctggtgtcattgcttacaaacgtgtcttgaacttgatggagcttatgttgagaaataatgtttatatttttatcttttaattctgtttttttccatgaactttttgaagtccccttgtactgggtgattggattagtaaatctttgggcatctactctatggaagtgcgccctgtgctaggtgataacaaggaatacaggcagtgatcactcctgcctttatggcatttttatttgatcggatggagtttagtcaacacacaagtaacaaatatatggtgtaatagttaagagtgagctctggagactgacctagtttcagttcctatgtctgctagttagtacctgtttccttgagtaaattgcttattctctgatgcagtttcttcattctataaatgaagccctctaccaccacataaggttttttagaaccttttgaaagagttgatgttagatattgcataaaactaagtttttactgttacataataatgtcagatgatagagacgttgcagtaagaccaaatttagaggttggaaaaatcacctctagtttgaggtgggacaagaagcaaagctttcatggggaaggtggcatttaaatggatcttgaatgattaatagaatttatagggtggtggggattgaataagatttcctagagggagaagaatgaagttgggagaatgtacagtgtgtcctgaaatcagaaatgcccgtctctactaaaaatacaaaaaattagctgggcgtggtggcgggcgcctgtagtcccagctgttcaggaggctgaggcaggagaatggcgtgaacccgggaggtggagcttgcagtgagccg

SEQ ID NO: 137052 - DNA, 1025 bp, Homo sapiens
atcactgttattttggtgttttaaaaatatattgtaatgcatgatagaattttaggacttaaaacatcttggataccgtattttacaataataacatcatatatgttagatacaagtatttttcctaaaaatctttttcccttcctttacagaatgctgcctttttatatggtcttggtttggtctacttccattataatgcatttcagtggtaagttgacataaaaccagtaattcagtcattttcagtaaatggcttgtttgcttgttttgtttgtgcttgattttttgtgtgtgtgtgtaataaatagaaaatttagtgtcattaaacctacacttttcagtaatcttttgaaatgattagattgttccttgaagggtgttggctcaccttagatttttagagttgtatgttttcctgaaagaatctagtataagattctgttgaagaaggcttagattagaaagctttttggaatttcttagtcattcattatggactggtgttccccaagttatttgaactggtgaatcactgtgatctcagaagtcaagatatgtgggtaaatggtctatgatggctagttttcagacttctagacaagattgaccacttctcccttccacataccagctagcactttccaatatccagtaactaggcaccaactcataaactctcagttctctgtagaatagtaccacttcagagttggagattaaatataataatagtaatatataagattttctaaactgtaaagtgaagtaccctgtaatattatggcctttgccccattgttgtttttctgtttaccagacaatagtatgcactaatggggtaaaaaggcatatagttttagttgaaagattggtattgttgtcacagcattgccacttagtttgatcttgaattaaataacttctctaggtctgtttcctctttagtttgtttatttatttatttatttattttatttatttatttattttttgagacagggtctcactctgttgcccaggct

SEQ ID NO: 137053 - DNA, 1074 bp, Homo sapiens
aaatctcttgttcagcctgttagcctcagagaacttaaagttttattgattttattttatgtatgtatgtatgtatgtatgtatgtatgtatgtatgtatgtatttgtttatttatttatttgagacagagtctcactctgtcgccaggctggagtgcagtggcacaatcaaggctcactgcaacctctgcctcctggattcaagctattcttccgcctcagcctcctgagtagctgggactacaggcgcgtgccaccacgcccagctaatttttgtatttttagtagagatggggttttaccatgttggccaggatggtctctatttcttgacctcatgatccacccaccttggcctctcaaagtgctgggattacaggtatgagccaccatgcccagccaacttaaagttttattatgtgtctttccaaatgtactggaactgtgctaagaatattaatactattatttttactatagttttagaggaggctttaaaaatgactttgtggaagtcttattaaaaatgaccattgtgaaatatattcagcacatgtatatgttttttgtaggtagtgttattgaggttttagctttatatcattttctttttaaaatggttaacagtggcaaacattaaatgaaaaatcctttaaactgaaaatctatagaaactattttgatgatataaaaactatatttttcagattttaagaaaaatgccaatgataccatgcagagcaatgtgcatttcttttgtttcgttagagaatatgctttaagtatttgaaaactgtaaacctttccagggaattgtatcataaaagtatttatggtttctggtagctatttctcatgttctaaaattccatcagtcagaattctgaggttacagaaattgaatgtgttaatgatttagtctagtttgtgccatagagatcatgttgtggccacctgcattttggtgaaatatgaatgcagtaagctgatgaccaaaattagaatgtagtctgagtgttacctattttctctaccctcccactccctcaactcttaactctaaactcttaactc

SEQ ID NO: 137054 - DNA, 1073 bp, Homo sapiens
ccgtgtgacattgtgaactaagtggaaaagatgtctgtgctaaaggcacccatggagtaaaacatatccacaaatactgtgtttagggaaaaggctagaaatagaaactgagagtaggaaatattgcacctgaggggctgttattgtactgtgttccttctccttctcttcctgacataccctttgttatacctttttcctttcctgaattctttgttatttctttattcttttccactttcattctttttctttcatatctttgactcaggcctgcctgggttttttattggcatgtgtggacattgcttagttctgacccattccattagagagttttctggtcctataaggtaaggttaagaagcattatccataattttattattataaaatataacatacctacagaaaaatgcataaatcgtcattgtatatcttaacatgttgttataaaataaacattcatgtaatcaccacctccatcaagaaataaaatactgctatcaccccagaagcttctaaaagtctttgtataccctttcccagtcacaccatatgttttaattggcagcatttattgctgcagttgtcctcgtcctaacccttttgatgccttttccaaacatgtgacttgccccaacccctaagtgtacattgattaagtaggaagctgcctttaaatgagaatggtaatttaccacagtttttgcctgtcagtgctttaactctcctctcctgcctcaaagcctatatacatcagataataacacacataccccacctacttaaaaatccacctaacagatggatacccagctccccttcagaagaaagtactgtcataatcagggtaaaggtgtctgatgccagacctgtgttccacccctcactgccatctgcaataaacactaccttttaggactcttaattttatagcaaaagtgtacataaccattcacacttttttgggaagtaaataatgtatgaattgatgaaagtaaagttactaaatacatgaagtattattttgctctattttgtggctatgatgtttcgaactattttataca

SEQ ID NO: 137055 - DNA, 1965 bp, Homo sapiens
ttttgttttgaaagcatctaagattctaaatagccactttaaggtctgtaggggtagagataattgattaaaagttttgcaaataatatattagcttgtgcttggaagaagctttaaatcatgtagaggaacctaaaatgatactgaatatactgttatatctgatataaccttcaaaattcaaagtagacatttttctttgtcattattttaatatttatttttgagtaggcaatacagtcatatgatcaaattaaacaatataataatgtattcaatgaaaagtgtttctttccccaacccctgaacttgttctattggtgatcaaaaccttttataaaagatacaatgtgaatttggggcaaagatgaactgatagacgaagaaaagcggaatggaatagagaagtagacctacacaaatatgggtatttgatttaggacacagtagcaacatagagttttggagtaaggatggtcatttctacaaatggtgcaggtactattggatatcagtttggaaaatatgaagaccgtctcttaaccgcacatagtataaaagataaggtacagatggtttgtaagcctaaatatgaaagacaaaaatgtaaacttttagaaagaagacttatttttatagagtagaccagaaacaagattaatcccatatccttaaaaactttcctgtttgccccaccctgttttcctctaggaaatttcagaaacaatgaaatcagttatttctactgataatttgattaaaccatgaaatactgtctgtttgaataatttagaataaattcaacctatcttccttcccctttatatcaaattagattatatacgtttaattatataaaaggtccatatgccccttttcaattttacttttttagtatttattaacatcatttttataaaaccaacatttcctttaaaacaatattgcataaaacagaagtttcaatgtactaccaagcaagaattcatgcacgtgttaaaaagttaagatatcttatgtctatattctttcagggcaattaaagcatttcaggaggtgctttatgttgatcccagcttttgtcgagccaaggaaattcatttacgacttgggcttatgttcaaagtgaacacagactatgagtctagtttaaaggtaggttgttgggttttttcaagatacaatgtttaattttgtggtttttttgtttttgtttttcttaaatattagagcattgagaaatgttggaatttatattggcactttaaaagaaaatttgaaaattcaggtgacagaactgtttatcaactgtgaagtagagtttcaaggtacaaagtagttatgctaagacttccatggtaacattatacaattacactttaaaaaaatagttttaactaagatctgtcatcaggaaagggtgaaggtttcagtctgtttggatatgtaaataactcctctagaaatgatttgccactgtagagttcagaaccagctgaatggttctgaaaggatgtttttctgtgacccaatcattgaccctgtttccatgggtctcagtacttctaccagcagaagcacatcttatatttaaattagaaaaaagagtgttctctgcaaggcatttggactgttggtttgtgagcataaacgttgtgggaaaagatgatatgttgttgattaacttcgtatccatggaaatgtgatatttctccagtttttaatttttcattgagttttttatgctatctgaaccatcaatttaggtcttgctgggctttttctgaaaatagtgctttcctgcccaacagaggaattatgttttgaaaggagtagcagttgtaggaaaaagtttaagtttttgtgaatttatgtttattgtttataatggttgttgtattctgaatctccattgcagactatcttgattctaaaggaagggtggttggggagataaagaatgac

SEQ ID NO: 137056 - DNA, 1099 bp, Homo sapiens
catgaacatttttagtcaaagaggaggaggtattttagtttattactaaagtgcttagcattcagaatgagtgaaggtaggaatagaaggaatgatatccccctttaggtggttttccatttttctaatacttcaccttcatctggataaatgtggaacctctgatggcttttccacaacattaagctgttttgtagcacagtgtgttggtatagatgctttttaggctgtaacctcagggactccaactcaaattggttaaaataataaaaaatatgctcctatgtgaagtctagccttcaggattggttgattcagctgatctaaggtttcatcaaggattcattttcttctcagttctgtattggctttttctaaaggctggttgctctgcttagtgtaatgctggcatataagtgcatagtaaatgatgatgatcatttcatgtaggagaaagatcctggttgcctgttgatctcttcaaaaatacttcaccttgcatcttattggccagaaataggccacatggccattcctaattgatttcttatcaaaggaaatgtggttgctcttagactagttatgcccagtctttgagaattgttcaaatctgtaagtagttgttatccagtggagggatagggtgggtaaaaaggatattttggtatggggagtggtgtgaacagtctgtccgttacagatcagatcttctctatcccatttcctttccctctgcccaagtgtgtataatactttttggatggtaaactatttaaataaaatacagcgtattttcataatagattccttttttttcctcccaatatgaaatgaattgtagggcctcctgttgtgtttctgtcactggtgataactttctcacaaaatgtgtctctgaaattctgtgttggtgctgtgtaaacagctctcagagcaaaccaacttggttttcaaaactttgaccctgccgcatatcttcgtgaccttgagtaagatttctgactcttgattttctctgtgtctgaagaactagaataattatagccacccacatgattgatataaaggtgaatatatgtgtgtgtttgtttttatatgt

SEQ ID NO: 137057 - DNA, 1027 bp, Homo sapiens
aatgcttcactgaggcagttcttaatacatactatttttggataaaccaccaggcagataccaaaaaatattagcacactattctggtcatcttaagaaaagaagaacattcttttttagtattagttacactgtgtatttcttcctttggtataactgttggttctttatacataaaattcatatagtcagattttgcttggctttttatggttagcagtagattggattatgattgaggaaactgcaacccagtttattttctttgatttaaatcttccttttcctttcagtcattgacagtagaactcagtttcacctgagtgtaacatcactgttccttttggcagaggatggtcattgctgtttattttgttttctactttttctcacttgtagaaaataatcatcctttctctgttcttttctctttgtactactcgtcagcttgtactttaccaatttcctagataatagtttctgatacgaggcaacctcctaattaatttatctggccacttaataatgctttctctatttcactctgcctgcccaactttggttttctgtttgatattatttctgccctgagttctataacgtgccttcaagtgtgaattagtaaaagtggccgaaatacttcaatacctgcaaaatgcatgtttgaaaagtacatggctgctcatatatgtgcagtaacaccattctttctctttgaaactgaggagttagggtgattctaggttccctgtgttacagtttctctcttctagtatattttaactacagaagtcatttctaaagtgatttctggtgctaacttacaacaacttaagggcgttatagatatttggtcttcaaaggcagctttataaagcagtcactgtattgtcacatttagaaaaaggttgtgtggctgggcgcagtggctcacacctgtaatcccagcactttgggaggctgaggcgggtggattgcctgaggtcaggagtttgagagttgcttggccaacatgatgaaaccctat

SEQ ID NO: 137058 - DNA, 1033 bp, Homo sapiens
gttaataggtatatctattttgcatctggtttaggtcctggaaatgaggctttgtggtcatgttatccctaccccggttcttcatctctcttgagagtgctgaacggcatatcagtgtttttctttatgtggaacggtgttgttagtttcttataaacacttagtaattattctgtaagttctttcattgtcatagtggatgtttttgaatgtgtattcgtgttttttttgtttttgttttttgaaacgcattctcattttttctgccacaggcacccgccaccatgccggctaatttttgtatttttagtagagatggggtttcatgatgttggccaggctggtctcgaactcctaaccttaggtgatctgcccgcctcggcctcccaaagtactgggattataggcgtgagctactgtacccaaccaatgtgtattcttttgctgagtaattttcctatgtcttcactgtttggaaatgtttggtatttcatagtgttgtgggtttgaaatggtgcatcagtaacttgattgctgcgtttaagattgttttataattacacaaaacatggtcaagaaatactcctgccaggtttcactgcagaatcttaaattactgatagatgaaatgtaggctaggctgtttgaattctacatctctattcttccttgtggggtttcagtgaaatagtaaaactaaaatattgccatattgaaggccgtttcttctcatttcagtttgtaccctttgatggctcagttaggaatggtggtctgtgttcttctatctaaatatttatgcttacaggacaaattagacttagaaatatagtacagtctgaatgtgtgactactcttgtgctctttttgtctagaggaaagcaattgattataaagcatgctttgctttcatagtactcaaacgttttaaaatagtctgttctctattgctatggtagcacactaaagggatgtttgaagacacagtctgcttagtaggccaagggaaaataaaagcagttttcaaagtgtt

SEQ ID NO: 137059 - DNA, 1161 bp, Homo sapiens
ctttttcacataaataaaaatatacataggataacttgataaaattaattctttttcaaattctccattctcagctgtctcaagaaaataacccccacagcatgtcagttgtcagcagtaaatgttcaaagtatttctagttggtaggctagtgtattttatttgcatagcatgtatttattattattttagaccttacatacctgaaaagtatcttaagatgcttttgtgtgactctaaattgactgcattaattttctcactctcgtcttgcagcattttcagttagctttggttgactgtaatccctgcactttgtccaatgctgaaagtaagtattattaagtactgtagttttctacatgtattccgatcacttcatggcaaataacaataatgttagtgataaattctgtgcaattttttcttttagaattgtttaatgtaactgtattggttgccatggctacttacataaatggaacctgcaagaccagatattgtgaacagcctgtgtctaaaatagataggccagtgaagtgagttgttgaattaaaagtatcttcactaataaacaagattgatttttctctgtcgtgtattatattgtagatgacttggtaggattaaaaacaggttttgctggtcttttaggaaacatgagtatataaagattcttatctgatagcttactgattcctactgcgtgggataaaaattattggtaattatgaagacatttgtgacttttatgatagttttatatatcatttagaaagcttgagttgacatttttcaattaattagaaaggaatacatttacgaagcatgttctaacaaagtatttttttccaaacaattattttctgcttctatgtaggtgtcttttcaaaagcagattgggttgattatatgtttatcgatatgtatttaggtatatttatttaatatacactaaagtatccagtaaaaaggtttaagaatattcgttgatgctaaatttcttaaaaaccttcttacttgaaaaataaattattattattattattattttcttttttttgagatggagtctcactctgttgcccaggctggagtgcagtggcgcgattttggctcactgcaagctccgcctaccgggttgacgccattctcctgcct

SEQ ID NO: 137060 - DNA, 1059 bp, Homo sapiens
tcatgagtgctacaaggtggttggtcactcaaacgggagagcatattttctatttagagactttaggctattacagtttagtagatttggatagtttactttagacagtctacttgattacttgatagctataataatgcctgatgtcacaacaaatgtagagtacctactttgagccagtattactcttttcaacaccaggctccttattgtctttgtaaaacttatttttctttgaatttttacatcatcactgatttgtactttggttttaatattttttaattaaatattgattttactcttttttgacttgggattcagtttttaaatactgtgttttgaaatgtatagattataaaggttttctctctttgcttaatgttgccattttgaactttgtaaaacatatattcacttgctatagatttaatgctaattttaataattgcattgacagaaatttcatttgataatgaccaacaatgaatacatgtggtttcttatcatgattgtgttctttagtgtgtttgtttgtatattctattttagtaaaagcaaataaaagttatgtttttctattacttaaatctatatagtgtagactgtgataatgtttgatgctttgttattcttacttaatttgccccaaattctgctgtattgttactgatttttttgtctttcctcatcctttgcagttcaatttcacattgcccacttatatgaaacccaggtaagtattttaacttattctatttaaaacaaaagcaaacaaaaatcattactcctatcatgctttactgaaatcagaagtgtacagataatttaatggagttctgggcgttacttcttaggtaaattttgtattttatactcattaaatgtgatcaagatgctgcttagtaaaacaattattccaaggagtgcttgctgtgtacaaattaattccatttaatattttcctttaaacttgatccatttgcggctgggcgcggtagctcacacctgtaatcccactggtttgggaggccaaggcgggtagatcacttgaggcca

SEQ ID NO: 137061 - DNA, 1091 bp, Homo sapiens
tcagtgtgctattctgcttgttagaaaagcaaactttagggtaatctttggctggatttaaaattctctactgttttgtgtctgtgctttcttgtatatacattaggttttgctcatgctgttcaaacccatttaaaacgccttttctcatcttctctgcccgaatcagtggttcctagaattttaggttacataaatcagtaaaatttcaaagaataattatgaggatagaaatatggtgtttgggcaagtaaaaacattaactttttttgcaatttactgtcagccaataatatccaaaataagagaattacagcataaatattaattcatttattggaaaaactttatgtatgtatatgtgtgtgttgtctttccaatttgtttgcttggcaaacgtgccatatactggctggcaattaggaatcactaaataatatgcatctttacatattcaaatcccttactcttactctcccccccccccctttttttttttgcctttcctaaatcttgcagaatatgatggtctcttcttatcctaaattctcaggccaattattgtctatactggccatttgatatgacatcatgacatttttaatgtatcttcagtcctcaactaaattgtaagcttcatgaaaatagggactgggtttttgttttttttctttttcctttagtgccaagaataagaagataatttcagtatttataatttcaactgttatctgtgtatccatcatgtccatcgtgtatattcacattaagaaaattacagtccttgaatcgttaatcttaccttgctaactttactagtcataaaatattatactttatattatttttactttttactttatactatttttgatacttagtttgagattaactatgtcttacatgtgcattttttttatgaattaaagaattattgccctcagtgttgttacttgggaaaggaaaattgaaatctgatacagcaaatcttaccaacgtatatagtgtttttgtttttaactctgtattttgaccatataggaaactagaggtcaagctgtataagaagagtggaagagtgccgtgtgtgt

SEQ ID NO: 137062 - DNA, 3265 bp, Homo sapiens
acaggcctatatttgtgctgtacaattggaccatggccatgctgcagcctggatggacctaggcactctctatgaatcctgcaaccagcctcaggatgccattaaatgctacttaaatgcaactagaagcaaaagttgtagtaatacctctgcacttgcagcacgaattaagtatttacaggtaaaatttttaaatggcagttttttaaagccacatatttccccagaacactcaggcagaaggagggtggctggaaagtttgtctagttgtgttttgatgtctataatctgtttccatattttgtaaacataccatagcttgtaatattattttacttttcattttaagtaagatatgcagtatttttaaagatgctcttttgcacatttactctgttgatgcatattaatttacataatttttttctatgtactgtctacatttttaagttgtcatagcattttatagaaaacacaaacagtctttcactcttgcttggagtttcttgagaagacagctatgagaactctgaaaacagagctcagctttgttttgattctcacaaaggtttatattccggttaccctgtttatacttagtgtcttctaaagccccaaatttagaatctattttcttttaaaaacaattagctatagcatttaggaagatttagtggacttgctcttactcaagtaggcttgtgttaaatttgctttttacataatttttcctaggctcagttgtgtaaccttccacaaggtagtctacagaataaaactaaattacttcctagtattgaggaggcgtggagcctaccaattcccgcagagcttacctccaggcagggtgccatgaacacagcacagcaggtgagaagttgggttatgttctgcaggtgcccagctttaagggttcttttcaattctctagtggtcaagcttaatttactaagcacaggaggcttttagtaatgaaaagccttttgatttaattgcaaagggaatctagatcaaaataaaattccctctaatatgggaagagattttggggtaccaacttagaacctttgtgcattttcatgattttgaaggagatttcttaaaataatgctacagtggtttgtttaatttttaaggcaagtttttcaaaggaaggtacacattattccattgatgaatcatttaattttgattttcaatcattgcaatcagcgatgtccacatagctttgaaaagtatgcagcttgtaaagttttataatttgaaggaatgaattaagaatatatagaaccctatttttgtcttccttctgtgattcttaggcatgtaaacctcatcatccaaatactgaacctgtattaggcctcagtcaaacaccaatttcacagcaatccttgccactacacatgattccttctagccaagtagatgacctgtccagtcctgccaagaggaaaagaacatctagtccaacaaaggtatatgttttagagaaatagaaaatcccagtcaaaaaagaagtttcagctgccctgaaattgtgcagtttgaacatttcctgtcctttattttaaatttgtggacatcaaagagtgaaaggtttgagtttttccatcccaaacccttagtatcatattaaatatagaaagtagggataaatttgcattcatcaaatcattttattcatctccctgccgttaagatcccagcacacttttcatcatcactttttactgacattgaaataaatttaatgttggatctagtggacagtgtggtgtttaggctagccgtttgggccatagtttgagggtgggcctttttgggtggcttattaaatagtcagtaatttttaaatgtatgatttctaagtttaatatgcatgtaaaattattttttaaagaatttaatgttataacatctttttaacatgtaaatattccaattcatagtcatttggcctcctctaaccattattattaactgtggatttaaccaaatattctttaattttttttttaaatcgattttcctcagaatacttctgacaattggagtggtggacatgctgtgtcacatcctccagtacagcaacaagctcattcatggtgtttgacaccacagaaattacaggtatgtaagatgtttttgacaaattgtttattaaaaaggagtagaggtagcaaacaagtattaattttttttttttttttttttttttttgagatagagtcttgctctgtcacccaggctggagtatagtggcacgctcttggctcactgcaacctccgcgtcctgtgttaaagttattcttgtgcctcagcctccagagtagctgggattacaggcacgcaccatcacaccccgctaatttttatatttttggtagagactgggtttcgccatgttggccagactggtcttgcactcctgacctcaagtgatccacctacctcagcctcccaaagtgctgagattacaggtgtgagccactgcacccagccctaagtattaattcttataagttaaatggcagtacattcaattaaaatgcacaaaagtaaaatgagcctgcatttaccagaataatgaagagcattcattcttgtttttaatttctttttttttttttaaacaggacatggtttacactacataaagtataaatatagggtatatagggtaaagttttcttctaactctggcccctacccactcaaaatgtggctggtattactaatttcctatctatcattccagaggtatgttatgtatgtacaagcaaatatacatccccccctttctcacatgtattattatttttcttcttttttacacaaatgataggattcttatttgctgttaacaacatattttacagacttctgcatgtcaatatgtgaagagcttccttgttcttttatggttacatcatatttctttatatagatgtaacacctttatttaagcagatcagtaattttggacattcaggttgtcttcagactttgcttattccagacagtgctgcttttagcatacttgtcaatatatttttaagcttcaagagttttctctgtgaatacctaagaatactgtatggatgagtaaaatttcatgcccatctattacaaagaactcatagtaaatcttgttcagatgaatgcttagttcattcttatatttctcaagcttattaaaggacttcatcttggagtgtgtgactgttggtcagaagacagtgtgtttgaccagatagtggt

SEQ ID NO: 137063 - DNA, 1035 bp, Homo sapiens
taatgggattttttttttttgaaaccgacttttgctttttcaaggaagtttattttaaaatgaacaaatacaatttcttgtttttaaagtatgtatttctcaacttagagaaattaagcatttgggtaaaatcacacattccctaattatacatcttcatattcatctggggattcatagagaatcccctatagattctcttccctatagattacacaaccagcatttacttttcctttgtttttttgacagatgagaccaacaggagttgcacaggtacgatctactggaattcctaatgggccaacagctgactcatcactgcctacaaactcagtctctggccagcagccacagcttgctctgaccagagtgcctagcgtctctcagcctggagtccgtcctgcctgccctgggcagcctttggccaatggacccttttctgcaggccatgttccctgtagcacatcaagaacgctgggaagtacagacactattttgataggcaataatcatataacaggaagtggaagtaatggaaacgtgccttacctgcagcgaaacgcactcactctacctcataaccgcacaaacctgaccagcagcgcagaggagccgtggaaaaaccaactatctaactccactcaggtaataggaggactagcttccttgttggcttttcacataaatgtttttactgggttttatacactttgagagaagaagagagaagtgtttggggaactggttttataagaattttgtggcactacaatgttactacattgtgattcattatgtacatacatgagtatatctttgttccctttgtacagtctctaccgacatagataacttagcaaatttacaaaggaagaaaatagatcatataaatcacccaaaatgcaccattaatttacagtggcatcataagcacatttatgtaatattacttagttcatttctgcataaactgcctacttaagatcaggcactaaactaggtgttaggtatttgctttagtgggagaaaaag

SEQ ID NO: 137064 - DNA, 1014 bp, Homo sapiens
aagtagcaagtatagacagttccagcacacatgcttacagttgtttgggctacacactgcacagtgccaaggcttccatttccatataccgtggcataaaagagaacaacaaccgggtgtagctgacagggaaaatgggattaggagttgttgtcttgttgttgttttaaatttaaaatgagagaaataacagtaaaagtcaatgggaaagattcagtagagagggagaaaatggcaaaggagaaaggggaattgttagaatgggtgagaggatgggattttgggggttcattgtctttaagcattaaacagttgttaaaaggataacacgagatttttgttaaaatgcctatcatagttctaaggtataactggcagttaataagtgaaagcctttgttatgattgtaaagcatagttctattttcttttctctcacatctacttctttggctcacttagttgctgaagttttcaatactctcttaaccctgttttggaaatgtgggattctttaaaaacgtaattcgtaattctaataaaaaggaactcctcagttggcaggccacgaggcttctgtaatttaccatactaagtagcagggagcccccagcctttgcttcacacgcccttcaaagccattatctgtaggaactttacaatttaagtaatgaggttgagagagttgtttagaaaatgatgttgaactgattccaggtcaaaagtttcccaaatgaagtttctgcatatcactacagctgggaagcctctgtctctgctgttgatatatggtattaatatcatagactctaaagaggcctttttggtaacttgtcttatacaaacctatttgaataatttttgaaattgtaatgaaaactagacaactggtagacctatatggtatatctaccttttagtttttgatcaagggaggaatttacattacagtgtggaatgggtttattcagattgcttttggtagcaagggtataatttaagatatgaaagtaaa

SEQ ID NO: 137065 - DNA, 1066 bp, Homo sapiens
tgcctgccttggcctcccaatgtgctgggattccaggtgtgagccactgcgcctggccaatgtgtatcaacttttaatatatctagtgttttaggtagataagcctattgagtaaaaacattagtttaaaattttcagcttcagaaactgattttaggggcatgctagctgactttaactagatgattaaatgcaccttttagtatataaatatcttgttatcagctatagttttattcttttatagcttattactgacaaaatgctctaaccttgttgctgaagtaatctcaactccaaatgtaaactcgttttatgattccaatgttactttaatcagtgttgctgaaaaattggctgtcctatttaattattttgtaagtaaaatgaaatgaaaatattcttcttaaagaagtttctctgtgacaccagaggcaaatttcaggtaaaaattagttccagttatcatattttcattctattaaatgccctaagtgatcttcctctagtcttaaaacttctattaactgttagtatactgccccctcagattgctttaacagtagcagtgtatttttctaagttttcaaattcaggtgatgaaaaataaagtttatctcaaagtcattagtggagacttaaaatgtctttttctcccctttttttttaaaaaaaaaaaaaaaaaagagagacacaaggttctgctctgtcacccaggctggagtacagtggcaccatcttagctcactgctggctcaaactcctgggctcaagagatcctcccaccttggcctcctgtgtagctggactacaggcacacttgtcaacacacctagcttgtctgcctgctttccttccctctctcccctctctccctcctctctcctctctcttctttctctttctctttctctttctctttctctttctctttccctttccctttccctttccctttccctttctctctctctttttcttttgtggagacggagtctcattgtgttgcccagcctggtctcgaactcctggcctcaaacgatcctcctgcctcggccttccagag

SEQ ID NO: 137066 - DNA, 1539 bp, Homo sapiens
tctttctttttaggggcttcacaaaggtcagagttcacattcggcaggtcctaatggtgaacgacctctctcttccactgggccttcccagcatctccaggcagctggctctggtattcagaatcagaacggacatcccaccctgcctagcaattcagtaacacagggggctgctctcaatcacctctcctctcacactgctacctcaggtggacaacaaggcattaccttaaccaaagagagcaagccttcaggaaacatattgacggtgcctgaaacaagcaggcacactggagagacacctaacagcactgccagtgtcgagggacttcctaatcatgtccatcagatgacggcagatgctgtttgcagtcctagccatggagattctaagtcaccaggtttactaagttcagacaatcctcagctctctgccttgttgatgggaaaagccaataacaatgtgggtactggaacctgtgacaaagtcaataacatccacccagctgttcatacaaagactgataactctgttgcctcttcaccatcttcagccatttcaacagcaacaccttctccaaaatccactgagcagacaaccacaaacagtgttaccagccttaacagccctcacagtgggctacacacaattaatggagaagggatggaagaatctcagagccccatgaaaacagatctgcttctggttaaccacaaacctagtccacagatcataccatcaatgtctgtgtccatataccccagctcagcagaagttctgaaggcatgcaggttagtgtgggaaagttcatcaaagtgaaaatgtttgacttactggcatgatcagaatgctgaaatttggaccgtttaagatatgggaagtaagcaaaagatggtgtagtcattcatctaagagtttgacagaagctttattttgcttagatgttgtagtcaaatcagatgtgagaagtattcctgtaaattgcttattttgagtgggtgtgtctgattgtgctgttactgccctctactggttactaggttgtcagcttcagtgtgattgacttcgctctggggatttaaacaagagaatgggttaaatcatatttggccaaatacagcaaggctggaaaaccctatgggttttttttttttttttatcagagcctattaaatgttaggctaggaatggaccccatcacttatcaaggctagtctttgcttacaattgagaaaactggactgtttgaatctagaagaggttataaagcaggcagaagaggaaggaagaggtcaggggcaatgggcagtggagagacatgacagactgtcagccattctggaaggagccagacatattctgctagtctaggaagggcagggcctcagaaatttatgaagaaatgaacctcctctgtcccacaaaagaagaatcaaaggatcaggcagcatcatctttctctgatatttggaggacatatagattcttactggccttttcattgtatatgacacatatataatttttctcatttactt

SEQ ID NO: 137067 - DNA, 1496 bp, Homo sapiens
gaaatttagttaacataactggaacaaacaaataattctgtaatattttctgatacattaaatgttaagtttgagcagacatatagtagattttaaaaagatctttttttggttgtagattgtcatgatatatagaaaataaccattctataaatagaaattataaacattagttctagtttggctacattgaccatttaatatagcttttacattttaaagttcaaaacaattcttatttatagccatataaacctcttcctgcagttgctagtacttatatgtcttatttattgttatgtaaaagtgtgattatcttttctgttgttcagattattttattagaaggtatcctgggtctaccgttaaatgtttgtcactgacgaatgattgaggtgaaattaaattttatttatatataagtttgctgcttgggagggatgtggggtaggagcaatggagtatggagaagaaatttcaattaatttaaatttatcgctttaattgtgacactagaactttactataaattacactatagtcatttttctttaaagagtttgagtgttaaaaataccttttggtctgtgttttcttttcttttcttgtcttttcttgtcttttcttgtcttttcttgtctttttttaagacagtttcgctcttgttgcccaggctggagtgcaatggcgcgatttcaacttaccgcacgctctgcctcccaggttcaagcgattctcctgcctcaagcctcccaagtagctgggtgggattacaggcatgcagcaccacacctggctaattttgtattttttagtagagacggggtttctccatgttggtcaggctggtcttgaactcccaacctcaagtgttccacctgcctctgcctcccaaagtgctgggattacaggcgtgagccactgtgcccagctggtctttgtttcattttctattagtttctatttctgttagtttctatttcattatttcctgtcaaattttaactatttagttgttattctgacatagactagggcagaaattacatccttttttatattttatttttttctttattgggtccacgttgttggcagcattttccttagtgacctacaacatggtgattgctgtaattaatcttaactgtcttacaagattttttaaggtcagtaacttaagaggacattggatgatctctaaatgaaattcttctaaagcatatagtgaggttcttgagttcctaaaatttgtttctttagaaatttttatattataggtttttatattagttttttttttgaagttaggctatcattcagttcaactctgggcctacagaaaatagggagtgttcagattaaatgctacacttggctctccttagacagtgccttgattcactgccagtttgactgtcttctacctgctcctcactcatctgctggggcctctgtcctgtttcctaggtactgctgctctaactgctggagca

SEQ ID NO: 137068 - DNA, 1805 bp, Homo sapiens
taggaaatttttttctgatttgagaaaaaggaaaaaatctcaggtttgagagttgttacaaagatattctgattataattgctaagatgagacacaggaaaagagacattctgttttttactattacctagaactttttttggtcaagttaatattttaacattgatggaaaagaatgtgatggtagagaggaaattgtaagctcatgtttgttgtttaggtgaaaataaattggaaaattacgagcaaaataaggaatgtcatcaataatttatatgttgtgatatcttttattttccttcagtggaggatatataggaatcaagtctttgctgaaattaataatcattcttagtgtttttcctgatggatccacatcccacatctcatggacttgtgcaaatgcctagtaatttaattaggacttaattcaggattctttttttttttttctgttttccaaataaatgtacaactgattatccctttttttttttttccaggaatctaggtaaaaatggcttatctaacagtagcattttgttggataaatgtccacctccaagaccaccatcttcaccataccctcccttgccaaaggacaagttgaatccacctacacctagtatttacgtgagtctgaattgactgactagaaataaaacagtgtttgcaactacctgtctttcataaaatctttaaatttacatggatgccctttaggaaacattacaattattggcagcagattaaatagtttgggggcgggggggaagatatattcaagaagattttgtaatagcatttttaaaggaccttctcagctattaactgtgatgatattagaatcatgagaaacattttttattgccctaattttgagcagcgttaggaaaaagctacctaaaagtgtaactttttttagtaaactgggttttaaatccacattctacttagttatgtggaccttaacattcattctgttttatacatctacccccccaaaaaagatactaccttcaaaataagtgtttgagaacataagtgtgatagtagatatatgtgactaaaaaaacttaataggttatttaaaacatttaaaactagatactagttttactttatagaaatataggaatctgatataggaagtcattagcagttcaatcaaaacaattcctatttctgtttcttccaaatagatcttcctatcctatttcctttcattttcctgcttctatcccaaattaaaattttgtaagtataaagttagggtagtatatgtataatgatcttgcatctataaaatggtactagagtttgttttatagatttaacccccttgccctctagaggccaaatattatcatattaattcttcctccaaccagttgttgtttatcccttactatgtaagggaagcactgggatagacatgtaaaaaaacttgtaaagtgagctctgaggagaaaaaaaaatgcaaaattaagtttttatcttttatgggtcctcttcagtctgctttctttgataatatttgtttaggcataattttttttcttttcctctcttatattgtgattttttaaaaacacatagcataaaatttaccatcttacccatttctgagtgtgcagttcagtactgttaagcatattcacattggtgtccaaccaatctccagaactttctcatcttgacaaactgaaactacacactgaacaactacccatttctccctcctgccagcccctggcaactaccattctactttctgtttctataaatttgactattctagatac

SEQ ID NO: 137069 - DNA, 1744 bp, Homo sapiens
taagtggaaccatacaatatttgtctttttgtgactggcttatttcacttaacataatgtcctcaagattcatccatgttgcagcatgtgtcaagattgtcttttcattttaagactgaataatatttaaaacactttgattttgaagtttaatttcagtttcatttctcctacatatttttgtcatgataaaatggaaaggagaaatgtatgtggttactatctgattaaaactagaatcaaaagtcacagtgataagatactgtcaaatagaaatatcaccccataaaatgcgttatttaaattgtgaaaaataatgaatattaatttggagcataatatttaaataaaagctctgttttcctgagatctaaccacatattttaattttacagttggaaaataaacgtgatgctttctttcctccattacatcaattttgtacaaatccgaacaaccctgttacagtaatacgtggccttgctggagctcttaagttaggtaagccttaaattaaaaaaggaaaacgtttgtctctttgttttgctatcttttaacttttccagcactggcagatacttttcttttttttcttttttctttttttttctttttttgtattttaattttacttttttttagtactaagaatgagagagagtgtgtgtatcacttctttaatccatgatgtgaatatattgttggtgatactggttactgacaatttggtggaggtttttaaatttagctattactttggtccgtttacataattgtgatttaggttaatagaaaaaatttgattataaaatgtaggtgaaatttgatgctactaataaatactatagccccataagtatttcctggcatctgcagaaattaaataaataagtgaaatttcagtcctttcacacttaattctttctcggatgggatgacatagcagttagattcagggcttcagcgtatggttctgcaaacttggcacatagctcaggttgtgcagaggccctagttttttatgggaactggatacagtgccgtaaaatgctttaccttcttcctttaaaaaaaaaaagcacttaaaatattatcccaaatataattttcattttttaactacatttatgtattcatgaagacctgggacttttctctactaaaactttggtggaagctaacaatgaacatatggtagaagtgaggacacagttgttgcagccagcagatgaaaactgggatcccactggaacaaagaaaatctggcattgtgaaagtaatagatctcatactacaattgctaaatatgcacagtaccaggcctcctcattccaggaatcattgagagtaagtatttgtatcctaaagattattttaggattttaaagatgattttactttggagttttgaaaggacacattacttttatatgcatctcatcattttatgttacataaaatactttgtaagtgttctccagttgtctcgtatgtatatatgtatgtatgtatgtatgtatgtatgtatgtatgtatgtacgtacgtatgtgtattttgagacggagtctccatctgtcgcctaggctagagcgcagtggcacgatcttggctcactgcaccctctgcctcccaggttcaagcgattctcctgtctcagactcctgagtagctgggattacaggcatgtgctaccacgcccagctaacttttttgcatttttagtagaaactgggtttcaccatg

SEQ ID NO: 137070 - DNA, 3243 bp, Homo sapiens
aaacttcatcatgtggagacattactagactcattctaataactagtctagactttgccactaattaggcttgtcacttttggcaagttacatttcttctttaggtctttttcttcatttataaagtgaattacattgtttttagacttaaattttccatccagtactgaagtaccatcttctttgtgctcttttgcattgacatgaaatttcacagggtgatattcaaaatatttaacaattgccacaatcgcagcactgatcaattagaagagatactgttgatgaccagttcagctgtaccaatgtacttggggctgcaggtctccctcaggtgcttctctttgctacttgatgcagccatggtttgaaaaccagactgcttccttctttgttcacattcttactgagtcgtgcttaagaattttttcagaatagggctatgcttgcttctgggtaaaatgggtcagtggttccccatcctggctgctgatttgattctcttgtccttttttcttttttcttttttaagagacagggtcttgctatgtcactcaggctggagtgcagtgatgtgatcatagctctctgtaaccttgtttaactcctgggctcaagcaattctcctgcctcaacctcccaagtagctaggactacaagtacatgccaccatgcctggctaattgttttgaggttcacataatgacttcaagttattcttccctctggacctcccaaagtgctgggattataggcttgagccaccacacctggtagctttttaaaagtatgtaattaattaatctctaggattcagatccaggcatgagggtaggtgggtgggttggttggtttttaactgaggtccccagaggattctaatatacagccaggattagaactattggttataattgttatcctcagaccattagaagcccaattctgtgatattttatccatagtcaggtaaagtgcaaagagttctggaataaatgatagaagaactatgttctgctctgtactctgtcattggacactgatataaatgttgggcaaaaaacattattttgagtaccttgttatggggtaaacactgttcctggagattagttcataaggaaaaaaatggtaatgatatctataatagctaatatttattgcttactgtgtacagatggtccctgagttgaaatggttcaacttaccacttttggactttatggtgggtttatcagagtattaaatgcattttcaacttaaggtatttttcaacttactatgggtttatcaggatgtagtcccatctgtaagttaaggagcatctgtattaagcactgttatatgcattcattagtttatccatcttcaaaacaacccaacaatttatagagattattattatctgttcttacatatagggaaactgagtcagaatggtttaccaacttgcccaggttcaattaatgactaagccaaggagtctggctccagagcctaatctcttaaccatgattatactgcctatcatagaagctcttactgagtatgttaggagttgacacaaaaatgctacagtgatgaagaactaaatactactagagtgttctctgttgagcatttgtaaggttttgtttccaaagacccatttttctatagaattatagtgtgatgattaatttttttctgtataagtaccgtgtgctaaccaattgcaccactggagctccaattttttttcttttcacatttcaggtcatcaggaaaataacaacttctgttcagttaacataaatattggcccaggtgactgtgaatggtttgttgttcctgaaggttactggggtgttctgaatgacttctgtgaaaagtaggtttccaaagtaaattttcttaaaacatatattagaaagcagtaattgtaaacgacaacttaccaagctggatctcctaatggatacattgccagtattcacttaccattcagcgaagaattcattttaaattatttgattccaaacctcatattttgtgttattggaaatactttaagaaagatgccatgaaacaacttcatgcagtagtagtacccatgaattaagaagatagaaaagttgagttattagtttaatttttaaaatgatgcatacttattcatttgaaatgtgtgtattccaagaaaaattgttttgttataaatggttttaggaagtagaaggaattctttattgagcacccgtataggctgtgaataactcaagcttgaccataataccttttgccatatcatgatataaattctttttaaactgacaactttttctatgaagaaattttataaaatgtattatttattttttatttttaaatagagatggggtttcaccatgttgcctaggctgctcttgaactcctgagctcaggcgatccacctgcctgggcctcctacagtgctggattacaggcatgatccaccacatccagcccagattttgttttctctagttgaaagaacttggatagttcctttccttaagatcccagaaatagcttttatttacttctgtgtcttgtgttaaaaagtactttggaatttttttttagttggtttcaatttgatcatttgtctagatagaaccttactctcttcttttctagaaccttattctcttcttttctagaaagtacttcattatataaggacctggtattttcatttagtaataacattagcaaattagtataggatgaaaatatacattatatacacatttggtgttatgcccccaccccaattaaagggggaaaacacccacagaaaacatttacatgagattactttgaaaactaattatacacatattccacatactactttatttttattttttccttttttaagacggagtcttgctctgttgcccaggctgtagtgcagtggcacaatctcagcttactgcagcctccgcctcccaggttcaagcaattctcctgcctcagcctcctgagtagctgggattacaggggtgtgccaccatgccctgctaatttgtgtatttttagtagagacagggtttcaccatgttggccaggctggtctcgaactcctgacctcgtgatccacccaccttggcttcccaaagtgctgggattacaggcgtgagccaccacgcccagccccatactaacttctaatttcttactttggtttaagaatctttgctgtaaatatttggatttagt

SEQ ID NO: 137071 - DNA, 1642 bp, Homo sapiens
aggaacatttttactgtgtaagttcttccttccccaaaatatgaaatttgaagtggttaattcaattttataaagttcttttatgggaaaggttgctatgttgtttaaaaagtacttcatatcatgatggagaataagaagccagatattaaaataaaagcttaataatatctaaggaatgtttccaaagtatattggtagtagtggtcatgattatttgtgcatgtgcgtgattgtttgtttttgctgaagttgttttgaactgcatagttttaatcagctaatcatcaaactatatggagtctgacatccagtctccttttcctcagaaattaagggaagttcctggtacttgtattgccacagtgttcctgtttatggatttaaatgacttgatgtcaactccaccttccatttaccttttagggatttctaggtgctccagggagaaggcttcagtcaaaaatagtctttgttgaaatgaaattgaaagtgaatttatgtgttacttgaaagtagctttggatttcatttggatctttgaaaaatcaatttaagatggtaatgctgggccggtccacttactacaggtattataattcctgtaatcccagcactttgggaggccgaagcaggcggatctcctgaggtcaggagttcgagaccagcttggccaacctggtgaaaccccgtctgtactgaaaatacaaaattagccaggcgtggtggcaggtgcctgtaatcccagttactccagaggctgaggcaggagaattgcttgagcccaggaggcggaggttgcagtgagcctagatggagccactgcactcccgcccaggcaacagagcaagactttgtctcaaaaaaaaaaaaaaaaagtaacactgatctttagtaatttagtactcaaccataattacacactctatatacatacagcagatctttttgcacaagcaattatgtttcaataaaatgaacaagtgtttatttaaaaaatttgtgacattttcttccagtcttactaggagcttcttaatgtagttgatccatttgcattatttttttcttatttcagaaataatttgaatttcctaatgggttcttggtggcccaatcttgaagatctttatgaagcaaatgttccagtgtataggtttattcagcgacctggagatttggtctggataaatgcaggcactgttcattgggttcaggctattggctggtgcaacaacattgcttggaatgttggtccacttacaggtattataaagaatatgctttaaaaaagttaatttataaaggattatatccaataggactgttccttttttcttgaaatataactcactaaaagttgtaagaagaatgactccttgcatagaattgtaattcgtagtacaacaaattaaattcaagttaacaaatagaaatctaagagcatagatgttagcaaataacaagtttatggctttaatatacatgaaggttataataataaattttagagtgcttggttttattttaaaaaaacccttatgagagaaaacaaagtagaaaaattattctttcacatttaaaaaaatctagtgtttcatatgaatagctctgtaatgtcaaaatctgtttgaattatgcc

SEQ ID NO: 137072 - DNA, 1216 bp, Homo sapiens
tcaaaagcagctgtacagatgatgctgttaatgagtgtttaggtagtgttgattaaaaaaaaaataatgtgccttcctgccttactagaatcatagaagttcatatctggaattcataccccttatttcacggatgaggaaattgactcccagagaggttaactgacttgcccaaattaagagccaaaattagcaactcacatttaagcagggagtcagtttttatgtactaagaccattatattttgatatccagatattacttttctcaactttaaatgttttaatattgtcttcatcaggcctgctgagcattgtcattttaaaatctgagaatatttgataaattgatgaaagaaaaattatgaagtcatagacattagaatcaagtctcttggcattatttctagttggtatatcttttatgctaaaaatattcaatattcagttgctggtcacaaataatttctcccccacaataggtattgtcttctaagaactctgaagcaatgtcagacattgagggaagctctcattgctgcaggaaaagagattatatggcatgggcggacaaaagaagaaccagctcattactgtagcatttgtgaagtaagtaattgtttttatccacagttgttttataaagcctcttccctctccactgttggtttctctttatttttaaaaaacttttttatacttttatgtaatccagtttatagtaattaacattggattcaattttgttgcttagccattatattaaaattcagtgtgataataatgatatttcactgtgaattaaccttaaaagtatctactgcagagtcatttttgtggtagatcttcaacagacaataatcagcaaatttagtctgagattttaaactaagaacaatctagatgtacacagatgccaataaactggatgtttggtgtaactctaggcagatcgattatcagtcctctctggtgcaattaacaatacatttgtcaatcttgtgtggccaaggcttgcaagaggtgcaggaacaaagatgtggtgcctcctatgaaggagcttaaattctacttggagcagacagattataaacaactaattgtaatgtacatgagactatgatgaatgtgaagttggacttcctgttaatgataacactgagggggaaaatgacctaattttttcttctagtattggcataagaactcacaaacg

SEQ ID NO: 137073 - DNA, 3834 bp, Homo sapiens
gagatatacctaatgctagatgatgagttagtgggtgcagcgcaccaccatggcacatgtatacatatgtaactaacctgcacaatgtgcacatgtaccctaaaacttaaagtataatttaaaaaaataataataataataaataaataaataaataaataaataaataaagtacctgtaaaaaaaaaaaagttattttaaggcctagactagaacctggcaatgggaatattaaagaagggaaagaattcaaaaatatttagagggtaaaatcagcgagacacctcattaaatggcagaagtggaaggacaagttgaagaatgctcaccaattttctagctcaggtcactaggtttgtattgctgcttgttgacagtaatggataacatggtgaactctaggattgtagttaactgttaaaagaagacatgggatcataagagttttctgtcattgaagaaatttaaggataagccaaagacaggatgttgatggtccatttcaaaccttgaaattctgtaattctagcatcaacctttatttgaaatgatagaatccattgattttttttttaaatgtcatatggcctgaccaaagtgagtcattaggagatcagatagattccagttaggtgtgttgttccttatcctacctgaaccctagcaactcatcaatctttctgtataagatagaggtattatttctaaaatcatgctgtactcatgaatacataaaaatgatcacttatgtctgattgtatactaatgttttagatttaaaaataggttgacctttatcaaacttttgaactgggctttgccagtggttgtcatgagtatgtcattccctttgattattcccctaaatatgcattactacccatgtctttggatttggtgcaaaataaacctggtctgttaaagattctcaaacacagccatgtttttcttaccacctactcttaaccagagatcactgtccacaatttcattcaagtagaattccatgattatactaaagcagtacagtaaataccactatctctattgaatacgtttttctcttgtataaaacaggtggaggtttttgatctgctttttgtcactaatgagagtaattcacgaaagacctacatagtacattgccaagattgtgcacgaaaaacaagcggaaacttggaaaactttgtggtgctagaacagtacaaaatggaggacctgatgcaagtctatgaccaatttacattagtaagtcaaatcaacatgtgagtacatagttagctgggttatgaagcagcagtgtttgctctgccacctgataagtaggaggtaatgaaatattttaaattttcctttggctcattatatattgcatgagggtatattcatatcattcccccctccatttccaagtatttattcctataaaattggcatatatcattttcagttttcctgggtgagaccagcctaaataattttacaacaattacatttaaaaatctttgcgtgctttagatagaacactatcatatcctttatgtcattttatctcagttgataaaatgtttgtgtacgtaggttattagagcccacaaaatgaatcagtaagtgtgcttttaaatatacttctgcttttagagctaattgtatttgtttaaaattttgtccttgccagaagtattaacctcatgggagtatttaatggagcttaacttcctggtatattatgtaaccttatgaaattcaagtatacttataaattgcacagtttttaatttcagacagcagatgcttgggggaagcattttactttcgcagatcaatagctttatgaatagaaacacagagataatttatgaattgttgattttctccagtacttgtctcccacacatatgtgatcagaaactaactttttgaaatttactttctgatattttcacttgaatggtcttcaagattgcttgaagaagaaaattatctgaaatatgttgaagaaaatatattacctagctgagatagattctgaaggcagtcactagtgaaattgtaatttgttaaattattttgcaagaagccccctttttttaagcaatcttaaaaaatggtaaacgtaataacattccaagagtttttgactaattggtgaagaagtatagaaaattgcaagtacactgagtaggataatggtcttagattcttaggaagattggctgaatgggagatagtaaggtaggctgtacttttatgttgcatagcaggctgttgaactttttgagagttatttcccctaacttcacaagcagactatatgtttgtagccatgagctattaacaatttgtatatcaaaataacctaccttacttttattttcaggctcctccattaccatccgcctcatcttgatattgttccatggacattaaatgagaccttttctgctattcaggaaataacccagttctgcaccactggtttttgtagctatctcgtaaggctgctggctgaaaactgtgtctatgcaaccttccaagtgcggagtgtcaaccaactggacgggagagagtactgctcctactccaggactctcacaaagctgatgagctgtacttcagaaaaaaataataatttccatgttttgtatatatctgacaaaactggcaacatcttacagactactgacttgaagacaacctcttttatatttctctatttctgggctgatgaatttgttttcatctgtcttttcccccttcagaattttccttggaaaaaaaatactagcctagctggtcatttctttgtaaggtagttagcaattttaagtctttctttggtcaacttttttttaatgtgaaaagttaggtaagacacttttttactgcttttatgtttttctgtcttgttttgagaccatgatggttacacttttggttcctaaataaaatttaaaaaattaacagccaagtcacaaaggtaatggattgcacatagactaaggaataaacttcagatttgtgatttttgtttctaatcttgatgtaaatttacactatttataaatacatatttattgcttgaaaatatttgtgaatggaatgctgttattttttccagatttacctgccattgaaattttaaggagttctgtaatttcaaacactactcctattacattttctatgtgtaaataaaactgcttagcattgtacagaaacttttattaaaattgtttaatgtttaaagagttttctattgtttgagttttaaaaaagactttatgtacagtgcccagtttttgttcatttttgaaatctgattatatatattttatatatacttatgtatgtatatataatatatatagaaatctggatatatatgtataaatctttagaacttaaatttttctcgttttaagtttcacatctatggtagatttttgaggtgtctactgtaaagtattgcttacaaaaagtatgattatttttaaagaaatatatatggtatgtatcctcaagacctaaaatgtcagactggtttattgttaagttgcaattactgcaatgacagaccaataaacaattgctgccaaaatgtagtataatagtagaaaacaaatagtgattgaacttaagattttaaagggactgttatatgggcttgacaaatcctgtacaatacttagtaccattttatatggaaaaggggattcaggatgaagggctctattttagaatgcaaataaattaagagacttattttttaatgttaggcagttttgaaatctcatgcttttttgcttgcatgacatgatttgggggaggagt

SEQ ID NO: 137074 - DNA, 1239 bp, Homo sapiens
accgtgcctggccgtatggatttttatttagccaatattaatttagcatcccctggaaaccaaatatgaataagatattatccctgccttctctccgtacacacatctaagatggaagatttgtgtaagtatgttatgcagaacctggaagaggtaaaagatgggtattttgggggtttgcattgcagcaggggttacatcatcacaccttacagagcaagatctgggaacttctagtagtttggcccaaagggtggtgtgttaaaagaaactggaaaggtaggaaggacccaaaatttctaagtttccttggctgagagatgtttagacttcaccctgtagttaatatggaaccagccactggatttaagccaaagaagaccattgaatttgcagtagtcttcctacctgttttaacagattccatctatcctctacattgctgccaggatagttctaaagcatagaaattcaggggaacagatgatttaggcttgaacttcggatatggtgaagattaagagcacaaatttgaaagaagtaaagtccacaaactcattagatgtttttcacatgtgtgagggtgcttctaactggaataggaaatagagaagtggagttctggaggcagaagataatgaacttcctgtaggacatctaatttgcttagagattagcagttggatatgctagcctggaattgggattggcctggaccagaagtatgtatctggctgttcgttgaggttgtgcttaaagccagtaagatcatacaggatcaagtgaagagaaaagtgaaccaaatacctgctaagaaacagcacatagagggcagacagactgcaaagaaggaagcttaaacaagccatggtggtggtagacaatctagatcttttgaaaaaataaccacagcatgctgcaatgaggattaaagggattccattgagtttccaacagttggtgacatttgccagagttccttcagtggagcgacaacctgattgtcatggatgggaaaaggtattgaatttgagagtgatgggtcaatttggtcttcccaggagcccaagatatgaaattatgttggcctttggtgatctcacccattttaaacattgtgtagcattatcctaaaatgctttacagagtaatagctttctaaatacaccttgaagcaacccatgtgatgttttacttacggttgaacaggaaaatgagaatggcattttttagtgtggc

SEQ ID NO: 137075 - DNA, 1012 bp, Homo sapiens
atatttgagggtggaagacatgagcagaagtgtattctgattgatgacaatcaggttcagtactgtccttggttttgggcatccactgggggtcttggaacgtatcctccacaaataaggggatactactgtactctgaagttttgtccaacaaatctaggtttattatatttcaacttatccattaattctgttatttattcatttttggataatttagtaagaatttttaatccttccccacaggctgggccccaggctaagtggtggtaaaagagatgaatcgatttatatgcttcctgcctttatggaactctcggcttcatagggagccagcaaaacaataacagatatgtgatcataaatcttgaagtaaagagaaagaaatcaggatggtctcaccatggcgctgatattttagctgatttctgaaggataaagatgagttacccatgcaaatgccaagggaaagtataccagatagaaatacaagtacatgaaattttctaaagagaaaaaatcttaaactgaaagtgtgttggaatactgtgatgtgctacctagatacacctttattgaatgacttattgtcccagctgctgggagtgctaagggcaggcagccttcagtgttaccaccttcaggggctccctcagctgcagagagccatattaccaaggttacctctttctcaagatagaccacatccagtgatggatttacatgggagtataaggcttggccatctcatttcaaaggaagataaccctgaaaggctatttctagccacactgctccatataggatcagtctattactgggccagtcctgcagctctgtttctctctgtgcccactcccttttcttctcctcccttcacataggttgctcccaagggcacttcctaataaacaccctgcaagttaaatgctatctcagagtctacttcttgggaaattcaaactacagcacctgctgtggccatagcagggtgcattaaggtaaactatga

SEQ ID NO: 137076 - DNA, 1004 bp, Homo sapiens
caggaagcaacaaaaatgctccaagccacaataaaatggtagattggttttttgtttgcttgtttgtttttctcttgtgtatatttccattttactgcaaaacataccaaataattgattgtagattttgtcacaaggaatcatgtatgctgtagaagtatagagattttccactttttttgtttgctgctggatctccagcacctaagaaaatatgtggcactttatttaatgtcactcagtcagtatctgttggataagtaaataaatccagaggttgtttaaaattacgtacatgggaatattgtcaaaatgtcaattcatgatccaaagaaaatgtgcaattgaaatctgatatcttcttttttcttccacagagcccctccccagaaggcaaaggatcacccagctgctggaaggtgtaggtaccctcaatggctcagtagccagtgtagatcctgtctttcgtaatcagcagctacatctggctactgggtctctgatggcatcttctagcttctgcttcagtgtcctgagagagattattgggcagtctttaataatgaaaactttaccttgaattacacacacacacacacacacacacacacacacacactcacacacacacacaaagagagagagagagagagagagacagagagagaggagagagtcaagttctagggtgttaagtccaacattatcagctggggcttgggaaccttcaaggttttatgaatgatgaggtctatttgctttcaatactacaagggggaggaatctggatatttatccatgttttacctcttacctgtttttgttttacctctttttttctctttcccccctatgaaaggtatcatttggatagatcaatctattcatctatctacctacctacctatctacccctacccatccacccatttatccatccacccatccatccatccatccacccacctgcccacgtacctaccagtttatctatccgaccttcc

SEQ ID NO: 137077 - DNA, 1029 bp, Homo sapiens
caccacactcggctaattttttgtatttttagtagagacggggtttcaccgtgttaaccaggatggtctcgagctcctgaccttgtgatccgcccaccttgtcctcccaaagtgctgggattacaggcgtaagccaccacgcgcagccccaatttgtagtattttatccctcacccgcctcccaccctttccccgaagtctccaaagtccattgtatcattctggcacctctaaaaccagacatgatttgttttcttgacttcggcttgagagttccaatttctaactctaatggactttaatcttagaaaatcaggggatataatcatatggtagtgcaaagagtatcaaattttgtctaaggatgacaatcaaagggagccctatttttttgttttgtttttcatcaaatcctcgaatttattccatccctaattccgtggtccttcatggcattcataggggcagctgtgaagaaaagtggtaatgtacctgacgactctctcctgtcggtgtcagggttgcatttactattactgatcccagtaataggatgagtttgatctctcagcatgaaaagaatgaccatattagggatttgtttgttctccagactacagaaagtttgataaccagagtaggacttactggagagataatgtcagaatgaatagagactgtctgtgagaaatttgaacgggctcagtgctgttacctactagctagaaatgggaagcaaggggatgaatgtgaggttgggggcattgagtcaagaagaagatcaggcaattctggagctaggtaaattgggatcattcctggcttgtcacatctacgtgggacatttagactatccacgggctggataccttaggaaagttccttctggctctgggactcactgctctttcagcattgccaatttacatctagtgtgttcttgttagaagtggaaggctcctcttcatttttgagctccttgcgccctgtcattttctctgtatgagagggttttgctattcctttttg

SEQ ID NO: 137078 - DNA, 1193 bp, Homo sapiens
gacattgcacgggtgagaacagacataaaatgtatatgtaattatatcgacaacatacagggcttagaaaggggcttgatagccttttataggtgtcgtccaggtttatcttacttgaaatactgcctgagactctatacctaattcttatcacatagcctttctattagtcaatgatagatttgggttgggttaaccctcatattcttttagcaagggacccacctgcagaaaagagttattattggttttgtcatttatagtttagttcaacaagaccggatttcctcaccgcctttggctgaaactgactgactaaatcagtttcacttgtggggtagagaaatgagtaatttgggaacatagagtgttgtgtggaggagagcttagtttgctcctcttcatcctccccttaggtaagaagtctgcattgagagagggagaaagatttgggacatcatggggaaactgacccccttgggtgagacacattgggaattaagagaaagatgtaaaaatggaccaggagaggatgtacagaagccccaggggagccagagaatttctggtcctaagctcaagtgtcagcctcagttctgcctagcatcttggacatgctgtccctgctggcttatctcctgtaagacaaggggcatactcctgacttactgagcatcccatctcagaggagctgggagtacaaggaattcaggaatggactttcaagacaacatctaacccgagtcttctgcagacatttctctactgaatctactttctaagtgtagattagtgtctaagagatagacattaagtttctttttctaccagcctctgacccccttgctttgaggaaaacacatgtgttgtccacgaagtggtgagttctgtttggtccttcctctaagattggtccggggcttgagccgttttgccccatgtgctctgggatttcccccggttgtccccccatataagtagacaacttgctgtctgtgttctaagaccttcatatttttccctttgacttgagtctgttctggaacaattgtgtggtggctgggcactgcaaaatgagtcagttcctgcagtttggttacaagttctcaaaaagtatttcagaatgtggatgtggtcagcagagtcattttccagacatctaaaaggaaacccacatcaactgtaacaattga

SEQ ID NO: 137079 - DNA, 1038 bp, Homo sapiens
acaagagaggactggagatgtggcactggacttcttaactgagtcagagggggtgtttgagtgatttactttattcatagtcaccctatacctcctacgatcaagagctggtggtatcaccactatggtcattagccggggctgtggttgaatgcttataacaggttctcctgggtgggagtgtaggaattccaggggtctgaactctcctcacaggcttcccaaggtgatctccatcagtaaatcagcccgactttttcatcttgaaaaattaagacataggaaataactctttccttaaccctaaggaagtttccttgaacagtgggaaaaacgtttttgtagacattccttagaccccttacccagcaggaggtgtggaatcaataaagagggcatgggtcacctccaaggttgtgagctccctggcttgggaactacactgggacacagcagagcctcttggcagaaatcaggcagcccatggagcttcagctgcatgactctttgaattcacaaaaggatacctttaacagtacttctcaaaaaatgtatataaggcatgtctcaagtccctatatgtttctagggataaaaaaattcatttcaaactgatggcaacctccccattctattccccagctttctatccttcttcctgcttaatttttcttcttagcacttgcctctgtctgacatattgtatgtcttacttatttattcatttgacattttaattagacactagcagtattgttttctttgaatacatttaaaggtcctagatttatttctttttgatgctcatcttctaactcattccctcctatcaatctcagactgctgtaaataaatgattttttgccttttttttttttttttactattagttatcatatttatttttcttaaacaagctgtactggttatacagtctgaatttggagaatagacgtcttcattcaggaggggaaattgagccaagtttgaatataatcattgggtaacaaatccagaagattaagttactaaggagaa

SEQ ID NO: 137080 - DNA, 1041 bp, Homo sapiens
agaaacaggttggaacagtaaatgctagaaagtatatcccagaagaattaactgagaacttcatgttttcaattctatttgccgttctctgttctcaatttgttaatttttaaaagtacatcgaaagtgagtagcattgcttgctctgaattctcctctggggtcattgagagtattcacattttcgtataccctgttaaaagatattaatgccatgcatatgcctttgtctttgtgggtgtgtaaaacaacaaactgaagggatctggtcaagagacagacctcaaaataatttctctgaaatagtgtttgaatttgcatgttcgggaacgtaaatgctttccctttgggcttgtttcttaagtttttggtgtagtatacagttttacccaattaaatttttcttttgaggtctgtatatgtatgggtgtctatatttgatttgaagggggagttttaatcattagtgaaacaagtggctgtttgttagaacccagataagcctcatagtgttgttcctatgacaactgagtagttgggtgttgaaatgtagctttaagttcttggtttggaaatgtcattcagacctcccactatagtctcattgagtaggaggataatgagaaggggaaaaaccatgaagcaacataagtatctccgttcgtttcatgtcttcctgacttgtctttgtgtacaggatcgccatgggagtggtaaacataggtcttgaacaaagcaatacttcaattaaaaaaatacatggaaagggtcagaaaagttggggaagataaataacaacacatgggggcaataaagaggcaagagaaataggcttccatgggtttctgcaaatcctttatccagtgctgaccagcagtgagaacatcttgaaccagttattgtatagctcttcaagagctgtgaatttccttaaaatgcaatgtggagaaaattcctttggtagcaggatggtttaccactttggcataacgtttattcatctcccccaggcagactacagaggatactgtgttcttttaa

SEQ ID NO: 137081 - DNA, 1069 bp, Homo sapiens
atgtcacggccctgtggagcgaataaacagtggatcttgggtatttttttctgagtctgtacccatctcttcatgcctctgactaggggcccttgttaatgtcaagggcagtgctctgtccccaacagagctgtagtgttgcccccagtctctgacccactcaccttctttcctggctgatgacacttccaatgtcctgacacatctgggcaaagtggaattggagttcttaaatgccctctctggctggccccagctcgattctgcactggccttagcaggctccaggaagtttggagaggaaagacccaaacagatctcagatgtaaaactggatgagtatttcaactgctgaaactttaggaggaaaatatggatgggctacgtgtttgtcaacattagtaaaatagttactagtgattctttttttaaaaagttatggaatcatatttttctcattcagaagtgttacttagggaatgactgaaatgtgtatgactccagagttctctgtcagacactgttctcagcacttaacatagaatcattttttaatccaggtgccacagctaggaacagcagaaccagaagtcaaatcccagcaagtctgactccagaagctagactcctcagagatgtcataggtccttttagatgccagagttttagatgttccattttattcacattctattttcatagcctgtgtttatttccactgaaagccatataattatagactttatgttctgtatcttagcaaggtaactgtctttaagccaataaaacttaatacattactactgaagtatgaataagttttaataactgagaaatacatacacatggttaaagtagaattcaaaagtgtaatttggaagtgctctcgaaatagtttcgtgtgattttaatttctgaaaattaattctgtatgtaaattgaatgtagtgtttattccagtaaaaccctgcaggaagtctttttataaagtgaataatcaactcctgaattaactgttatacatggtttcagtgtgtataccttttctgtgctctcatctaccaatctg

SEQ ID NO: 137082 - DNA, 1094 bp, Homo sapiens
cctgggcccaactgatcttcccatctcagcttcccaagtaactgagactacaggcgcacaccactgtgcctggctaatttttttattttattttattttattttattttattttgtagagatgaggtctcactatgttgcccaggctgttctccaactcctgggcttaagcaatcctctcacctcggcttcccaaagtgttgggattataggcgtgagccactgcactcggccacaagattgttttttgtttctctcctgaggaactgtaaggttagtactgaaggtgacagctcacccttagagagctgatggtggtagcagacatattgaggcagcagtctctgttccttgcttgtattttttcgcttattcccattcttcagatgaagtgaaagccttagagaaatgaagggactcttctatgtccccacaggtaatagcctcagagacagtattacaacccaggctgtttgtctttaccctgacttgtaactttggtttctgggagcctgacacagttggatcgtttggtattttagaacttacccaagacaggagtggcggtggacaggaagctccatgctggagctccaaaccagccttgaactgaactgttgaatcaggtctgtgtgcatcttcaaactgggctgcgacatggaggggaacagaatggagccttcccccatcactcatttgtaatcccaaccaccctctcttcattttgctggcttttcccccattatgttaccatctgtctccaaaacattgcctgggtaaagacaaactggagcagttgctcgccctcaaacaaaacacagaactacttctcctcactcccattcccccccacactagtgccgagcaccatatttgaggaattccatatttataaagcttgcctgcacctcgatgatgtctgcttgctgtcctttttattattcttcaaatatgttatgtgctgactggaaacgattagcttttgttactgaggggtttgtgggatgcttgaaacagcttcatatagttctcagatggaaatgcatgctgtttgctcctttaagaaatgcaatttcttaatgaaagacagcatag

SEQ ID NO: 137083 - DNA, 1035 bp, Homo sapiens
cagacaatgtattttagctcatttgtgtagtaaaacatgtaacagaatctcagtagagttcaaatatgccctcttgacttcctaatgcatagactccgttaaaatagtattttagttgtccaagccttccgccttagccattttacacctggtaataactatgtaaattcagaaaaacagattttatatgttttgatccatctttttcttaatattactcttagtgaagatctgcttatttcaccctaaggcaattcaaaagttctgtatgacaactttattctcactgccaactattaggaaaggaatgcccacttttccctgagggcgtgttgttgcatgcagcattcccattggaatgctcttgagaggttgaactcattctctgagcaattgtttttatacattcagtattttgcttccagtgctcatggccagatagtgtataacctggtctctacccagtattatccatgctgttttcacacttacctccaagggccaaagattatctcacagaagctccgaaagaattcctgtttctgaaattcatgtgtaaaaggaaatttttaaagggaagagggtgataattgagttcaaagtctgaagaatttttgtcaaggattatattgattaataacagaagctctctggcattttcaggcagacatgtgaaaaaaagtagtgattgtaattaatttttagtgagtgccgcatatttgataattgctctgattcacgctattatattcctcttccttcacccacagcaaaataagcttaatttgattcatacccttaggaagaaaaaaaaaagcctaagattactcacatggctgtgattcagctcttggctcccaccacctcctccgcctcctcatcctccctttctcccaccctgcccactcccatgttcactcccacccagtggtgttgccatcaaaaaactgagtcagtttgttctttaaaatgggtggggaaagaagacaactaataaaaacttttctgagcgaagtatactgcttagagctgaaa

SEQ ID NO: 137084 - DNA, 1023 bp, Homo sapiens
tacctttaccatctgatgaaacaaaaacttgcttcttgactctacagctaaaactaaattgggagtatttttttctcattaacctttttattaaaatgcaagttctttttcaaagatgagagttatacatagtaagtcgaagatttctgaaatccttttagtccagcttagaagaggaccaagaagataatgcttatgtaaatctgaatccagcagatactctctccactaaattaagagatacttctctcatgaagagctttgttgtgcagattttgcagtgccacgttttcgattttgaatgttgcatatgcttataaatcccgtagaagtgattcttgtgataatagtttaaaaaacttagtgaaaatcaagagaacaggcttctatgaaaatccgaagtgaagttgtgcatgcctcccttagtagctaatggccaaatggttaaaggtgttaccagggtggtgaatgatattcaaagacctgttgttcaggaggggtggggagcaggaagctctgttggtgtaagtggagaatggaatgttttagggagccgggttttgtcatttccaggagcagggcgggcagcacggtgggaaggtctggctccagcttgagcccactcacaggatgtcagggggaagtgtgactaaggtcacggccacgccacgtggtgggccagctggatccagagcaggggccgttgtggccacacatcctgagtttccatggtctaatgcagtgggcttgaaaaaaaagggtggatgcaggatgctggctgggactgtggagtgcgtgggcagtaagtcttaagtgacagtgggtggagattacagcatttcatctgcttttcctttgacaccttttaaagatacaacccacagttttcaagggtttatgccaatgtctgctagagggatcttgcagtagatcttaaaccctatagtattcttaagagcacaaggaaattcttatttgggttccatttacaacaaaggtggaaatttaaaactaggctgagaa

SEQ ID NO: 137085 - DNA, 1508 bp, Homo sapiens
aatttctctgtaagcactattttagctgtatcacacagattttgatatattgtggttttgtttttgtttttgtttttttttttttttgagacagagtctcactctgtcacccaggctggagtgtagtggtgcaatcttggatctctgcaacatctgcttcccgggttcaagtgattctcctgcctcagcctcccgagtagctgggattacaggcacctgccaccacgcccagataatttttgtatttttagtagagacagcatttcactatgttggctaggctggtctgaaactcctgacctcaagtgatctgcccacctcagcctcccaaagtgctgggattacaggcgtgagccactgcacccggccgatatattgtatttgcattttgttcaactcaatgtatttttttcacttgagactttcccttcactgaaaaattatttagaagtgtgttgtatcatttccatgtattgggaaattttccttttctttctgttgttgattgctagtttaattttatcatggccagatgacatactgtgtattattttaattcttttaaatttattaaaggtttattctttagagtatggtctatctcagtgaatgtacctttttggcaccagggactggtttcatggaagacaatttttccatggattggtatgggggtgggaggggtgagggggtggggggatggtttcgagatgaaactgttccacctcagatcatcaggcattagattctcataaggagtgcacaacctagattcctcgtgtgtgcagttcacaatagggtttccactcctatgagaatctaatgcgtctgttgatctgacaaaaggcaaagctcaggtggtaatgttcactcgcctgctgctcacctactgcggtgcagcccgttctggtactggtccatggcctgggggttggggatccctgggttagagtattttataaatattaaatttaattgattgatggtgttttctgtctatttctatatattactgagagaagagtgttgaagtttccaacgacaactgtagatttacctgtttctcctttgtattctgtcagtttttggtttgtgtattttgaaggtcatttgttgggtagatacgcatttagaattgtcatgtccacttggcaaattgatacttttattattattatgtgatgttcttctttgtccctggcaattgtctttgtcttcaagtctgcattgtctaaatatagacactctacttttcttttcaacagcttgcatgttacaccttttttcatccttctgctcttaacttacctgcctatattatatttcaagtgagttttggttggacagcatgtagttggttcatatttatttattcattctcacagtctctgcctttaattcttgtgtttagaccatttcagtttaatgtaatagttgatatgtttggatttatgccttctgtttattccatttttgttcctatttctcctattctgtgtttttttttt

SEQ ID NO: 137086 - DNA, 1020 bp, Homo sapiens
agataagtttgaaggccaacacaggccatagtttccaggatcatttttcatttcttatttgtgattgacagaaaccatagactagggtctttcaaaagaaagaatggtgcccatttgcctatttattgtttggataaagaaatgaatttgactgtgtgacctgttactaaataagtttaagagaaatgatggccaagcaaaatatgcggaataaatttttaatctgaaggtaactccctaaatcccaggtattaccttctcacgagagaagaaagtggctggaaagagttgtgaagagttgcattcctttttttaatggagatatggtcactgtttagaccacaagcaaacagaagaagcccagcagcatttcttgggtatagttactcatcttctcaaatgttgcaaaataccgaagggaagggaaaaccagaagttggttggggtgggtgggcttggtggtttaaaaaatatggtgactaactgacttgtgctgactaatattggtgaactcataatgagtaacaatagtgaatttaggaggaatataagtagaaggagagctatttaaaggttgctttaatacaaaaggcagctgaagcggtcacaataaggattcccttagggaaattcggaagtaactccgtttacccttacaaagttcttgtttcctttagaattcttacaagtatggcttcttttccactggcctcctggggggagttcttggcagatgagcttgctcgttgttttgcattgaagaaataccatagatgtccagtaagcaagagcaaccagttgattaaaacaaggttggcagtaatgtctgtgaactgaaaccataaaaggtttgtttgactttttcttcttaggggtttttttttttttcttatcatggtataaaaaagtacaagaactgaccaaccatctttttcgtaaacatagatgctatctttttaaaatgaaagatcataacattatttataaatagagcaaacatacaaccaatcaaaatgtaca

SEQ ID NO: 137087 - DNA, 1056 bp, Homo sapiens
ttgccactttgctctttcaacttaagagttattgtttctacaaatgttgtctccttagagaaacttctacgtttcagaggaacggatgatggattagtgtttacagtaatgagagagtaaagagaggtttggtagagggggaaccggtgcgggaaccattcaaaaagtagccgtagctagtaatgcttgtatactccctctacgcatgaatgattcattttgccgctttgttataatagccacagtgttcagtctctaaggctgtcttgtgatatatccttcttttgctaaaaggctacatatcagcagcctcgtttgatttagaagccgattcagcataccacacataccatttgagaagaatgccaggacccttcctgctatgaaaatgtcatgcatgcttaaaatgacaaggtttggctcaagcaatggtttcaagtgcttcttaattatcctttttgaatcttcaaagcaatttaattttagggttttcattttcagttaagatataagtcacccaaatatttgctttatttttaaatatcaaaatgctgacttggcgatttagagtatccaaaatgtagcatgaaggtggtaccttttaaactgtggcaaaaaacatatcataaaatttcccaccttaagcatttttaagtgtacagtatagtagtgttaatatattcacggtgttgcgcaacagatctctggaactttttcatcttgcaaaaccgaaagtatattgaacaactccccattttcctctcccctgcagcccctgacaaccaccattgtactttctgttaagagtttgaatactttagataccccatataaagggaatcatgcagcagttgtctttctgtgtctggcttatttcatgtaactttatgtccaacaggttcatccatgttatagcagatgacaagatttccttatttttaaggccgaatagtattccattatgtacatataccacattttgtttacccattcatctgtgaaggcagtttgtctttttgtaaagagtggtctcacgaaagcttttcttgggaggta

SEQ ID NO: 137088 - DNA, 1035 bp, Homo sapiens
tctgtgcctgtgtttataaataaaattgaaacacagccacgtccatttatttacctaattgtctatggctactttcatgacgtcaatgtcagagtgacagagatcactatatggcctgcacagcttaaacctttactctctggcccttatggaataactttagcgccctggtatcaataataaagggtaactttttgtatttgtgtgaaattgagaaaagtatctgaagaatcttgattttttttaaagagaaaaaaacagtcagtctaacatttaatagattgttatcttcttccagattacatcaatcttccagattgccttagggccctaatcacaggtcaaattaattttgccccttcaaccaatccttttcaaagtactgaagataatactgtcatcagatgctgacattactacacaaatgcagtatttcatcagtgaattgtgtgtttttatatatcatgttgatgcatgccacttccctcatacagcgcagtgtgtatttttcactggaaccttccaaccttaggctcttccttccctggggtgccgccttgtggtgggctgtgagcccttcatgggcaaactgcatggtttggtcatcgaggaccgtgaatctgctatggagtgactcatgccaaaccctgccaagagcaagctgtcccatcatatacctaagaggtcatgaatcattagactggaacaacctgctggtgaatacaacgtggaaaaaattcctcattctactgattatcaacctcccccgtgccttctctatatatgggcttaagaggaaacttttaaaaaagaataaagaaatgactcattagggctttttggggatagtcttaattatattttagctaatgcagtatttttcatactttgctgtatatggttatatatatgctttaaaataataggtacacatacatatctctatatgtatccatgtgcacacatggatgtgtatgattaatcttgattctggtaagcctcattattgaaggagtttaagagaagaggctgtga

SEQ ID NO: 137089 - DNA, 1028 bp, Homo sapiens
ccccacactccatctgtcctaaactattttccattcctagaacattccttgagttctttcctgcatctatgcttttgcacatgctgtttcttctatttctgatgttcatgcctgtctacctggcaagttactagttttcctttaaaagccagctgaaaagtggcctctttgagccttccttttctttaagtagatcttgttattcatctctcatttagtgtggttggaggaagtgattcataattgcaggcagtaatgcatattaattattatacccccagcaactactggggcactacttgaaaacaaatgatatttaataaatgttcatggaatgaatgaactcatggagaacccatctgtgctcagattttgttgcttaacagctcatcacaatatcggtctacttagtggttttaaacaaccaccatttatttagttcttgattctgtgggttggcaatttgggcaggactcagctggatggttctttcaatctgggcaggtcttctgaccttggccaccttcacttgtgtctgtgatctgctgtgtgagttggaggctgtctcttctaggatggcctcagctcctctctgctcgacattgtggtctttaatctgtaaccaggctagcctgagcttgttcacactatggctggccaggttctaattgagagtgcagaggcaaccaaggcctcttgaggcctagacttgcaactggcacaagattatttcctctgaatttgttagccaaggcaagtcactttaaagccagccctgattcaggaggtgaggaagtaggttctatctcttgatggaaggagctatttatataatcacattgcaaggaacatggatagagagaagagaataattgaagcctttttgcaagcaatctactacacttatttgggagcaggaatggagattagagcaggttgggccaaggaggtttattccacttagatcagcagcggggtgcacagttgtggccctcactcatgggtttaattgcacctaacatgagccc

SEQ ID NO: 137090 - DNA, 1035 bp, Homo sapiens
gatggatgtgaggtggtccttgtggttttaatttatatttcccggtgagtaatgatgttgagtactatttcatatacttaatggcactgggatatatccttttgtgaagtgccttttcaaatcttttgcccatttttgagttgggttgttttttggttggttggtttttcttgtaaaagttcttttatatcctgcatatgagtcctttgccaaatacatatgttacaaatattttctcccagtctggtttgccttttcactgtctaaatggaatcttttgataacttggaagtctagtgatcaatttttgccttttaaaatggctattgttttttgtgttctgtttatgaaatttttgcctactttggggttattttttaaaaaccttgtttttagtaactgaaaacatatggagacaatctgtttggaagatatagtaaattaactataagcatatttcaaatatgtgccttgagtgtggaagttggtgatatacaccttttctgcagcaggtggcagaaaagggatttgaagcaagtatgtttatatgtttatatgggcatagatgctattactcaagtggcctccactcggggcccctctagattgggaagaaccatagggaagagctcagtgataactcttctgtaggaaagaatgtggcaaaatatatgggtatctatactttctctatttgtaatccatgcttgccaaatgattctccccctcccctcttctatccccaaggacagtcactgctgttcagtgctgcagctttccttagcccctcaagatcctgccattcattagctttttctcttcatctttttcttgaaaggtctgcattttctgtcactttgatgtcttaaaatgtcccctcccactgccccatgttcttcagacccttcagacccctcaacccccacatctttatagcctgttcccactactatccctcaactcaggctgcaggtatgtatttgttaattgcctcctggacatctccctctggatgtcccacaggtgcctttcata

SEQ ID NO: 137091 - DNA, 1181 bp, Homo sapiens
tgagcacaggggactttactgatggtacacgacaaggtggggctccctaggtccctccctcttcaagtggtctgcatggaaactgtgaggaggggagtgtggtgggggactgagtgtggcaggaactccccagcagtgagggtctctctcttcctcttgtgctctcgctggagttggtggtccaggagtcccactccttggaggccatgtgggccatgaggtccaccaccctgttgctgtagccaaattcattgtcataccaggaaatgagcttgacaaagtggtcgttgagggcaatgccagccccagcattgaaggtggaggagggggtgtcactgttgaaatcggaggagaccacctggtgctcagtttagcccaggatgcccttgaggggggccttcaacgcctgcttcaccaccttcttgatgttgtcatatttggcagggttttccagacagcaggtcaggtccaccactgacacattggcagtgggggcatggaaggccatgccagtgagcttcccgttcagctcagggatgacctttcccacagccttggcagcgtcagtagaggcaggaatgatgttctggagagccccgtggccgtcatgccacagtttcccagaggggccatccgcagtcttctgggtggcagtgatggcgtggactgtggtcatgagtccttccacgataccaaagttgtcatggatgaccttggccaggggcgctaagtagttggtggtgcaggaggcattgctgacgatcttgaggttgttgtcatacttctcatggttcatgcccatcacaaacatgggggcatcagcagagggggcagagatgatgacccttttggctcccccctgcaaatgagccccagccttctacatggtggtgaagacgccagtggactccacgacgtactcagcaccagcatcgccccacttgattttagagggatcttgctcctgaaagatggtgatgggatttccatttgatgacaaatttcccgttctcagccttgatggtgccatggaatttgccatgggtggaatcatactggaacatgtagaccatgtagttgaggtcaatgaaggggtcattgatggcaacaatatccactttaacagagttaaacgcaaccctgctgaccaggcgcctaatacgaccaaatccgttgactcc

SEQ ID NO: 137092 - DNA, 1055 bp, Homo sapiens
ctggccagtttttgtttttaaatcagtgcaagggccctcccctcagagattcagattcagtagcttcaggtgggacctggaatccatgctttgtttggaacctcaggagtgttcttgatgtgcagccaggattgacaagagcctttagtctagagctcgcagcagacctctagactatttggaatctgattttaaagaatggcccagcagatgaaggtgtttttttaaattgttagtcatgtgaaacgaactgagtattgatcagtaatacagacagggcagctgtgagagagtttgatgctaatctttgcagaactcaagaacatactccataaagtacagctgaaaagatcacgaaaaccttggagccttcgaggaaagagaagggtgacttggggtatgtatggggagaactaaaaacctgtcatcttggttcccacttgtggggaataaagggaaggtattgtcttaactgagctgctaactaatcaagcatgaaggtttctgggaagctgttttgttttttttttttaatttcacctggaattaaattaatagtcccctctggagtcagattttcttttccttcacctatcctcatgcctgagtccacactggattcctcagaataagggtgggcccatttactgctggagcaaagtagaaggttgtggtcctttgctatcacatggtgatggtggtggtttccgtagcaggtaattaaggagatgcacacttttgtatagccctgacagagagaagatgaaagctgctattccttttagtacactttttgagaactaccagaaacctgaactttctctcctagggaagaaaatttggaatttaaataaggccacatttcttcctaggacacaatcacaggaagggcatatggatccgagcatccagggtggttactggggtgatcagacaaataagcattgatgcctggaaggcagaaatcacactgcgacatcaaatgtttcatcaagcaaacagcaaggatctcttcaggctgtgttctctagacccgaaaatgtcctctgtggttt

SEQ ID NO: 137093 - DNA, 1052 bp, Homo sapiens
ctgcgagctctagactaaaggctcttgtcaatcctggctgcacatcaagaacactcctgaggttccaaacaaagcatggattccaggtcccacctgaagctactgaatctgaatctctgaggggagggcccttgcactgatttaaaaacaaaaactggccagatgatcctaattcacagccagggttgagaacctctgctctagaacatcggactcggctgaactgtcgtccccaccaacccagaacaaatacgtgtataagatggacttgggtttactctcttggaagaactttgtttatttggatgtaccattacttagcagtttcaatctgatcttatgccagactggcagcagatagttggccttgtgttgaatgatgcctgacatggcataggcaaaattcttctagatgtggaaccacttgacgaatggattcacattcccaggacccctggtaaggtcagggttattctccacatcttacaaacaaaaattaggaccaaaggtcaaaaattaggaccaaagtgccttactttgattcaccaaatatttgtaatcaaataaggacttagaacactggaaagcagttctgattccaaatggctgacagctcggggttagtgacaaaggcaagaaagggagaccagcctgcatttccagcttcctaacacacaaagaaaggccggggtagggttactgggcaaatgctgcaactagattctgggccctctcttccctgggtaggacttctgggtgggcctcctgccctatacaaaccatccccaacccaccttgtttacattggaactacactgtcgtagacagcaattcagggaagaggacaagccataattaggatttcctccctgtttcccctgtcatctccacacaggaaaaccctgatgggaagcccacccctctagttttggtcttggcaatctacatttccttgtatgtgagtagatcagaatcaaatgtttgcagtgaagactacaagaccctttggggataaacacaacactctatgaattgaactaagactaggaagg

SEQ ID NO: 137094 - DNA, 1064 bp, Homo sapiens
tatgcatctctgtctgtgctgtggcactttggagggttacaaaccatcataatatctgagtggttttttttttttaacctacaagaaccaatttttatacccatgagggtgatactgcctccattgagaaaacgtggttcagtgcagtgatttttcaactgagggcaattttgccgcccaggggacatttatttggcagtatctggagatgtttttagttggccacaaccagaggaaggggtcaaaacctcagcttcttggtgggtggggttgctactagtatcttgtgggtgaaagccggagactctgttaaacatcttacagtgagtgcaccatgcgggtcaccacaacagagaattatctgacccaaaatgtcaatgctgccgagtttacgaaaccctgctccaacatgatggtaagattcaaatgcactctaagtaacccagaaattattaaggaaggtgaaggtggaccatgtcaattcaaaaggctacaagctaaagagaatagcagaagttgggttgccgactttcaggttgatcctatgtacaacatggtgtgcttgtctggaaaaaaaggccatctttgtcttcttaagtattgttgctgtttttcaataatatcatgctttttgttctttctgtcaaatatgtgtaaaaatatgtgtaaacactttaaatatgtgtaacatatttaagcaacaatttcttttttctatttttggtatctttataaacaaatgaatttctgaaaaaattatgtaaatttgttttctatgaggtgtatttcatcctctgattttattacattatattttgaggggctcatcctcattcctgatcaatcctcatttgacctggctcttgacattgttgccttaaatttaaatttagtggcctctcagcctctctgggttttagaggatggggacagtttaagagaagatatggattcatattgaaagtgaaaaatattctctggtggacatggtccagatcatttgcccagagctcctggctctcctgttgtccctgtcacactcacgttcccttcttctgctgccc

SEQ ID NO: 137095 - DNA, 1012 bp, Homo sapiens
gttcagtagtaataggaaacttttttttcttttttttctttttctttttttttttttttcttttgagaaaaggttgccttctgtcgcccagactggagtgcagaggcgtgatcatggctcactgcagcctcgacctcccaggctcaagcgatcctctcacctcagcctccctagtagctgggccacaggcccacgccaccacatccggctaattttttgtatttttggtagagatggggttttaccatgtttcccaggctggtctcaaactcctgggttcaagcgatctgcttgccttggcctcctgcagtgctgggattacaggtgtgagccactgcgcccgacccagcaataggaaagtttcaaaaatattcaggaagttggatatgctaggcttgcctaccttaactttttgttctagcagggttttttttttcccctgcctcttttttttccattgattttttttggggggatgttttaacaggtgttgtagctgtccttttctgtggaatcacacaagctcattacacctacaacaatctgtcggtggaatcaagaagtcgaaccaagcaggtgagagagaggcttggtactcacgagttgcttgttaacacagggaagggggaactgcagggttacagcttccttttcccttctctgtgcagctctttgaggtgttacatttcctggcagagaacttcatcttctcctacatgggcctggcactgtttaccttccagaagcacgttttcagccccattttcatcatcggagcttttgtatccttttcttgttccaccattttctacatgcagagacgaccactgttggagaagctatagtaataatagtcataataataatataaaataacaataatataataatataaaccatcataaaataataattactatttctgttttgggtaggtgactaactccatgctagttcacagggtttttatgatgaaaaaaagaaggcttaagtggcatttcataacactaaa

SEQ ID NO: 137096 - DNA, 1026 bp, Homo sapiens
gtgtctgggatgcagaccagaggacgcctgcagccctttgtctggtcatgcttcatggtagctgcctgatctaggctgggttcttcttcctgcaccctgtttttttctgatgttgctcagctgacatgctggggctctcctgccttttaaaaaaattttaggtaaagtattcctggcccttgtttgatcagagtgttgggagatttttgtctgtttttgttaaatagttctgattgtcaaatgagaatggcttatgccttgaggaggcagaactgtgtcttaggatcccaagaacaggcagaatttcctccgtcaaaatatcccacaggcctaatgacttgtaagaagtaaatccttccaagacaacatggtaaaacaagtaaatccgtgtgtgtgtgtgtgtgtgtgtgtgtgtttatatttttaaggtaaccaatgaatgtgcagaagcattgaaaggattgcagttttgccactttctgaataatttctagctgtgatattgatatgtgtttcttcttgtataaacttggccatcttaaatggaactatctgtttctcatttctccacatccatctctattgtccctctttcccaggcttcagacattaatctagatgaatataaggagacgcttcaggttccatgagcagatatttaggactctgttttctgatatcaaattaagcagaaagctcatgacatagcaccttcacactttatttgttttaaacttctatctgtgatgatcttctgaggtaccaccagaactggaagtgacgtgctgtatcactgagtaaaatggtttgggttaaatctgtaaaaatgattggtctactcacacacacacgcacaacatatacacacacttaatgtgatttaatgtaatcatccagagcagttttgtctgaaaatttactaagtccttgcttacttgctcagtacctggctgtatagaagataacttaaaaccatgatgtctaaggttaaataacaccatataggagtaacttcagttgttactt

SEQ ID NO: 137097 - DNA, 1044 bp, Homo sapiens
tacatctctgctgtggtgttttgtgttgccatattttaaccacaagggggcagcatcaccaccttcgctgtctcccttccatctttaatatgagcgcattgggcccagggtagagaagaaaaggttttacaactttaaaaagcaatattcgtcatctggtgatgattgtaaatatgatagtgatgattactggaagagagttgaagaatgtttcctctaattgaggaatttgtctacaaatataaaccctctcttgttagagtagtattcatgaggacctttgctagtatgcttcagtctttccattagctctgctaataatgaggttagaaaagtcaagaaacaatgagttacatgaagcaggttctgatttttaggagaaagatagtctgtaaatgacttgttttggcttcctgatgacaatttaagttaaatcatgttccaaatagctgcctccagatgctgcagatcatcctgtattatgatgagtgttgaagggctagagtcgtctttgccatgtaaaacttcgtcagaaaataactgtctaaccagggagtgaaataagactaaaaagcatcacagagttccatctagagtggagagagagccccccagagccctgaacagctccactgccaccaatctcattaccatcacacctgcaaaggggccactgctgccacagctggccccagtcaccattactgtgaccgcaaacatgagcagtgaggctgagacacttggcatgacaccatgggcagaggcagagggagtggcagcctgcaaacaggacaagaaggttatcccagtgaaagtttgggaacagtaagatggttcagtgtaagaaatatatatggtttcgtccacaggaatgacactgggtgagatgtatttgtatgccagattgtcataaagaagaataacccccaggaaacaccctggcagtacaggggatggagaagctgtggagttcgatgttgaaggagaaaacggtacacaggcagcaaagattgcaggccctggtggagttccagtgccaggcag

SEQ ID NO: 137098 - DNA, 1002 bp, Homo sapiens
ttctctttttttccttttgagacagggtctcactctgtcatccaggctgtagtgcagtgacccaatcatgattcactgcagcctcaaactcctgggctcaagtgatcctcctacctcggtctcccgagtagatggaactataggtgcatgccactgcactcagttgattttttaatttttttgtagagacaacatctcactgtgttgcccaggctaggctcaaactcctgagctcaagcaatcctcctgcctaattttttaaattttttgtatagatgtagggtctccctatgttgcccagctggtctcaaactcctggactcaagtgatcctcccacctcagccttccaaagtgctggaattacaggcgtgagccaccacacccagccaagatcttcttaattggaggtgtgattttaagttttttcccctgggaggtatgatgcttccaggaaagcttgataaagctcttgtacttgtagcctctctctcctgcagtcaattctctgtactgctatggtatcttctaaaagtcagtcctgattgtacccctttttagtccagaagtctatgtggcctctgtttcctgtgtgataaagtcttatctcatgagcttggcttaaagggatggctggccatcttccttgtgccaacctccctgcttgacatttggtctccacccttcccctttctcccctgtgtgggctagctccagccatgccactgtatctaatgtgcactttcctacctcatgctaagggctttctctgaaatatacttcacgcctcctctttcctctgtacaagtctgactcatcttgaaaggcccaactgtgaagtcaccttttctgtgaagttttcctcaacaactttttcatctgaaagacttattcattctgttgtctgctatgtcgcctttttatgcctctgttttgtggtggttgttacagcctggttggctttattgtcagtagtgtgttggcaggtaggacaggtgtgtgtt

SEQ ID NO: 137099 - DNA, 1058 bp, Homo sapiens
tcttgtgctcaagcagtcctctcacctcagcctcccaagtagctggcactaaaggtacatgtcggccgggcgcagtggctcacgcctgtaatcccagcactttgggaggctgagggcgggtggatcgcttgaggtcaggagtttgagaccagcctggccaacatggtgaaaccccttctctactaaaaatacaaggattagctgggcatggtggcgtgcacctgtagtcccagctacttgggaggctgagacaggagaattacttgaactcgagaggtggaggtcgcggtgagctgagatcgtgccactgcactccagcctggacgacagaaagagactcttgtctcaaacaaacaaataaataaaggcacatgtcaccacacctggctcaatctctcctctttttatggttaatatctcttttgattcttttgcttagatgctgtcactctgatattaaggagaaggccagtttattgcatttgagtttgagctttaactaggttatttagtctcacacagaaaaattctgttttgtggccacattttgcccatgtagtcaggcagctgccatgaatatgtgaaccttgggctccctttcctgagagggcagccaagtagaccttggcataaatacagaattgagaggatgctggctagtgacgcgggctttttggtaggggctgcctggccaccttgcctcaagtgatctcctactgtcactgtggatgtcacatgcctcctggctgtgccacttactagtcagatccttaattagttctaaaatggatttcatgtcctttgtgagaacggaattcaccaagatgatatcagggaaatctcattaccttataaacacaaagagatcagatcaacagatcttactttgctgaagagttgggcttttgtcctctagctggcgaggagccattggaagcctttaagccagcagaggtgtttcttttagaatgactatccttgcagtggttttcaggtaaagtactgaggagtgtgagatggatgcagggaaggcaagaagctgtcaaagaaaaagttta

SEQ ID NO: 137100 - DNA, 1502 bp, Homo sapiens
tgccttcttgatttctttttctgctagttcattataatgtatacatatacatatacaatgtatatattacaatatatggtcgatatatagaaatgctactgctttttaatgctgattttgtatcctgcaaataaattgaatttgtttatatctaagagttttttggtggaatctttaggtttttctaaatataagattatgtcatttgccaagagggataatttgactttttttccaatttggatgccttttatttatttctcttttctgattgctctggtcaggaatttcagtacaatgttgaataggaatggcgaaagtgggcatccttgtcttgttccagttcttagaggaaaggctttcagcttttccccattcagtatgatgttagttgtgggtttgtcatatatggcctttagggaagctttaattttataaacgtgttttgatctttcttgttattgtaatccccatatacatacactctgtcctttggtatttatttttcttgaactgtggacttcgtgtgtgtgtctgtatgtttatacagttaagtatatgtaaatgtgtttaaatacacatttaaaacaagtctaccatggactatctttttctagtctaggactctgttgactgctgtacatttttgctgctgagagaactagggggaaagaaaagattgcattcattaatagagtgggctatgaatgagccagaatgattctccccagtggtatgaataagacaattgtctattttcaatggcagtgttatgctgagtgtttatgatggctctgaagagagacagacaagatggtgatactgtagtgatttttatccattgtgggaaaatctggtaaagagtcaaggtctgttatagcagatgaagtcctcccagcaaagttggggaaaaagagacaggtagttcagtaggagacaactgtttaccaaggcattggaagagctgagaagccaaacagagtgtgttgaagcaagctaaagatgagcaacagcagaaagctactttcatccctggggctgacacagggagaaggtagtattaccagagcccaggaatgaggttgcctggcaagaacaactattgtgagggctgttgggacctggtcggagggctgtctgatgggagcttcagccatggagaacacatagccaccaccagagagagagagagagagagatgataggagtcactccttaccctgtgacatgtgcagagcaagaaagggcataaaatggatccaagggccaagactagcatgaagattcttcttcagattgaatacctattctggtgtgtagtatatccaatacctacatacaatatggaagggaggaaaaaaactgtgtggtcagggtcaagaagaactaatatgtctgtcaccaaactcagggggaaaggaaatcaggtatcgaggcacaagctggaactgctgtggtaatatatgcctgaaggatgggatgaggtaattatgacaaatttc

SEQ ID NO: 137101 - DNA, 1050 bp, Homo sapiens
tatgtgtttggctgataagtcacgtggtagttgtttattttttttttggtaaaatatacataacataaaacttgccgttttatccatttttaactgtataatttaataacatttataatattcacaaagttttatggccatctccactatttccaaagattttttattgccccaaacagaaactcttccagttaagtagtaactccccatccacccttccttctagcccctaatagtctctaatctaccttctgactttatgaatttgcctattctagatcattcatataagtgaattcatataatatttgtcttttgtgtctggcttatttcatttggcataatgttttcaaggttcatccatgttgtatagcccatatatgaacttcattcctttctgtggctgaataatactgcagtgtgtgtgtgtgtgtgtgtgtgtgtgtacacgcacacacacacacacactccacatttatctgttcatcagttggtggacactcgggttatttccaccttttgaataatgctactatgaacactcacatagaggtatgtgttagagtccctgttttgttttccttccttctgtctgtccttccttccttccttccttccttccttccttccttccttccttccttcctttctttcttttttttttttttgacagagtttcactcttgttgcccaggccggagtgcaatggcgcaatctcggctcactgcaacttctgcctcccaggttcaagcagttctcctgcctcatcctcccaagtagctgggattacaggcatgtgccaccacgcccagctaattttgtatttttagtagagatggggtttcatcatgttagtcaggctggtctcgaactcctgacttcaggtgattcacccacctcggcctcccaaagtgctgggattacaggcatgagccactgtacctggccatttgttttcattccttttggctgtatacctaggagtggaattgctaggtcatatggtaattctatgtttgactttttgaggaaccaccaaactgttttcca

SEQ ID NO: 137102 - DNA, 1630 bp, Homo sapiens
cacaactttcatcataagataaatctaatgttcaactagagatctctcccgcgccttgaacttgcaaatttatgaatcaggggcaaaaaaaacccggataccgagcctggcctcccaccagctagagaacccaccaagttccaggaggggcggggccgagggcggtccgtgccacagctgtgggcggggttgtccgtgcttgcgccagagccggcccgccccgccgccaggggctgtcgcaggagccaggcgtggattggtatgtgggtatgtcggcctctcttcataggccgcgcaggattgctcgagaggctttgattggctcaacaggcgctgagcgttcattggctgcgctgggtcgtcagggcgacgaaaaaggggaaggggtgctgggcctggcgggcaaactaaggctgcggaccgttgggcggttccgcggggcgttgtccggagagctgcgaggccggggttcccagggttcacgccacactctaggaagtgcctgagctagtgagctggccaacgagctccgcgggctgggaccatgggctgcttcttctccaagagacggaaggctgacaaggagtcgcggcccgagaacgaggaggagcggccaaagcagtacagctgggatcagcgcgagaaggtaatgaaagtcgtgtagccgccgtctcagcctccctgagccgctccgccaggtcccttacggcccgggaccgctgagggggccgacccaactgctgccgcactctcttgaacgcggatagctgaagtcggggtgcacgacttttttggggagcggggacgtgaagtacagcgctagagaggccgcccagagggctgtggagctccggaaggagccttaggagtttgttgtcgtggtagacagactcccccgggagctttctctgactccgaaccctgccttgctctgacttcctgttggagatgatcgattcgagagagggaaagagccgagaacgccctgaatctcaaatcacctcgtttcacccaccggcagcgtcaagcggggttttgtccagtcgtcgagttacgtatatgggaccgattctcatctcttccggggcttaatgttctgtggctgttttctcttttgtctgccctccccggcaaatctctttggtgcctcatgatatatttcactgctgaattttctcaattaccaagtggactgtttaatgtacagctttactccccctcctcttccagttatccgaaagaaataatgaatatcgcatcagtcttggaatgtgtattaagactgtaaggtgaaaataagcggcataaaccaggcagtattttactgctggtttaaatgaatgaaaacgcccttatttttatttttgtatatagccagaaacgaaaaacctttgaaaacctccattagtcttacacaaaacacactcggtcatacatttcataatagttcctctttctacatagttctccatttgtgcttactaaactactttgatggacttatcaattatttctcccaaacaaaatgagagatttttcaaatgggtattatgaacagttaactctttgcttaaggcaacatatctttacccaagattactttataataaatgtattaacgttttggaat

SEQ ID NO: 137103 - DNA, 1439 bp, Homo sapiens
ctggtactctacaaagcttagtacattttttacttttataaattccaaataggctaaaagcctactgacaatattgacagtagcaatgatgatgtaggtgtcacttgggttaagtcatgggaaaactcaaaccatagtgtcacagaggctaccctttagctttgcatgcccagaacacaatttaatagcaaagagaggggatctgtcttctgggaggtgtgtatgttgactaagatcataggttttatattattattgagagaaacaatttgtcctgttcattttgttactgtgtttcaaagtcattgagattaagaatttatatttcagcactaagaactgtgcctggcagccaatagtcctttagttgatacttgttgaataatgttaataatactcaaggtctgtgttttgttcctgcaggttgatccaaaagactacatgttcagtggactgaaggatgaaacagtaggtcgcttacctgggacggtagcaggacaacagtttctcattcaagactgtgagaactgtaacatctatatttttgatcactctgctacagttaccattgatgactgtactaactgcataatttttctgggacccgtgaaaggcagcgtgtttttccggaattgcagagattgcaagtgcacattagcctgccaacaatttcgtgtgcgagattgtagaaagctggaagtctttttgtgttgtgccactcaacccatcattgagtcttcctcaaatatcaaatttggatgttttcaatggtactatcctgaattagctttccagttcaaagatgcagggctaagtatcttcaacaatacatggagtaacattcatgactttacacctgtgtcaggagaactcaactggagccttcttccagaagatgctgtggttcaggactatgttcctatacctactaccgaagagctcaaagctgttcgtgtttccacagaagccaatagaagcattgttccaatatcccggggtcagagacagaagagcagcgatgaatcatgcttagtggtattatttgctggtgattacactattgcaaatgccagaaaactaattgatgaggtaaggagaaagagaagagaaatagtcatacacctagatttaaaaatgtaccactctggagtacttccattcttttcaaattggctattggaaatacaggcaaccctcaagttatagtcctttgccaccaccccctctcccaacagactcatctgtaagtagattgcttgggcctcaaaatactttctcaaagaaacttttaaaaaatataattcaattcagtaagcattaagcatttgtttgtaagtagattgcttgggcctcaaaatactttcccaaagaaactttaaaaaaatataattcaaatcagtaagcattaagcacctattatgtgctagttactgttatca

SEQ ID NO: 137104 - DNA, 1020 bp, Homo sapiens
ttatgtataaaaatattataataaactgcaaaaatctgtatgcaaatgttagaggaatgttaggataataagtaatgctgggtgtaactcagctggtaagtattaatgcagtatttgataatacttctgtggttactgtagtggtagcaaggacttgctgtgacccactgcatgaatctaccccagaatatatgtaggaaattctgacctggcccctttgatgcaaccattttgacatgggaacatttggaagcttgaaaatgaatgtttaacttcttagcagcttttggaaattgaatcaggtaataagtgtattggacatcctaaagtgtgagagttaggaataaagtgagcatatcggtagagctaaattaatgatttatgtacctgtgtgatgttagtgaagtcgtattgtagaattgctccaacccaaatataatatctgcatttaagtaacagaacattccacatggaagaagtaaaatgttctattgctgcaaaaagtagaactaaaaccaataagcagatgttgcaggaatttcagcaaataaatattatataaacaagtcttaaaaacaagagatgcctataggaagtattcaaagactgatgagttcatatcaaaagatcttaggagccagcttgaaggagtttccatgggccaaatttgggacaatttaacaattaaaaggaatactgggactggatgtagtgccgaacccctgtaatcccagcattttgggagggtgaagtggaaggattgcttaaggccaggagtttgaaacccatctgggcaacgttgcaagaccttgtcactacaaaaaatacaaaaattagctaggggtgatgcatacctgtagtcccagctactcaggagctgaggtgggagggttgcttgagcccaggagcttgaggctgcagtgagttatgctcatgccactgcactgcagcctgggcaacagagcaagaccttgtctcaaaaaaagagaagaatgaaggtaatgatttaacaacagaaat

SEQ ID NO: 137105 - DNA, 2256 bp, Homo sapiens
ctgtctcaaaaataaataaaataaaataaaaaataataatatatctttagcagctttgaaagggataatctcaagttttgctgctcagactactgagattattattagaaaatagaagaaacaaagagttttttaagtgactcttattcagtagcttccgtaatattgagtgttgtaaaagtccagatgtaataaaatacaactcaagtattatgaaagcagagaccttaattatataagtgcttccaaaagagcttaatttacattatagctattcaaagtgtattacatgaattctaaagaaaatctacagattaaatattgtcattataaatgatgtacttgaacttcttttgaataattagcttggaactttgttctgtggagaacatgggctttggcattctgaagtacttggtactgatttttttttttaattttctatttaaaatagatgtttgtatctgaaagcaaggagacggcatctggagatgtagacagcttctacaactttgctgatatacagatgggaatatgaagtgcaatgtggaaccaggacttggtattaagcctttcccaacttgtgaatatagaatttgataatacacttttgtgtattagcaatggtttttactaatgctaaaacttttaaagtttattttttaataaattgttgagtattacatcatttacttgaggttcaaaaataattcattttaaattaagtagttttaatcagcttaaaagctatttaacccattttaataagcttgcagttttgtttctctgcatatgatattcttattagaaaacagaagtagctaaaagtttattattttaatcctatttaaatgttctttcaaatctctaataatttaaactttcctcagtgctccatgatactttttttgagactccatatcattgcttattttacctttttcaatttagagggatttgttactagtcgatcaattagaatgaacctatgcacatttttatgtacacatatccagttatataattgcttcctagttgcattatatggcaaatgagattttgtacatggagttgacataatactttgtaaattgaattttttaaagaaataggcatttgataaccagcttggcaagtaactctactaacagatgttggtatagctatttaaagactacttcgtaagtagtatgattatttgaataaattacacattgtttagttttttaatacaactgctatatgactcttctgcttcctgataagaaaaggtatatgcaatgctaaaactgtagaagcccaatcaccagcagtttttaaaaaggtgataacttttattagctcttgtgggctatcaagagaattggaacaaaaccttgtgacttttaggtaagaaataggcatgatgataagctatgcagattattaaaaagcttgatacatttgatttttcattagatatgccattcatatcaagtaatgttcaagtatgataaaattattttggttgctttaaagcactgtttcccaaatctacctgatcataataatttaccaggaagcagaggagagctacttgtttaaaaatccacattcttggacccaatcctcagatgcacggattcagtcttcaggggaaactctgttttaaggggtatgttgtaatctaaagtaattggttcaggaggtgtcaataggttgaacttgtgagaaggcactgaatctgccatccacatcacatatagcagctattatgaaatcagctttcataggcctatttttaaaaggaatctgaaatttaattctattttgataaaactaagactgaaaataaccacttgtaaacattcctatgattgttactaaaatgtattttcatgtttaaaatgtttttggatatttttgggttaataactactacattgaattgcatgttaaggtgcagaaataatacattaaaagattttcactttaaattaattagtaatattgagcgctcaccctgtgcgtggccttgtgctaaccattagcactgcatcatttcaattcttttataagggcattcaatactacaaaatcaacatgatttcataaggtgcaaataaaagttggtgacagatttaatataattttgatcacaatttacaaatgatctttgcaaatagtggtcagacggcattagtttttcccttagttaagctaaattaaagggactccatcctgttatgattatattattattattattattattat

SEQ ID NO: 137106 - DNA, 1030 bp, Homo sapiens
agaggtttcaatgggtggctgcagccctatatattctttccttcaagtacatgaacccttctcaccacagattcaactgtcactacagagcacagccattcatctgactgccattcctcaatctgccaactctctaccaaatatgctcacttgaatagttaaataattgttctcctcgtctcaccatgtactaaattcaactcattatatttctctttcccagatggtctccctgtcctggcatttccatttccatcgatgacatgcagttatcttagttataccattgacattttggggtcattttagcttgttcttttttccactctgctaagcagctgttaactagccttgttgttgaaatgtttttcttctccatcctctccttttcatgtccctcatcatcaacctaatgaccccatggttacttacatcagcctcctgattggggtcctcacttgggatcttttcatcctgtacatcctatacactgcagggtaaaagagcatagtagttaagagcatagcccctggggctgttatcaccagtcttatatcatcttgtgacactttctattttggaactcttaaataatttaaaaatctccctagctagattgtcagctttctgagtaatccaaatgatgagtaccttcactttgagaaaggagagcactttctttctttctttcttttttttttttttttttttttttgagatggagtttcactcttgttgcccaggctggagtgcaatggcgtgatctcggctcactgcaacctctgcctcccggattcaagtgattctcttgcctcagcctcccgagtagctgggattacaggtgcctgccaccacgcctggctaatttttttgtatttttagtagagatggggtttcaccatgttggccaggctggtcttgaactccagacctcatataatccacccacctcggcctcccaaagtgctgggattacaggcatgagccactgcgcccagccagcactttcttaaaggacaaaaaaaatggc

SEQ ID NO: 137107 - DNA, 1055 bp, Homo sapiens
tacattaataccactaaatcagtaacttattgaaatgagctgaacactgtaggatgggggtaggagggtgaagagaaccgttagcaggttaccaaaaaaggaataacatgctggttctcatgtaacacaaaggcttgagggaggcaacccacagtgggttagaaagtgggttagtgggatagaaaggtcctgggctctgtcttccttcctggccatcctaatcatgtagttttttctatttgctggtaagatagctctcatacctggttctcatgtaacacaaaggcttgagggaggcaacccacagtgggttagaaagtgggttagtgcgatagaaaggtcctgggctctttctgtcttccttcctggccatcctaatcatgtagttttttctatttgctggtaagatagctctcatacctcttaagtattgtgactgcattctaggcagaaagaataaagagagtggcaaaaggccagctaagtctgtcccctttcatcaggaaaacaataactttcccagaagcctcatgcagtagacttctgcttagatctcatttgccagagctggatcacatgtccattctggcttcaagggagtctgaggaattatttttactaggcacattgttttgctgaaaaattgaagttctgaaagtaaaggtgaaaagagtggctattgggtaagcaactatcagtatttgccacacgaagcatgcattatctgtttagtttaaaatacaccatagggtcctttccgctcggagacctctctttctatagacagagagctgtttctctttctcttgtcttctgcctattaaacctccactcctaaactccttgtgtgtgtccgtgtcctaaattttcctgtcgcgtgacaatgaaccccagggtatataccccagacaacgtagtcacttcataatggggacctcatccgagataccaaggtgcaacattcaccgaaacgatgaatagatgaggggactccaactctgtcctttcatttcgaggctcttggcttccattttagaaccaaatcaaaccaaata

SEQ ID NO: 137108 - DNA, 1023 bp, Homo sapiens
attctctctaagtactccttggtctctgataccccatacctgactatctccactggacaaaataggttcttgagtcaagcactaagtaaggaatatgaagatttcataatttgtgtgcagtttcagataaattctttccaaagttaggagaagtaagaataaaatatgtaactggaatcagttgctacctaaagatgtctttttttaaacctcaccatggtacctggggttagaagcaatgctttgtttactctttttaaaaagcaacagaatgggaatattgtagtaaatctctgggggaattcctgtcttcacaccaaaaatagttgttattctcttagttggtttggttttatctcatggacattttgaagtatatattttttcttatttttttccaatttttgagccacatacattttatagactactattcatttttaatctgtttccttttttctttttcactttctccttttctctcctactcttttttattttccttctttactttctcttttttcctgccaattttagtttttatctttgtgctgtatttaattgtatcatcacaggccacattaaatcatttctggaagatcagttttaaataaatagatgaataaaaaaatagcagttaaaaaaagggagagaaaagatttaagaacatttctaaaagtaaccccaaaatttcttcagggggataaaaagtgggatgatttgggaggtcgaggtgagaggattagctgagaccaggagtttgagaccagcttggacaagacggcaagatcctgtctctacaaaaaaaaaaaaaaaaaaaaaaaaatttaattagctgggcataatggcatgtacctatagtcctagctacttgggaggctgaggcaggaagatcacttgagcccaggagttcaaggttacagtaagctatgatcacaccactgcactccagcctaggcgaccctgtctcaaaaacaaaaatgaaacagtggaatgaaatcatttgggtaatgtctcccagac

SEQ ID NO: 137109 - DNA, 3228 bp, Homo sapiens
tgacgggccgggcggacgagggccgagggcgggagctgaggcgcggggggcggccccggcggggggcgggggcgaggaggggattaaggggcaggtgcgagggagggaagagaagaaagcgagcggttaggggggcggttaccactccgaccggactcacccggcacattgccgggccgcggcgtggagccgggcaggagccgcgagccagctgcgcgaaggtaggcgccgcggaggccggacccggcgcgggcgaggttgggggcgtcgcaccggctgggcggcgggagcggcggcctccgggagtggaagcgggcggcgcggagcgcacagtcccggcccggcctcgccgcgctccgggtcgctccggttccacatcgtggtcgcctccggcgtccccggcgccttggggccgagagcgtgtgtgggctgaggtaaagtgcctggtggcccctctgcccgcccgggtagtgcctggtggcccgggcggggggcgggggcggacgcgcgagctcggctgcagctcccggctacaccgggcaggaattgagcgccataactgttgcggctctttcctccggtgccccctcctggcgccccctcctccgttcctgccctttgcctggcttcggggctgacggggccagacccgtggcgggaggacctgctctgtcggccgccaggggtcggatgctccagggagcgagggcgcgccctggctgtttagctgttggggggcggaaagaaccgagtgcctggagaggggagaacgggtggtgctgggtgcggcgaggcaccccgggaagcccgggtgcccacccggcgggagcgggagcgcgggcgcccggcgggctggcgaactttccctcccactggcggcattgttcgaactgcgggtccgtggccgccgagcgtcgggcggtccgggggtgggaaaatcgtgagggctttgctagtcttccggggaaattttcccaccgctgggcacggcaaagttaacttttctccagctttcgagttcgttttattccctccgccccgggggccgtagtttgtttttttgttttgttttgttttgttttttgtttgtttgttgttttttttaatagccttcaatctttttctcccgcttttcacagcagagccagtgcttcggtggagtctagctttaaattgcacagggcagcctgagtttgttatttgtgaggagggggtggcgggatctggagtgagtgaccacaatggtggtatgtggaggcatgtttcaaagtttttatcgctgtgcggccctgggacatatgtggctactagggatttggcaagaaacttgtttggccgcttctccgactttgagttgcaaggaaatccgtggcctcagatgtgcgcgagttgtttgtgtgtgtgtgccgtgaggtgcgtttatctatgaagctgaggatgagattcccccctcccgccgtctgattgtgtaagaagtcaaaaccgtgttgaaggtgattccagtggtggcctggagggaaaggcgacctcattccctgtgttcagtctgataaagtgaactgctgctctctaaacttgggaagtaatgaaaaataatttaggtaaaaactggttgcacaacgtctttgcttagtttaagcaacccacaatccactttcccagaccagttctcctgttaaatactttccctttagccacttcttgtcagcctaggctgggagggggaaagagtagggctgagagaggagtcggtctgaacaaagcattgtgtttttatttagtttaatacttccaaaacatctgtagacaatgggagtatgggtcccggccttcgtaccctttgagtagtgtggttctcatgcttttgtagcatcatgtgattactcttcggatacgtaaaaatagattttttttcttttttgtttaacctaagagtattctacctccataacatatcattttctctttcgtttaaagtgagctctgagcttaaatacttgaactgtaaaaggataataccctctcttcaaggattacctgagaccgttgagaagtgtttcagtgcccagcgtgtattcaactttcaatcgatgttagccaccatctttgccaccttttctccagttgtgctcttctttatgcttttgtttgctagagaatagcttttaacccaatattgttgccttgctttctgtccagtcaattctggaatactcaggggtgcaagtctggctctagaattcacactttctctctcccctcttctctgagtcatgttgcttgccctcggcaatgcgatgtgaatctggtcataggtagaaaaaagtagagaaaggcttcccactcctccctgaagtgttgtgacccaccttcaggcccgtaggggagattcccaggagcaggacaggtgatggtgcagggctggcatcatagctaagaagtatggattggtgaaagttaaagaagaaagggtgttgaagacttgtaggtttagtattgtcctctcctttaataatgcttgtcttttccctctcttgtgttccaccaaccataacaacccattttttcccctaacctacacaaagccatatcttctttctgcccactgctttgaggtctggctggaactaggcaagtattttggaagaggtgggggaggtaggaggcatcaggtgctggtaaagacatggcattagggagggctcttacaagccttgatcagagttacagagagccagtccaaaaatgaagctgagcattatcaggggacataatgcacctacctccttgtggagcttacacaaaataggagctgagaagacagaggtaatatgctgtcttacattaagaaaatctctcattgaggtatgatttactatgatcttgacttgtcccacaatataggtgagaagtgagtgttaggtgacacctgtctggcactctcctaacatggggacactttaatggctcacaagtttctgttgttccagttacagtggctgggaaagctgaaacattctggtttgtatggtggggaggatctagggtgaatgggtaaaagtgatgaacaaataaacgggtactagcaagtaagtggtcattacaaaccaaataactaccactttgagttttctgatttctggaatctttatgactccctcatggttatttttgccttgttcctgtaggtctttccatagataataacaacaaaattcttaccattag

SEQ ID NO: 137110 - DNA, 1074 bp, Homo sapiens
tccttttcccttggtattggctgatgggcaaggaaacccaagcctagaatgtgtttttttgttttgttttgttttgttttgttttgagacacatgacaagaatatatgataccagcatggccaatacactagactttgtgtgttggaatcttctgggacacattcttttttaaattttaaaaacttattttgataattacaaactgttataagaatagtacaaagaactcactatattcccaattagtaacggtttgctctcatttgctttatcacttgctcttttagttctctttccaaaccatttgttagtaatcactgaaatttattatttgttgtttctttcaagccatttgttagtaatcactgagagattggtacttatcaagggcatcctgtcctgaacagtggctcagttgcagccactgggtatagcagaacagtggtggtgaggcagggtccagaggtagagcaaagtctacctacagctgtgaagcacacagtttgtaaaccgtgtagaatctctagggctagatatagaaatcattatcgattgtaaaagtggttaagataaactccacttttctcaccattcttgtcaagtttgttcttaactatgccaaactttaatactgttaatgaaaattcactccactccccaactttgcaacaataatatattctccaagattttcatttaattcattcagcaaacatgtattaaataccttctgtttgctaggggtataagaggtgaaagatacccccttaacagctcaacttccagtggaaaggaattaagtcatcttctcacagtcaggaggaagagtgctctgctgaaggggttcacagggagtgatgggagcaccatcctggttaaggatctgagaagtagatctctgggagtcatttgggatgggtgtaactatgaagatctgtcttctctgaggcctgctcttagatgacaaggttcatgagttagagaagcctttggtgtcatatacccagcacaggctgtgaggtcaggccaacttggattcaaatcctaactctaccacttgctcttggccagtt

SEQ ID NO: 137111 - DNA, 1041 bp, Homo sapiens
ggacatagatattcttgtgagtggcttaactgctttctgatcttgtgtggctattatcaaaggagtctctagatttcctcaaccttccattcaagcattatcacgaaaaccctagtgtattagactctactagattttgtggtcaagccaaaagaccgttatttgggaaccaccaccacttaagagatgaaagaaacatttgcagtctttccttggaacctttatatgatttataatttgtacctaagagaggaaatccgtatttgagcattggtaataaggacaagggattctctgtaaatgtgttttaattggttaagatttaaaaatcttcctgtggttgcagtgaaaaatccagcattgtactgtgaagtgagtggccaggaattaccaatttggggcatcagcctttgacctttgcttgtgaagatctcagaagtaacactttccacataactgaaataggcttcacaacagcttgtggcctgaaatatattacatgaaaatgcaactggaccccaggaagtatgtgtgggaaactatacaaggctcattttgtatgtcttagagatgtacattcccccagaaaattgcctggtggtagaatgttagcttttcttctttcctcctaggataaaaattaaaaatctctgacattttaaaagtcagtgacttgaaagagcaatcaaaatttataaacacacacatcattagaccccacaaacacttccaggaatttattcaacaaatatttgcatattaattggagtattgcttgtagtagcaaaagattggtaatatcctaagggtcaatcaagaatattgaagacactgatagttttggaacacgcatgaccaagcaggtagagggtgagagggagacttttcactacataaacttttacgtatgtgttttgaattttaagcaatgtgaatatattttcttattttaaaagttaaatacattttttaaagagatgatatatagtgatgcaaaattccatagactcctatccgagttgacctgatcagagctattcc

SEQ ID NO: 137112 - DNA, 1051 bp, Homo sapiens
caaagtgctgagattacaggcatgagccaccacgtctggctttttttgctttttaagagacagggtcttgctctgtcacctaggctagagtgcagtggccccatcatagctcactgcagccttgaactcctgggctcaagtgatcctcctgcctcagcgtcttgagtagatggggctatgggcacatgccactatgcccacctatttttaaatattttttgtgcagagataaggtcttgctatgttccccgggctggtcttgaactcctgcctcaagtgatcctcctgctttggcttcccaaagtgttggaattacaggcgtcagccactgcacctggcctggcttttttcttctttttcagagttgtagtggtgagagaggacatccttaacttgttccaatcttggaaagcattccatctctcaccatcaagtatgatgttgtaggatttttttttaatatactgtgttgtgcagaaaagagttaacatagcagacctgaggctgctgtctttagaaggccaacgtgcacgattggcccttagctggtgtttgggaaattggcttttcaaatgtttaaaaagaaaagattatattctaccttcatttattccttttccaatgcttttcatttctttatggtaatccaggtttcctaccttgatcacagtctttctgcttaaagaatcccctttaacctatcttttgagggcagatctgctggcagtaaattctctgtttttggttgtctgagaaagttttcattttccttcacttttgaaaggacacttttgtgggttgacagttgtttttcctctttcaacatagtactccaccattgcctggcttacgtgatttctgatgagaaggctgctgtaatccttttttttttttttaataccttaagttctgggatacatgtacagaatgtgcaggtctgccacataggtatatatgtgtcatggtggcccgctgcacccatcaacccgtcacccacttcaggcacctctcccaatgctatccctcccccagtcccccatcccccaacaga

SEQ ID NO: 137113 - DNA, 1051 bp, Homo sapiens
ggttctgattcttgtactaattttattagttttttaaatgacagctttgagatataatttgtataccatgcagcttacccacttaaagtatacaattcagttattttaatatattcacagatatgtgcaaccaatcaccaaaggacacaatatgttttcacactgtcttctaattttgtttctgagaaattagctgttaattttattggagttctcttgtaagtgatgagttgttttttttcccgggctgctttcaagattttctccttgtctttggctttcagtaattttactatgaggaatctctttctggatctctttgcatttatcctacttggagttctttgagtttcctgaatatgtaaattaatgtttttcagtaaatttggggagtttttctaatattttttctgctcctttctcattcacttttccttttggtactcccattatgtatatgttgatgaacttaatgatgttctacatttctctgaggctgtttcttcttcttttttccatctgttcttcaacttgcctaatcactgttgacctacttcaagttcattaattcttttttctgcttgttcaatctactgttgaggcccttcagtgaatttttcatttcaattgtgctttcatcaccagaatttctatttggttattttttatacttcctatttctttattgatagtctctgttttgtaaaatattgtcatcataccttcctttacttctttaatcatggttttctttagttcttcgaacatatttatatggctaatttgaaggttttgcctgttaaatctgacatgtggttgtatgggtcatactttcctgtttctttgcatatctcttaagtttttgttggaaactgggcattttggataatatattgtaacaattgtgggtactacccctccaccagggttctttattattatttgcttgtttactgctttagtaactgcctggattattttattgaagtctatttcctcaacccccattctcaccctgcagtatgaagcctctaatgttgctcttcggggg

SEQ ID NO: 137114 - DNA, 1035 bp, Homo sapiens
atcccatgagttgggggctaggtggaagaagggagcccccacctctcagccacattctcctggaacgtagcctcagcaaaagtagctgggaacgggataagagatgccgacatcctgttcttcccaggaagaaaggagcttggagctggggtagaaggaaccctgtgttcttggctactgtactctggcatgagatctttgctgggagggaagatggaggaagtggttctagatccaaatactgcagactttgactttactttatgaattttagtagattttctcgaataagtacttcatttgctgtatgcccttaaaaccatttccagagactttaaatggttgggttttttttaattgaaataactttcaccaattttgctgggaagagggtcgtccatggagctgctcacactgttatgccagaagtggaactctgtgagctttttaatgtaaaattttgttgctgctattcttaattgctcagagtggccttgtatttggatttctacctcctcagtagattgtaaatagcttgaaggcagtagccctgacctttattcattatggaatcatgatagcccctggtagcatgttgtatgttgtggcacataaaagaatgtcagtcactggctatattgctgtcttttcaagtttacattttcagcacttcgtttgtgacttaaagtgcttaactgtgtcttccttttttcttacactccagtgctagtgtgttcccagaagggtgatgcttcttttttatctgtcattggccatactcagggaagtacacttgaaccgttggaagttttagtccaaagcatttttatttacccttcacaatataggagctttgtttaacattccttgtagtgtatatataattttgactttaggctacttatttgggatatggggacaggaagagagtgagagagggataaagggcaggcagaaaatcagtgtggtcgtgttcttaaaggtggatgtgcctcacttgttctttcttcagccaactatgtctcatgcttttca

SEQ ID NO: 137115 - DNA, 1033 bp, Homo sapiens
gctgccccaccctttgttttggtggacagtggccatgtggccacatctgaggctccagttagtgctgtaccactcatttgtggcttgggcttcctcctaaggctaatgtggcctttcttagtctttgacatgctttgtattgaaagatctggtagtactcttctgtcattattctaagtcatttgagaatattcttgacaaaaatcattcagtttgtatgatttgcttgctgctatttctgggatccatgggacagtgttgactgccctctgggatgggtgtgtgtgaactgttttattcagtgtttttctttttcccaggatgctccaggatgaaacgccataggcctgtcagcagcagtgacagttcagacgaaagtgagtagaaccggctggcagctggtaacctttctatctatatcccttgaggatttttcctttcatttgaggataaaccatttcatgcttttttcaatggttgaaaaatgtttctgagaaggaaaattcagggcaccattatcttatttaaatttcattagagatagataaattagaagaattgattgtgtgtggcatataacttttcacttttcatttacctaaataacaaaagccagatctagtaatgctttaacagagcttctctagaaagaagaaaagtacaagagcataaattgtaggccctgattctaattgtagcttaggtactaagtgtttgactgtgagtcaatcatcatttgtaaaaggcagtaaccttattagcaatagcctttggggaagtgctgaaggatacacagattacttgctccacatttgtagtttttccagttgtttttggagatactttttcttcaagtggaatatgaattgtgttattgcagaacattatgaggtgtgattataccaaatcagataatctcatccttagcattgttgaagcttttgcactgtaggagatcatctataaatgtcactaaactccattatgaggcactcttcagtgcagtttgactgttttcttcagtggtatgagc

SEQ ID NO: 137116 - DNA, 1092 bp, Homo sapiens
gaagtataatatccacacagaaaagtacacaaagctgtacagctgaatgaattttcacaaattaaatgcactcatttatctgccacccagatggggaaataaaacatggctgggcacggtggctcatgcctgtaataccagcactttgcaaggccaagatgggagtatcacttgagcccaggagttcaagactagcctgggcaacacagtgagaccccatctctacaaaagattttaaaactagccatcgtggtggtgtgtacctgtagtttcagctacttaggaggctgaggtggcaggatcacttgagcccaggaggttgaggctgcaggagctttggtcatgccactgagaactacctaaaaaaaaaaaagaaaatattaccaacacccaagaacccctccttcttctccctgccagtaactgacctccctcacccaaggtatcagttttgccagtttttgagcttcctatgaatagactcctacagtgtagtcatttgagactgaattgttttgctcatcagtaggattttgccatccatccatcctgttgcatgtagtaattcattaattttcacttctgtgtcatgcattgtgtgaatatgccacattttttattctgctcttgatatatatttgggttgtttccagtttttacctaccataaaaatgctgatatgagcctttttatttatcatttggcatgcatctgtgtacacttttgctaagtatatacctagtgtgggtttgctaggtcatgggtatgtgtacgttcagctataatatctgctgccaaagtggttgttcaaattcacactcccaccagcagcataagagataatctatttgctccatttccttaccaacatttagtattttcaatttttggacagtctttttaagtttaattattctggtagataatagtgattgtaatttcagtttgcatttccgtgataactaatgaggttgagaaccttttaaaagtttatttgccatctggatagccttacttgtgaagtatctctttaagtttttttgcccagcttttaattgggttgtctttttctaattaatttgtaagagttta

SEQ ID NO: 137117 - DNA, 1064 bp, Homo sapiens
tatgggatctggctgtgcctttgtgcagatatcgccccctcccaggttggtttcctcttctaaataaacttggtggccattgtaccaagaacacactaatgtgacgacattttattagaatgaatgggccagtcgtggtggctcacgccagtaatcccaacactttaggaggccaagttagaaggattgcttaaggccaggaattcaagaccagcctggacaacatagtgagaccccatctcttacccaaaaaaaaatttttcaaacgttagccaggcatggtggcatgtgcctgtagtctcagctacttgagaagctgaggcaggaggatcactggagcccaggagttcaaggctatggtaagctatgaccttgccactgcattccagcctgggtggttgagcaagagcttgtctctaaaaatttttttaaaaattagaatgttgggaaccaggatccatgagggtgaataaagaatattgtaagcagtcagtgagttaacagcacatgacaaaactaaatttgtaaaaccatttgctttctagaaaggaatctgccatacctcccagagggcatttagccatccattcagtgcctgaaatctgtcatttgttgattgttatcattgtctttctgttgcttttctaggattatagctgagaaggtaaaggacgttctgtttatccgaccccggaagtatattcactgctccagcccagacaccacagagcctggctacatcaacatcatggagttggcagcatctgtttgccgctatgacctagatgacatggacatcttctggcttcaggaactcaatgaagaccttgcagaaatgggtaagttcttttctcacaagtaagttgtgacttaattcatgttttttttttaagttatcagaaccctttagcttgtttttatttttgttgcctcctttcttttctggccttttcatttatttttctcattgattttatcttatttcagtgagatatttcttcaaatgcatacatagaaataaagcaataatatttaaatatgaccttttctttcctcattcatag

SEQ ID NO: 137118 - DNA, 1139 bp, Homo sapiens
ctaacttgctaagaatgaattattatatccaaatagttatgtgattttaattactatgctacaaattatcgtgtccagaattataaagcttggtgaaagtcctcctacagtgagaataagagaaaatatagagatttaagaggagactggcaaggatttggacaagaaatcgaaagggtcagtaatatatcttctaaggaacatggtgaaatatacatctcctttcatgtgtcaaacactaatatatgattataggtaaatgttagagtagcactagcaaaagattttttgaaatctggttgttttagagcaggaaagagatgtttttatcctttagaatcctacccactcctgcactgggctcacagtaggtgttttgggaatgacagctgactgatgggttgattgattgtttgtatttctgtgcaggttgtgggccagttgatgagaatcttatggaaaagacagtagaagtcctggaacgccattgccatgaaaatatgaaccatgctattgagacagaggaagggctaggcatagagtatgatgaagatgtgatctgtgatgtgtgccggtctccagacagtgaagaagggaatgatatggtgttctgtgataagtgtaacgtctgtgtgcatcaggttagtgagagtggagaccgtcatctccctacggtcagcctttctgaagctcagtgatgatctccagcacgcatatctgggtagcagcttgcatttaagggtgaaaataaagatttggcctggttgttcttcagtatttcctctagaaacaatgcttcttatgacccccaagatgacttgctgactaactttaccccatggggctaaacccaggtctttattgtgtcactttatgcccagaccattgggattgccttgttcagcttgcccctaggcccctgccccagggggatctcattgctgcctgtctgaggtctctcctcttccttcaaatctccatggcctcatgaggttacacccatggtcagtaaccttggtgagtttacacttcctacaaatagaagtccagactccttatcctggcacttgtaaccctcccccatcccctaaacatgccactcctaagaatgtccaccccacttttaaagatcacagaat

SEQ ID NO: 137119 - DNA, 1076 bp, Homo sapiens
cagcagatgaaagaaagtgagtaatacaagtctaggaatttggatctggaagataggaagtatggtggtgacacggaaagaaggagcttggaaaaggaccaggttgtggggggaccgatattatggtaactgttataacttgaatctgagttgagggtgaatctcctgaggcagacagaaattttgaagctgccatattgaatcagttagtctctaatagagtagagcagtaaggaggaaatgatgggcaaaattggggatagcaaaaagggagtctagaatgtttcccaaactaatctccagtttctcacagtaattatttgtccaacttcattccataaaggatttgaagcaccttccagaactcattatgaattattgtgattagtgtaatattctattcaagattcattcacaagtccctgtttcttcaacccaagcaagcaattgctacgatttactgagtactttttatgcaccaggcgttaataggctttttataaacgtcagttcatttgctcctcagaagtttcattctctttattttctaaaacttttttcttgatcacaacagtgtatgacttttaggaaatgttcaataagtgtttgactaattataatacatagtcattgaagaagctttagaaaacagaccaaaaaatgctgtaatcacaacactcagataacagttgggttaacggttggctgtatctcctcgtcttgttctatcatccttaaagtcagttctcatggacagacatgctgatcttaggagagatgctggaagttgcttttttgagtatttttaaatcactcgatactggatataagcttgttcggctttatttgcctttctcccaaaagcagaggatactctgtgactgtgtatcagaacagataccaaccctggtgagaaggtgctgaccattctcccctctcctcctcatacctccaggcctgctatggcatcctcaaggtcccagaaggcagctggctgtgtcgctcctgtgtcctgggcatttatccgcaatgtgtgttatgtccaaagaaaggtggagccctgaagaccaccaaga

SEQ ID NO: 137120 - DNA, 1030 bp, Homo sapiens
ccaccaagaattaccttgaagttaaaaatgcccaaatcaaccccagaagaccacagaaacagctccacagaaaccgatcagcagccccactctcctgacagcagctcatctgttcacagtataaggaacatgcaggtgcctcaggagtcactagaaatgagaacaaaatcgtatccgagatacccactagagagcaagaataaccgtttgctggccagtctcagccattctaggagtgaagcaaaggagtccagtcctgcttggagaaccccgtcctcggagtgctatcatgggcagtcactgggaaagcctctggtccttcaggctgccctccatggacagtcttccattgggaatgggaaaagtcagcctaactccaagtttgccaaatccaatggcctggagggcagctggtctgggaatgtcacccaaaaagacagctcgagtgagatgttctgtgaccaggagcctgtgttcagcccccacttggtcagtcagggcagctttagaaaatccactgtagaacactttagtaggtcctttaaagagaccaccaataggtgggtgaagaacacagaggacctccagtgctatgtgaagccaaccaagaatatgagccccaaggagcagttctggggtagacaggttctcaggcggtctgcagggagagctccatatcaggaaaatgatggctattgcccagatttggagctgagtgattcagaggcagaaagtgatgggaataaagaaaaagtcagggtaaggaaagatagctcagacagggaaaatcctccccatgactctagacgggattgccatggtaaaagcaagacacatcccctttcccacagttcaatgcaaaggtgattagaaacttccaaggatgacccaacctttgcctttgccccatatattggggaaaacccatacaccaaaaggattttagcatatgttaagaggaattgcagtgaaaaggataacatttttccatagtaaattgtcttgcagtttttgaaaatgtttcaagtct

SEQ ID NO: 137121 - DNA, 1057 bp, Homo sapiens
tttctttcacagtatcttaacttactgagtcaatactcctcatgcttatcagtgtccagtgcctgttcctaaacttgcttgttggggacacactcataactatttcacctgactgacaagcataaaaggctaacttgtggatagtgtttacaaaagtacaaaagtactacttccaaggaaaatgctctgattctctgtttaggcatttgtgaaggattccagagcctttcccaaagtgagaccatttctggggtatttgtaccaggtcagggtttttgtgttgttttcaaataagtttgactaaaataagtttggctgacagtttttgtatacctgctttaatgtttataaaatttttattgaggtataattaaaatatagtaaaatgcacagaggttaagtattcttacctgctttaattttgaaacagatttttattgtcaaacagaatttgaaagcatgtgtttaacacatggatataatttagctttgtgtcacctttgaatctgaggcagtttcccaaacaaaaaggctggagccatttttcagaagttgcttataccctgttcccaaactatcagccttgattaatttctagtaggaagagaataattacatttgcgggggggggggtggataaaaaacatgtctgcttctcatttaaataagagagaaatgatgccgttttttaaatgtgaagcagactataattctcagctctcttttcttcttagccttaaattaatattctctttcttctagttttggaaagtgtagtgggaatattcagacaaaagaggccattttccatttttaaagcttcttactggtgaaacagcccagttgtagtaggtgccagtcagtcaaggcaggggccctctctccgtcaatatggaaaactcagcagttttcctctcccccagttgtgttcttgtaacgttgttaatgggttcctttgctttttgctttctccttttctgaaaatgtatgtgttttgcctctcttttggctacatcttcaaaatatttcttttgtgcctatgtacatgtgtaaacat

SEQ ID NO: 137122 - DNA, 1107 bp, Homo sapiens
gcaacaaccaagtccgagactggaggcagatcggggggaggggagaagcgccaagcgcgctgccctcccagggaaactcactgccgcctactcccagccggccacagtcaccagctcaaaatggcgacgacgagaagggagtcggcgctccgaccaccatccacctactaaggaagcgcgctctggccggccccggcgattggtcaccgcccgctaggggacagccctggcctcctctgattggcaagcgctggccacctccccacaccccttgcgaacgctcccctagtggagaaaaggagtagctattagccaattcggcagggcccgctttttagaagcttgatttcctttgaagatgaaagactagcggaagctctgcctctttccccagtgggcgagggaactcggggcgattggctgggaactgtatccacccaaatgtcaccgatttcttcctatgcaggaaatgagcagacccatcaataagaaatttctcagcctggccgaaaatggttggccccacgaagccacgacaactggaggcaaagagggttgctcaacgccccgcctcattggaaaaccaaatcagatctgggacctatatagcgtggcggaggcggggcgatgattgtcgcgctcgcacccactgcagctgcgcacagtcgcatttctttccccgcccctgagaccctgcagcaccatctgtcatggcggctgggctgtttggtttgagcgctcgccgtcttttggcggcagcggcgacgcgagggctcccggccgcccgcgtccgctgggaatctagcttctccaggactgtggtcgccccgtccgctgtggcgggaaagcggcccccagaaccgaccacaccgtggcaagaggacccagaacccgaggacgaaaacttgtatgagaaggtgagaggcgggggggggggggggggtagtggggacggaaccccgaaggggtcagtccgggatcggcagatggggcgctgtagaggacgttcttaggcagtagaggactgcgcggccggcgaaagcctagaagacttgggaattttgcctaccttgtgttcctcctttgtctctcggtatcttcgttcca

SEQ ID NO: 137123 - DNA, 1071 bp, Homo sapiens
cattgccccttcttttggggagtttgtatctgtgacactgacgctcatccatggaaaggggacccactgtgtaattgtggtccttactgtgtgttccttctgtgatgtgggcccgtagttatttggggctcgtgtctgtgactggcccttggctgtggtggatgttactgtgtgactctggcccctttgccagagtctcttgaaggtttttgtgctctcagacgccagtgcctctgtgtgattctaactcttgcccacctgggagcaggtaactcgggttccctgtggcttgaggaggaagagaaaattggagtgtgtttgtctgtgtatgtgtgtgcacgagcatagagcaaaggtgtggcagcaacctagtgttgagcaggtgctattattgcctggctttacctgcttcttattcagagggtggggcctgaagatctgggattcatcctgacctctggctgggtcacagggttctcaggactccctgagttctcaccacagccctgagggttggatgaagtggctgctgctccatcccaatagaagagcacagtggttcagaacagcctccaaaagggccccttttgcctctggaaaccgggcttgagccctggggagggaaccaccttaggaccgggctgcacataagagacagggctcagggctgagccagttgctgtgtgagggccaaggctgtgttggccaggagcccagggaggtggcagctgtctcgtcgccaagttcgccccttcacacacccccccaagagcctttcatggtcttttgctgccttataggggacagccagcagcttgttgggaggatgagatggtcccttggggcctgtggaaggagcctggggcccccattgttgtgaagtcttgtctgatgtgctgaatctcaggcaagactttcagccctgagagtcccctacccccaccctgggatgcagccccaggcttgaatttgtctacctgtcttaggtggcaaagccctgatcacactgtgggtggccccgccaggtctctctgcaagatgccccctgtctgctgaagtccttgctgtttt

SEQ ID NO: 137124 - DNA, 1893 bp, Homo sapiens
gggctaccttcatactgtgatgcacaggagtgctgggagctggaagacaatgtccctgggctaaggggcagcggagagccttgacaataagagtttctcaaggaggccctctcagtcccaacagttttgacccctttcttccctccactctccccagagtccctgcaggaagcatcacccaggctggcagatcatggtagcagcagcgggggtggctgggaagtgaaacggagccagcggctgaggaggggccccagcagcccccgaaggccctatcaggacatggagtatgaaagacggtgagttatctgttctcagcttcccagacagcctaggcttgcgtctatgtgagaattgatccaagaaggtgctaggatggggcttctgggtagaggaaacagcatagcagatgatgggtttcttttcagcagacaggtgtttggcacctgttgtgagccaggacctgtgctaggctctgatagtgcagtgatgaatgagacatgagattgcatccttctcagtactcagggtgtcacagggacgctatgcagttaacgggtgggaggttgaggttggggctatagcctggggtatgagggatgggtgggaatggcaccatcagagtcaggatttgcccgggaccactaggggacaagccaggtcagatagtggaagactccagggacagtatgggctacagttggcatgatacttgctgggaatggatactctcagacagttatttcttcagctctgctatgaacaaggaatagctggaacactgggtaaaatacagaaatcctgagtaaaattcagtgatccctcgccatccaggtgattccgaggcaggtgacccagccatgacacttgaagattgcctagaaaagcagacctaactctctcagaaagcctctattaagactcaagagtcaatagctttataaaaagagaaaataatttttaaaatgttttacgaagtgtttcttctaccaccactccttttaaaaatgtagaattgtaatattttgttttctgaaaagtgagcccaaatttgagataaggtcatcacctagtgttattcagtcttggctttcattagaaatgttttttgaaagacatttgattttggacggtattcactagaagtgctctgtggccatttctgaatttgagtagctgacatacatactttgttcaaactttattaccaagtaaaaccattgacttttaaaagccctcaagtgcagaggtttgagttcatcatactttccagttcaaggtaggtttctgtcataggtcagcaaaaggcttcctcttgtcatgtttattttttcatttttattcccaattcccacctctgtgggcagctgctctgtcgtgtttgatatgtatccttctatgatacatatcatagaaaatgtatccttctatgatacatatcatagaaaatgtatccttctatgatacatatcatagaaaatgtatccttctatgatacatatcatagaaaatgtatccttctatgatacatatcatagaaaatgtatccttctatgatacatatcatagaaaatgtatccttctatgatacatatcatagaaaatgtatccttctatgatacatatcatagaaaatgtatccttctatgatacatatcatagaaaatgtatccttctatgatacatatcatagaaaatgtatccttctatgatacatatcatagaaaatgtatccttctatgatacatatcatagaaaatgtatcatagatttatcatatagatcattttcatataaatgtatcatatagatacatgtatcatataaatacatacataaatgtatcatatagatacattttcatagaaaatgaaaatatgaagtgttgttttg

SEQ ID NO: 137125 - DNA, 1167 bp, Homo sapiens
ttgccttagaaagcactcacatttgggatttgggatgtagagactgaactggggaggtccaggtagaagtgaggagaacagccaggccacaaccaaggtgccccatgagggaagccagtggcatggaccagagagtgacatagggatggagagaggcaggttgcacttcagagatgtggagcagggatttaggaatccctgtatgggggcgggcctgagggcttccaaagaatagagtagggggagggaaaaatagaaagtttacagggtgagaaacctggcagacactgccttaaccagatgaccatggttaacatcaccagagctaagtcatggtggtatcatgtacttctttctctgataggatcagaagggcacctcacttctgttgtatgctcctccaaaaaaaccaaaaccctacgagaacacatcacctgggcctcttgcaccttttagaaagggcaaccttctgatccctccccatccttcttcctccactagtggtggtcgtggtgacaggactggccgctatggagccactgaccgctcgcaggatgatggtggggagaaccgcagccgagaccacgactaccgggacatggactaccgttcatatcctcgcgagtatggcagccaggagggcaagcatgactatgacgactcatctgaggagcagagtgcggaggtgaggagggggcgcgctgcgccaggcctggctgggatgggctcccaagggccctctgtgtctggctgcagcaccgtgtgcaggcagctctccactcccgtgccttcagactgtgctcggtggctttgcctcacctggagggcctgttcccactcccctctctgagggctcctctcccaacctgggtctccctggcttccacatgcttggctctgtacttctgagggcccctggccaccactctttccctttctccctgttgttcagttcgggcccatggctcactgtgaaccctgtactgcccgctcccagccaacttgggcacttgaagagcctcttccatgggacccggcgtctggggttgggaggacaacaaggggactgcagaccaccaagctgaggagctctgggaggccagccatgggcattcccagtggtgatagagcccctagacagaagggaaggacccttctggagaagcc

SEQ ID NO: 137126 - DNA, 1365 bp, Homo sapiens
atgtgttaggtatgattcagtccccatggcagcccagcagggaaggtactctttgtattccatccttcggatgaggaaaccaagccctgagtgggaatgtgacttgccccaggtctcatagccagtgagtggcagagcagagctggagtctgaacccgggcagctggaccctagagcccactttttgctgcttcctcagccttccctgagtttggagtcctgataagctcttctgtgtgtttttccttttcaccctgtgtatgggtgtgtgtaaggctaatgtcctgtctgttgtttaacctggtggggaaactgaggcccagagacatgaagactccttcccaagaatggctggcataggctcctggtcctcagtgagagacctcactggcctagagaccctgcctcacctgggccaaatcctgaattgcctctgcagtttccctctggcctactccatctgggaagcaatccccaggactacatctttttgctttttgtctccaccctaagttattgctacagtcatggtctagggcacatggctgggatttgctcagactcctgtcctccccagtttgacatttatgtcatggatctcttttgacgcaagctgcaggtcagcagggcaggggcgggggtgcgggttatccccttgccaagggcaagaattgcatcccaggtttccttacttcgtggctgccagcgagccctttgtcagatcaccctgcccaccgttcttaagtggctggctcacttgctctcttgttctctgtgcccctgagggtcgtcctgctgccatgctttaccttgctctgtgcccatttcttcatttgattcactttctgcaagtctggggctgaaagtcaagactgtgaactggtgtgggcctggggctgttgtcactcagggaaaagctgcgaaagaggcggaggagactgtgtgcacatcaccgatgacccctcgggatccagaggcctccagccagcctcaggtacccagcggccccattgtgctgagcctgccctactctgtatctccccgtatagatccgtggccagctgcagtcgcacggcgtgcaagcacgggaggttcggctgatgcggaacaaatcttcaggtgagcttttgttctagtgccctccccttcaagtggccagcctcagcctccgaatctccctcctgcctctgccttctcccccactccctccaccaccttcctgccacagctgggaatgggcagcgtggggggtgccctctcttctctcccactccccacactctcctcacagctccagccaaaagcctcttcaatggggctgtcggggcaggggtgcagctctgagctgagctgggtgctccctgg

SEQ ID NO: 137127 - DNA, 3185 bp, Homo sapiens
gggtggtggtggggggagttgtctctacaggacctctgcccaggctccccaaggcaggcacagtggggcctcactctgcctgggcttctctctccatctctcagtctctcctccccacacctccatctctctctctctctctctctctctctctctctctctctctctctttctccctctctctctttctctctctctgccccccccaactatattattcattccatcctcctatgcatcctaacggttattcttttgaacattaagcatgcccccccaagcccctctcatccaagccctccccatgtatctgcctctaaaggacatgctatcctgaggcctcaaccctgaatccctttcccaagcctggaatcttggttgcatgtaggtcttgctctgcatcaccccaactacaccacacacggacagcttctgggtctctctctccacaaggaggtgttccaggtgcggccttctcaatggccctgggcgcttctcccaggcacccattgattcttacctctaaggtcctcctggccaatcctggccaccattctccttttgtccaggggaacctggactgtttgtggctgtagtctccaccctgtggccctgaggtggctccctagcgaggcccgcctcccctgcgctgcggtgaggctgagatgaggtcgtgtctttaaccgcccctggtttccaatgggccaagagccttcctagcctcgcagagcagcctggcccagcttctcttttgctcctgtgattcaacacctgttacaggacccctcctgggcacccctggccttgagctgggcccgccctggagttacgtattgtggcttgtgtggagccagcagcctgcccaccatcccctccctccttctttggaggcagatctctcgtattctttccctcccagctgcttctctccgtctctgtcaccccaggctggctgggcaggtctgcccgagccccatctctctcttcccagttggtgtgtgtgtctctccccctaccgacctctggcctctgtttttctccctccaccttccctgccccacctggccatctaccttgccccccacgcccgctagtctttctctctctgattgcctctttctctttcttcctttttcctcttcccctttccctctctgccccccgtcctctcccctcgggtcccgcccccgggaacgccgtgtgtccaaagctgttgactaacccactgcgtctgtatctgaatgctgtctccaggtcagagccggggcttcgccttcgtcgagtttagtcacttgcaggacgctacacgatggatggaagccaatcaggttgctttgccgcacttgaacccccccccaaacaaatactactttgtaatcgagcgctccccatcgcctgattcttatggacacagttccctgccctgtggccctgtgtcccatccccccgccccctctctccccttcctgaccctcactatctcctcttcccatctctcgctaccccactgggcttctcatccagagcccacactcaccactggccccttcctaccaccaggcactagtgctgccccttcacctctcccagctgagcgttcagagaaagagctgccagggtgggttctttcacctagcttcccactcccccggggctggtggggggggcacccctctctggggttagccagagccaggacctcattccaccctcaggaccactggaagtcctgccagtgaggagcttagctattggcacagtcactagcaagactcattttgtcagccccatccctgcatgtgaatttggccctttgattttcatgcaaggggacagcactgctctgttgatctcaagttcccgtcgagtatgatagttttatcgacaccctggcctcacttcgccgcccctacccttcctatcacatctccacactcgcaggaggcaccacctcaggcagctctgtcttctcggcaaggacctgtgcacagtcagccctggggggagcctgtcccccaagcctggcacgggatcccaactcagcagctttgggacctccgagacccaaagatctgcctggtcacccacccctgcccagatccctggtgtagggcactggagagcagtttcaggggaggaaggggcagaggtggtagaatgggggatcccggcagaggcagccctggggccgtctcctcggggttggtaggctagtgccatgggcccaggacccagccatccatgggaagacggcctcatggcagaaacttccatctgttcgaaatggctctttctttttccccttctccagcactagcgcacctgcgctctctttctctttttctcccctctccctccccctccctgtctcccctcaccccccaagtgtagcctgtgtagtcctggccctgggtgtggcctggcagtgtcagggccgagtgggggtttctccccactgtccggcaagcgtcggtcagccgaacactgtgtgcctggtggtgtgtgttcacatgtgtgcgtgcgtgtgcccggcagagcagcaaacagctgcgcccgagagctgtggcgctttccctccctacctcccttcttccctccatccgctctccgacctccctccgttccctgtccctcatccatccagctgaagggctcgctcactctcttctcctatgctgaaacggtgcgtggggcactgctgcctggacctcactgtgctctgctttttcccgcagcactccctcaacatcctgggccagaaggtgtcgatgcactacagtgaccccaagcccaagatcaatgaggactggctgtgcaataaggtacaggggcggtgggcagcagttgtcatggacagagacagcaacagcagtggcggcgatctctcccttcctctcccgctctttctccctccatctctccccctcccccaatctctcctctccctctgtctctctctctctctctctctctctctctcattctctatcccttgctagctcagcttgagtagtcaccattcctagccagccatatacaaatgtgtagtgagcgttcacttggtgcaggctctgtcctcctaaaatgcagtcttgcctggagttccagtagactttaaggaaatatatacgtggatgatgaattagtgacagtgtagacttgaagtggtggtgtggagaatgtgg

SEQ ID NO: 137128 - DNA, 1120 bp, Homo sapiens
tgtttgccaggctggtcttgaactcctgagctcaagcagtcctcacgcctcagcctcccaaagtgctgggattacaggcgtgagccaccacgcccagcccaaaaccagggaattctcttgaactccttcccctcccctgcatcctgttggccaccaggtcctgtcacttccatcacagaaacgccaccttccctccctcgccattcccgctgctcatgccaatcgtcacgctctcacccactcactgtggagccctctctggtatgctggcctcttgtcctctttctcccacgccctcacctggaacattcctcaaaaccacctctgactacccacgcctctcctcctctgcttaaccagccccagctcagcttaagcataagatcctccattacctaactggcttccttccccggccttggcttttgcttctccccttactctcccacaccagtttcggaaagtccattgttccctccgataacaatccctccccagcaaggcttaacaaaatgaaacttctgggcatcccaggtcaaacctccctgcttctgtgcagggactgtccctgccgagtaaatggcaccccacccccagcccatttccctccccgagcccctgctggatggtccatgcagaccgacctgcccctcttcatgctgcatctgcccctgtgctattaggccatgagggcagagaccatgttctggccatgtgcagcagggcctggcccaggagtggtgcttagtacctgagtctggaacagagatggagtgtggtagaagctgggtctccagatgctggaacattcaaggaaaatttctcaagcgtagcaggatccaacccagtcctagagctaagaggaggggtgcgggtctggctactgacttctagggctgaaacactgaaaggtttctgaatagaggagcaagtttcagggagaggaacctaataaagggattgaatacctgaggcggggaacagtcctgggagttggtggccttaagaaggcagaggaaggagaggagggagttgttgtaccaaatgggggagttgtttattcctgagctgagtgggttggcacagaggacaaatgagagtctggaaagggaagatgcac

SEQ ID NO: 137129 - DNA, 1049 bp, Homo sapiens
gaccccaactcccaggtaatagggcagcccagggagggatgggatcgggtcaggtcgcgtcaggaacagctagccctgcaggttcccttcacaaggtcttccctcacatcccctcttccctcctcctccctcagtattactacaatgctcagagccagcagtacctgtactgggatggggagaggcggacctatgttcccgccctggagcagtcggccgacggacataaggagacaggggcaccctcgaaggagggcaaagagaagaaggagaagcacaagaccaagacagctcaacaggtgaacaccagggtccagcagtcactggctggctgtgtggtgtcttccagcaacggcactctgtcagctcttgccctctcctgccaagggagatggcgggcaggtgtggatgtgggcagtgactgcttagcagaccatgctcttgccccagctctgctctttgctgaatggccttgagccagagcagtctcctcagtgtgtggcagggttgcccaactccaggaggtggcttgtgccatccgagtgagccctgtcaggtgtcttctgtcccatggtggggaccctcacattctgctggtgaatatacatgtatgccagagaaattctcacaggccataagggggtgggcaggaaaaaagccctgcaatgttttgtgggagtgggcagatggagggcacctcagtgtctctctgtggagaaagggtgtgacactgtgagcgtagcgtttacaagcaagcactaagtgttaccttagcaacctgatgaattctaaaaatggtgctgtgctggggggaacatggaaatatagaatgtggcattgtgtcatgcatataaagttatacacaaataaacattcctatgcatttttaaatgataaaatggaaatgcacaacaaatgtgacagcgtgggtgtatgtcaggggaagaggagtgtcttcatccatttgctgctccataacaataccacagactgggtaatttataaggaaaagagattgatttggctcacagttctgtaggcagggaagc

SEQ ID NO: 137130 - DNA, 1169 bp, Homo sapiens
cggatggttggcagggcatgctggggcctggcccactgaggctcatcctcttcacttctcatcctgtccctcttgcagcaaaaccttgagattcaccggcgagcccacttgtcagaaaacgagctagaagcactagagaagaatgacatggaggtgaggtgtgacctgaccctgggctccctcccctgtgtcccttccaagtccccatcacctcaggcagctggagttcaatttctcacgtgttaaccccgtgagccttcttccccattttcctatcctggctgcttgtgcctgtgatggcctgaccctcaggacctgagcctcattagccagatggcatgccctgtgggaccccactccccatgcctgtgttgcctgagaaaagagaccagctccccaacattcacatacacatacaaactttcagcaaatgaagtaccgggaccgtgcagctgaacgcagagaaaagtatggcatccccgagccgccagagcccaagaggaggaagtacggcggcatatccacagcctctgtgtgagtggctgggccaggtgagggggtctggagcccggggccggggccggcaggccgaccactcatgctgtgcaccgcccctgcagagacttcgagcagcctactcgggacgggctgggcagtgacaacattggcagtcggatgctgcaggccatgggctggaaagagggcagcggcctgggccgcaagaagcagggcattgtaacgcctatcgaggtgagtctcaggcagtcctgtcccatcccccagcacccctcacagcatcccccaccagcctgacagagcctgcctccctcacacaggcccaaacacgggtgcggggctccggcctgggtgcacggggcagctcctacggggtcacctcaaccgagtcctacaaggagacactgcacaagacaatggtgacccgcttcaacgaggcccagtgagcagcttcaagagcaacttctccacatgttgggtgtccatcctggggcagggaaggacagagtgttggatggctgggacggggccttgctcttgtcggccagcccactccccagccagagagggcttgaccaaatcaaattgaggtggtgacttttgttggaaaattgggctgggatcacgtcctgttttgtaataaaagctgaaaa

SEQ ID NO: 137131 - DNA, 1093 bp, Homo sapiens
acaggcatgcaccaccacgcctggctaattttttgtatttttagtagagatggggtttcaccatattgcccaggctggtctcgaactcctgacctcaggtgatccacctgcctcggcctcccaaagtgctgggattgcaggcgtgagccaccgcgcctggccatggccctcttgttttctactgcagtagaaaaccctcttctcagcatctaccttcagcgcctccatggggtcctacataattggtcagagaaacccaaccccatttggggacctagccagtgtttgcttattaacctttttaaggcctgcactatctgggcccagcttcccgtttccacaccctcagagcagctgtgatacctagcatgtcctgtcagagattgacacagggcctttgtgttccattagaaacctctcccagcccctcaccatccaccctcacagcctcctgggactctgtagtaggaatgtcagatacacctctcctcttgcatgtccctatctattatttttggttaaagatttctctctgctaccagcatctgtctccagagtcctccagagcctcaacatcctcctgatggaggctgcctctccccccagaccccaacatcttcctgctgcctcctcagactctagaatcccccacccattccctttgcagcttccatggggcccagcaactgtcctcctacctccttgcagccttgggggcctccactgcaatttttcagcctttctccaaaagatccttttccagagatccgaatttgagtcttttcctaataccctagcctagtcctttccctcccaggacttctaacatctcctttcccatttgtctcagagcctccttgctcttagacacccacttcctgattctcctctcacgttcccatggacttctcagttaacccctcccagaaagcttgacatgctccagccccccttctctatgccctagcttctccatcctgctaacctgcctcctctcacacctccaagactcctccctcaaaccctctggtttgggaatagagaatgcttacgcttgaaaatcttcagtttggagactcaggtatgtttagaa

SEQ ID NO: 137132 - DNA, 1953 bp, Homo sapiens
ctatctttttgcaacctcttttattggtctgtgtcggttttcccctcccaaagctgggggcagggttgggctttataaaacttgagcccctctggggactgggttctcagcaagttaccgctcctgccatcatgccaccctgatggatgtccaagcctcacttccctcctgcactccccgctcccgccgccatccctgggattaagggagaggagaatggctgcttgttactgcctacctactctgtgccaggttctatgctctgtgttatttatcatctcgataaccccgtggggaaggtaagtggtattatcacccctgtttcacaggtgagaaaactgaggcctgtggcggttaattattactgttagtgcgtggcaggctcaagatttgaaaccaggtctgtcctgaatccacatccttcccctgacctcgacacaagtacattcttgtcattcctttcactccaggattggagtctctccctcattatgctgggctgggaagaagcaaatggcttagtggtcagcagtgtggatttgcaaatcagaccacctgggttcagatcttaggtctgacagctgtgttaccctgggcaagtcctcacctttctgtgcctgtcccctctttgctgtaaaatgggggtactaatacttaagtcttcccttcccccacagttgctactaacaaacagaaaaacggtacccatgtgctccagggtcacctctgacctttttttcctccagatgtccagctcgccgctgtccaagaaacgtcgcgtgtccgggcctgatccaaagccgggttctaactgctcccctgcccagtccgtgttgtccgaagtgccctcggtgccaaccaacgtgagtgtcctctccgtggagactggcagacgaggtggtgggtgggaaagtcttttgtatcactgtctgtctatccatgctccactcctgtgtgtctccctaaacttgttcttttcctctattcctagggaatggccaagaacggcagtgaagcagacatagacgagggcctttactcccggcagctgtaagtggggccaaggccgggctgaggggtgtggaatgggacattgagaggataaggttgggtggggcaggccctgacctagagtaccccctaacctggcaggtatgtgttgggccatgaggcaatgaagcggctccagacatccagtgtcctggtatcaggcctgcggggcctgggcgtggagatcgctaagaacatcatccttggtggggtcaaggctgttaccctacatgaccagggcactgcccagtgggctgatctttcctcccaggtacctcttcctagcacccttccccctttcccccttcccgaggcaccactgttcccggtgccacagccatttcatctttttccctactgcacacccttacagttctacctgcgggaggaggacatcggtaaaaaccgggccgaggtatcacagccccgcctcgctgagctcaacagctatgtgcctgtcactgcctacactggacccctcgttgaggacttccttagtggtttccaggtatcttgggggtactacccagccttctgcccagttttctcagagcccatctctggtttattcagtagtgttcaatattgatttaatgggtcggcctgaatgtcaggttttgtgctgggggactagagtatgcaggcagcagttagcccctggccctgccttttcttttcttctttttttttttttgagacggagtcttgctctgtcgcccaagctagagtgcagtggcgcgatctcggctcactgcaagctacacctcctgggttcacgccattctcctgcctcagcctcccgagtagctgggactacaggcgcctgccaccacgcccggctaatttttttttgtatttttagtagagacggggtttcactgtgttagccagggtggtctcgat

SEQ ID NO: 137133 - DNA, 4591 bp, Homo sapiens
ttgttttcctgtttgtagtcagtgcgtggtagcagcactgacttcatggactttttgtgagggttaaacacgtggaattgcagctggcatataaggactggatgggtgtttgttaattaaaaagtccaggccggaaagaggtgctctggaagctgagagttgtccctggagtatcccaggttgccagggcactgcagctaaatcctgatggaggagtaggagctcaccctggtggggaaggatggacattcaggcagagagcaaaatcccaaagatcatggcggagcaggcgtcgtcttgagaattggaagcaggtgggtgtggtaggagtgagctcagactttggctggagacagagttttactccagtgtctcacagggcatggcagacagacagcagcgggtgtttgtcaaataaatgagtcagctcttctccaaactccctcctcccagctacctcttcacctttcctggtatagtccaggggttcattttcgacccccacagagtctgatacacagtaggtgctatgtgtttgtgaaagaggctgacccagcaaagcctggatgtgtttgccttgaggactgcctgagtcctccacaccagccctccattttttccccttcaccccaatgctgggcctgagcctccatctctccacaggtggtggtgctcaccaacacccccctggaggaccagctgcgagtgggtgagttctgtcacaaccgtggcatcaagctggtggtggcagacacgcggggcctgtttgggtgagtggcagcccacctccctccctgtccccttttcccccaactcctaccaagcccaggccaagactctaggctctccctgccctcatcccttctcagctacccaggttttgggttctgtgttttcatctctccccatgtggcacaagtaccatcttacatcccagcagtgataggctgagtttgctcagcaagttttcactacatcttgagggacccgtgggacctgtatgtgcatgggacacaggcaccagccctattgcttccctctacaggcagctcttctgtgactttggagaggaaatgatcctcacagattccaatggggagcagccactcagtgctatggtttctatggttaccaaggtaaggagaccagccctagggttcctggcaggcaggtgggctgcagtagtccttcctgtctgctcttggtaccctgggcctgtttctgagactcactcttcctttaaccaggacaaccccggtgtggttacctgcctggatgaggcccgacacgggtttgagagcggggactttgtctccttttcagaagtacagggcatggttgaactcaacggaaatcagcccatggagatcaaagtcctgggtgagctgcgaccatgggggaagcagaggggaactagaagatatgttcctgggttctggccggggagttgaagggagaagacatggcccttggttcagagttgggaagacacatcctggtgtttgagatgaactacagacaatcctgtggggtccaataagagctggtgggcatgggggagaggtactgtgtttgagctattcctgggagaatgtgtccctggtatctgagctgagtggggaaaaagtctctggtgtttgaacagggcagatcagcggatctacttgtgtgtgagctgatttggatgggaagcagagaaggtcttcccgtgtagacttggagccagggacacagggtctcacggggtctgagctgagtctggggcacaggagagatggtttctgatgtccaagtggagcctggagctgagggaagacagcttctgatgtctgagctgagtcggggcaggaggttccttatcttgcaggggttgtggattttagggagaatgggtagactgacagctctcttcctgccctctgtaggtccttatacctttagcatctgtgacacctccaacttctccgactacatccgtggaggcatcgtcagtcaggtcaaagtacctaagaagattagctttgtgagtgtgtcgatgggatcagtgggctgtggggggtggttctaggcattccctagttctccattcctctcttctggttctgatgacctctccccccgccacagaaatccttggtggcctcactggcagaacctgactttgtggtgacggacttcgccaagttttctcgccctgcccagctgcacattggcttccaggccctgcaccagttctgtgctcagcatggccggccacctcggccccgcaatgaggtgggtgagtgggcgagccagccagcgcagacatgcctggcactgcaggctcaccatgcctctctgcgtgtccacactccctgccctcactgtggcctgacatatcctctcttggttctttctggcccaccaggaggatgcagcagaactggtagccttagcacaggctgtgaatgctcgagccctgccagcagtgcagcaaaataacctggacgaggacctcatccggaagctggcatatgtggctgctggggatctggcacccataaacgccttcattgggggcctggctgcccaggaagtcatgaaggtcagcacgggtggggagaggcaggattggggtgggccaggttcctccatgactctgtcacttgctctctgtctgtgtcaggcccctgttaaccactgaccaccccctctctcccttcccctctccaggcctgctccgggaagttcatgcccatcatgcagtggctatactttgatgcccttgagtgtctccctgaggacaaagaggtcctcacagaggacaagtgcctccaggtatgtgggtgggacctgtggggagggcatcattggggacatttctggggaggcctctctaaccctcctccctttgcattccttagcgccagaaccgttatgacgggcaagtggctgtgtttggctcagacctgcaagagaagctgggcaagcagaagtatttcctggtaagtggtccccttggatgtctgctcccctcatcttggcctctggccatcacccctggggcttccttcggcatctcaatgcaaccggtggcgcattctctttgccattctccttatcttgaagggaagcccagtgcatccctcgtttccccttctggtgcctccttcctcacatgactgcgtgtcatttcttagagtcctgcaacctgaagatgtggtgttagcccctctccccgtctctcaggggagtgaggggtgatgggtagcttcacactaacctgcatcaccctgaccagcctctgcctgtcttcttggttgcttcttaggtgggtgcgggggccattggctgtgagctgctcaagaactttgccatgattgggctgggctgcggggagggtggagaaatcatcgttacagacatggacaccattgagaagtcaaatctgaatcgacagtttcttttccggccctgggatgtcacggtgagtagggtaggaggttggggctttgtcgtctcactttcctcctttttctttttttttttttttttgagacggagtttcgctcttgttgcccaggctgtagtgcagtggcgtgatctctggcccaccacaacctctgcctcctgggttcaagcgattctcctgcctcagcctcctgagtagctgggactacaggcatgcgccaccacgcccggctgattttgcattttaagtagagacagggtttctccatgttggtcaggctggtctcgaattcccgacctcaggtgatctgcctgcttcagcctcccaaagtgttggtattacaggcgtgagccaccacacctcacccctcctttttcttgttcccattctttctgtcagagatctttctgcctctgccagaagcccttctttttggcctttctttccctcagcttctgttttttttttttttttttttttttttttgccttaacctctttttagtgctggttgggacagtgtgtctggggtcctcaaaactactctcaagctcaattcacctagagtacttacaggactcagcatatagtcgtgcttgtggctacaatttattacagcaaaaggatacagaccaaaatcagcaaagggaaaaggctggtgcaagtttctaggagtcttctcccagcgggagttaaacaaggcggcctttatttccccagtagcaacagtaactacagaaataacagcaacaaggtgtaacaagacatgaaatgttgccaaccagggaagcttgttagactcagcaccacctcttttacttggggctggtcatgtaggcgcccccttcctggcacataacaaaatttccagactcccagaaggaaaggtgttcagcgtaaactgtattgtttgcatgaacggtttaggcacagtgaaccactgataccaggtagggagcggtgggaaccttcctgaattccaagttcccagacaccagccaaggagccgaccttggaagcaggcctttccaagggttgtagtttcagtctcctaggcttacacttctctgcacatatggaaactgggttggttatgcagggttctctgagaagctttctgtaaggagcagtgtcgtttttg

SEQ ID NO: 137134 - DNA, 1184 bp, Homo sapiens
gcggtggctcacgcctgtaatcccagctctttgtggggccgaggtctttgagctcaggagttcaagaccagcctgggcagcatgacaaaaccctgtctctaccaaaaatacaaaaattagccacgcatggtggcacacacctgtggtcccagctactcgggaggctgaggtgggaggatcgctggagcctgggaagttgaggctgcagtgagccgtgatcatgccactgcattccagcctgtgtgatggagagagaccctgtctcaaaaaaaataaagatgtttgttgggtgaatgcacaaataagtgagctttgttcccccatccccaccctggaactgcactttcttaaccctttagaagttaaagtctgacacggctgctgcagctgtgcgccaaatgaatccacatatccgggtgacaagccaccagaaccgtgtgggtcctgacacggagcgcatctatgatgacgattttttccaaaacctagatggcgtggccaatgccctggacaacgtggatgcccgtgagtttggaggcgggtgaggtggtcacgggcaaagttgtgtgtgtttcggtgtgtatataccaagaggggtgtccgtctttctgtcctctcctgatgtttctttcctagctctcgctttgtgctccccacaggcatgtacatggaccgccgctgtgtctactaccggaagccactgctggagtcaggcacactgggcaccaaaggcaatgtgcaggtggtgatccccttcctgacagagtcgtacagttccagccaggacccacctgagaagtccatccccatctgtaccctgaagaacttccctaatgccatcgagcacaccctgcaggtgataagctgtgggagaagggaaagaggccaggcatctggccaggctgctgcctctccgcccccaggcccttgccttgccttcagatgttgcatgcctaagtgtaagatgtgccttttctccaaacctccctccctcacttcccaccaggcagcctaggtttctagaatgactcattcttttttcacttttattttgatttttttttcaacacatagacaaatattaagaatattatgatgaatactcaaataccattcctcacctaaatttaacaattcttaatgttttgccacattttcttcttagatttatgtagatttttctt

SEQ ID NO: 137135 - DNA, 1056 bp, Homo sapiens
agttatttatttgtctctaatggtccatattcaggttttccccagctgttactcaaaatgagtttaacagctggtttgtcaggatgattctgtgtgtatggtgcatttatctacagaacagtgcatatattatctagctcggggtgtccaatcatttggcttccctgggccacattggaagaagaattgtctcgggccacacataaaatatactaatactaacgatagctgatgagctgaaaaaataaaagaaaaaaagatccgtgcataaatctcataatgtcttaagaaaatttacaaatttgtgttgggcagcattcaaagtcatcctgggctgcatatgggccacaggttagacaagcttgatctagctgaagttttacaaagtgaacacacaggtgaccaccacctgggccaagaaacagaacctagggattaccattgtgctgtcagaataattcttagtgcagtgtttgaggccaaaccatttagaatagtaggagtatgagggtgggaacaaaatagggaagggaaaaaaaaaacagttccatctgtcactttctcccttctgacactgcagttccagagtgggtatgtttgtatttgtgcaccaaccacagtcttgctaggtcatgtgtaaccttgaacttaacctctctgtgccgcagattcctgttctgtaaaatgggaatgacagcatctacctcacaggactattgtgaaccacttggcatttactgtgtgcctggcactgttttaaccaagctttaaatatatatgtatttgctcatttcttcctagcaaccccatgaaggtaggtatcactgttgtaacacctgttttagagacaaggcacagaggtaaagatgttatcctgtgtgcctgaagtcacaaaactaggtaatacgtggcatagctggaatctgaacctgaatttctaacatctgtacactccaaaccacctcgctaatgactgcgaactgtcctaggaattctcagaggccagaagttctgtcttgtttgctattttattttttgagacaggtctcattctgc

SEQ ID NO: 137136 - DNA, 5058 bp, Homo sapiens
gtggagttttgctcatgttgcccaggttggagtgcagtggcgcagtctcggctcactgcagcctccgcctcccaggttcaagcgattctcctgcctcagccttccaaagtgctgggaatacaggcgtgagccacctcgcctggcactcagatcttaatacatttttaggctgggcatggcggctgacacctataatctcagcactcaggaggccaaggagtgaggtttgtttgagcccaggagttcaagaccagcctaggcaacatagcaagaccctgtctctacaacaaatcttaaaaattagccgggtgtggtggcatgtgcctgctgtcccagctattcgggaggctgaggtgggaggatcgtttcaacctgggaggtcaaggctgctgtgagccgtgattgcatcgctgcactccagctcgggtgacagtgtgagactttgtctcaaacaacaaaacaaaacagttttccacatacacagcactattgtaaccactgcccaaatcaacttcattgatttttctttttttgagacagtcttcctctgtcacccaggctggagtgcaatggcatgatctcggctcactgcaacctccgcctcccgggttcaagagatttcctgcctcagcctcctgagtagctgggattacaggcatctgccaccacgcccagctactttttgtatttttagtagagatggggtttcaccatgttggtcaggctggtctcgaacccttgacctcaggtgatccatctgccttagcctcccaaagtgctgggattacaggtgtgagctactgtgcctggcctggtttttcaattgaggtgggggaatggggaaggctagagggcttccccacttccagagtagctgtgcgccttgtacttgctttattcactgatggtccttctaataatgcctgcggaaacccattttgtcaactgtggccacatgtaatctgtttgctctgtctgcagtgggctcgggatgagtttgaaggcctcttcaagcagccagcagaaaatgtcaaccagtacctcacgtgagtaactcgagtgccctctcgccctgtccctgtccaccagccaaggcatcccggctgctttcctcatgacagtaacacttggcaccaggcacacttttcacatgaatgagtggctgttggggcctcatgttgtttggggtcgggactagttttccatggagaaagtaagattgctctggagcccactcttgaggctgacatgtaatcctatcctctgtcctcttcgattcctgatagagaccccaagtttgtggagcgaacactgcggctggcaggcactcagcccttggaggtgctggaggctgtgcagcgcagcctggtgctgcagcgaccacagacctgggctgactgcgtgacctgggcctgccaccactggcacacccagtactcgaacaacatccggcagctgctgcacaacttccctcctgaccaggtaatgcccagttgttgggtccatttggcagaatgtgtttccctgaaatgggagcctgcagtgtgggtcctcccactgtggagtccagctgtggcaggtgccctgaggcatggggatctgagaagagtgattgatcctgacctgctttttcctcaccctagttcctttgagcaaagaggcttggttgctattgcccttgactgtggtgtgggctgcgtcatacctgattcccagtcagggctgtagggattatgggggagaaattctggagttaagagcacaggaatcaatatgggttcaaatccaaactctacttgaacttaggcaaatcacgtaacttctctctgtacctcagtttcctcgtctgtgaagtagaaataatagtgatctatctcatggggggtttggggaggattaactggtatttattaaaatgaagttagtacaatgcctggtaatccatgagagtttgttaaatgatgggctgtttagcacaaaatggctacccagtgattggtaattgttctctcagccagatctctggttcaacctgtgggaccctacagttgaggtattttgtgattggctccagtccgcatcgagtgcccaacccaagatagtgaattgggggcacatctggggcctaggtgaagcgtgaagattgtcagagaggccttcactctcaggtcctgttctcaaaaatctctccatcccttagctcacaagctcaggagcgccgttctggtctgggcccaaacgctgtccacacccgctcacctttgatgtcaacaatgtaagtctcctttctagggtcttctggggtcaggtggagggtgaataggtgggaaggaggtggcggctccccactcgagggctgatgtgctcacccttccctgccctgccttctcctagcccctgcatctggactatgtgatggctgctgccaacctgtttgcccagacctacgggctgacaggctctcaggaccgagctgctgtggccacattcctgcagtctgtgcaggtccccgaattcacccccaagtctggcgtcaagatccatgtttctgaccaggagctgcagagcgccaatgcctctgttggtgagggtgtttggccagttggccaggagtcaccccacatgtccccggcctagtccagcctccccaccagtcctctacccctggttctgctctgctctgtgaccccaggcctgaggtttacccacaccttcctttgagcctccctttgacatgaagagggtaggttggggcaaattatctccctccctcctcctccttcccactatctggccctcaggagaacttgctgttttactcttgctctgtgtatttcccttagttttgttctttcttctgtttcttcttgatctgttcatctaggaggtatgatctctaccagcagtctctctcccttgatactttcctgccttgtctccttccagatccgcccccatctgtacatctacctgcatgtttctctgtgcatcttcaccctccatagtttggggctgcggtttactgacacccccaccccaccccatctgcatattttttcaccacccctcccttctgtatatgatgcttctgtagctctgtaacgccccctacatttaccttccttatatctcccccgtcttcctctccatagatctcctcccatttccccttccatggtccccatcttccttctgaaatgtctactccttcatgttcctttatgtatgtcttccaatctttccttccatagctctcatcaccttcatatatttcttccatctttctcctcccacctgcctcgccctctgtatatacccccactctcccccttttatatcttctccatctccccccatatctttcctctatgtccacatctgtgtattccccccaacttcccctccatatatcttttttactccccttttcctccctgtatcctctgtgttccccccatcttgctctacatcattcttcccaagatctttacgtctcccatcttgatctctccatctccactttctcctaacattttcatttccgttccttagtgtctctagagagatcattcttgatagcctcagctctttctctgtgtttttcaggtttgtattctgctctgctctacctctcctccttgccccttttctctcccaggatgtctctcctttccaaatcctttttgtacctgaataccttttgccccaccctgggctctcatttccatctcagaccttagcctgggatctaaagggctgacagtgtccctttcttcatgcagatgacagtcgtctagaggagctcaaagccactctgcccagcccagacaagctccctggattcaagatgtaccccattgactttgagaaggtatggggtggggctcaggacagggaaggaggatgggcaaagcatagacaggctggagaaaacaggagtatctggagccagccccgggcctttgtggggatcagattgtgggcctgccatatggctctgaatgagtaggtgttcccagccatccctttgtgatctgggagagtccagcaggcaattgcagtggaggatacacatcttctttatctgatcctctccccactgccttcacaccctccccactcataacaggatgatgacagcaactttcatatggatttcatcgtggctgcatccaacctccgggcagaaaactatgacattccttctgcagaccggcacaaggtgaggggaatctaaatctgatgttccaccctcctccaggtttgagttacccacacttagcccctctgtagaccctgaggctcttgtacttaactaccaccttcttttgtcccttctgtctctcagagcaagctgattgcagggaagatcatcccagccattgccacgaccacagcagccgtggttggccttgtgtgtctggagctgtacaaggttgtgcaggggcaccgacagcttgactcctacaagaatggtttcctcaacttggccctgcctttctttggtttctctgaaccccttgccgcaccacgtcaccaggtgggggcctgcatccgaagcagggtttgggtggggtgtatctgtgtagatctggttctgattcacgtcataccctgtcaccaggtgagggtttctgtctgtgtacctaccctttttgtgtatcctttttcacttattcattaatcacattatttgagtacgtgcgaaaagatgggatatttgaattgtgccctgggagattattagtaactacacaataatggcagccaaaatttattggacgcttcctacacttaagtgctttgcttgcttcattaatgaattcactcaaatatttattgagcaccttttgtgtgcagggactcttctaagttatgttcctcaagtagattatataaataacctattaaatgattttggaatcaaaaaaggataaaaagaggccgggcgtggtggcttacgcctgtaatcccagcactttgggaggccgaggcacgtggttcacctgaagtcaggagtttgagaccagcctggccaacatgatgaaaccctgtctc

SEQ ID NO: 137137 - DNA, 1531 bp, Homo sapiens
taccaagataggggtgtgcctggcaagttggaggaattcaaagtccccagagtgagtgtgagattgaggagggtaggagatgagaagaaaacagaatttcattgcttagggtgagataggaaccacaagaggatttcgaacaaaagagggttgtgatctgactaaacacgtctgcatgggggtaggggggatggagacagatgggggctggaccctctgggatggtctccatcttacactcccctctttgtcttgcagtactataaccaagagtggacattgtgggatcgctttgaggtacaagggctgcagcctaatggtgaggagatgaccctcaaacagttcctcgactattttaaggtaaggcccctcccttactctgtcaccccacctcagggggcgaggtgtacacggtgacttgctggcctgtccacctccatgaccctgctgttccccctccctctccagacagagcacaaattagagatcaccatgctgtcccagggcgtgtccatgctctattccttcttcatgccagctgccaagctcaaggaacggttggatcagccgtgagttggacactggccaggctaggggaggccctgtatgggttggggagcctcatcatccagctgtcccactccagttcactgcccctacctacctgcccatcctctcttgctttctgccctcctgaccctatactcccatccccctatccccaggatgacagagattgtgagccgtgtgtcgaagcgaaagctgggccgccacgtgcgggcgctggtgcttgagctgtgctgtaacgacgagagcggcgaggatgtcgaggttccctatgtccgatacaccatccgctgaccccgtctgctcctctaggctggccccttgtccacccctctccacaccccttccagcccagggttcccatttggcttctggcagtggcccaactagccaagtctggtgttccctcatcatccccctacctgaacccctcttgccactgccttctaccttgtttgaaacctgaatcctaataaagaattaataactcccacatcgcctgccctgctggttccagggaaggaagggacttcctggagctgtctggttcagatgataactcagagggctcaaccccaccacacctgccagttttctggacaaagaaaatgtaattgccacctcttcctgccctctctgcctaggaagagatggaggcaccagtgaggccatagtgagcaggtacttgggtccatgtgactgttaatttgagctgggttcaattctcaccttctccatgtcctaactccttgctctgtgaagaggaaagttacggtgaccaggctgctagggcatggccagcgtgccttatgtccttagggcagatcccctcccacctggctcaaagcactcagaccctgggcagccttttgtggtcatggttcccagcaccaggaatgcctgtgctgctcttagttcaatttccttgctgcaggggtgtcttaaacagctctgccgaatgcca

SEQ ID NO: 137138 - DNA, 1039 bp, Homo sapiens
gatttttatggaaatacttgagaacatctgtagaggaaaagcccgttgcttgccttacgcttcccccggccctgccgccgccccagccccaggtctgcctgtattccccttgaggatcttcagcctcctactttggagaagacagctggctgtggggactgaggggtgttcatcgcttagagcaggtagcaggaggcctaacaccagccccaccgggactgcagagttaccgtgctctgtccttggtcttggctgagtgctccagacaattgaaagcaccagtctggccactgctacatctttgccttcttctattgtactggctcctggtgcctgaggagtccattcatacttctgttcctcaactaaccaataatttatctaccttacttagaaacaagatccctcactcttctactcaaacctgagtgtaaggaatagctcaacctgttctgaactggcttgattcccatcacagcctgtgcccacatctgctgcctcctgggccagtagttcctggtcctgggcacagtatatgcccttgtccacctccttctgatcattttattttcttggcctgctctgcttgggtgaccttatccttccacagtttcttcttccccactaggacgttgaggacagaggcattttccctttggtatctagtggtgatactgtcaaagggaaagtttttcccaccacaggaactttcccattattgctctagagtaccctagacactccacaccgcagtccactggccacaccactacagcagctgaggcttgaacacaactgttgtcttctttctccagtatgccagctcctttgcggatactctatagacaccttgttcactgcacctcccccattacggctccatgtcttccccaccacaactcctggatctccttgacaccttattcgtgcctgacacccttctccatcaaaacaagcttttgagtcatgcatgaatcctggttgcatcttagttgttccccctccacctcattccattttacttctgcggtttgtctac

SEQ ID NO: 137139 - DNA, 2519 bp, Homo sapiens
atggccggctgagcgggacgccgcctccgcctcagccaccgccgccgccgccgcctcctcctcctcagccggcggcggcccgggcccagcaaccatggctgaagactactgggacgggcgcctgcggcgaacaggaggagaaggaggtcgcgcggcctcatcccgggccgccgccccaggcgccgccgcgccggccccgcggctctgaggttgctcgcgcgcccccgccggtgagcgcgtccccgaggcgtggaggctgcccctcctccttcagaacccacctcgggcggtgcccaggggtctgggctgcggggctggcaggtgcccccacccccggcgaatttcccagaatgcaccggggcggggggtcatttggggcctccctgaccttggccccgccctgggcctgtcctgggagctggggttgggtagtgctgtgggtgctaatggggacctgggggagtcaaaggaccaaagggtgtggaaatgggtgacaatggggtgaaagacttgggggggttgctgatgggggtcggagcatgtggcagtaagcctcacgccaataagtcgtgtaaggttcaaggccccgtgtgtgcttgtggaaggagggcggggtgcggagcgggtgagggacccgagggtgtataacggggggtagggtgtcgaggaagttctaagacatgctcatagggattatgtccgcagagaggcccggtgtgtgttcatgggggacagggtggcacaggtaccagaacgtgtgttggtggggtcagggctctgaggcctggtgcgtggcgatgaggccctggatggtgttaatactgcgtgtctgtccgtggggcctgcagtgtgtgagaatgcagtgtgtgcttgtggagggcaggtagctgaaggactcgagtgtggtgtgtgcgccagtgggggtcatggctgtagagggtgtatgcctgtggcctcgaaggtctaggtagtttgggacccagtatatgctaatgagggcagagtggaggaaggacctgagggtatctaacggaggaaggactgtggaatacctgagcctggcctaaaggagatgagaattgcgtgtctgtctgggcccaggaaggagtggtggggaagtgtcttagcactgtcagaggcttagtggacgaagggtaaaggtgatgtgaggtgtgagtgtgtccatggacacagggaatgtgagtctcgagggcacactaggaaggagcagggtaatagaagtactggtggttgctaatgtgggtttagagacatagaggcacttcaatgtgtgccatttcgagagtcagctgtgtgaagtctggaatatgctaataagcatcagaaccttgtgaagattgtgcccttgtgtccgcggaggaccagagtatgttgaggttccagggggtgctactcgggggtagggctgcggaggggatctagtgtgtaataagggggatcagggctttcatgaagggatctaagtgtgaaccaacaaggattatatctgtggagatatctctgagcagagagcaatagaggacaggaatgtgtgatgatctcggtgtgctaaagtggattacagctagggagggctgaagtgtgtgctaatgggagtcagggctgaatgagacctgtgtgcactaatgagggtcaggccatggtagaacagtgtgtttgtgtgtccctgcggaatagggctgagtaagggttcagggtgcactaatggggaggcaggactgtgtgaggcccggcgtgtgctaatagaaatcaggcctgagtgaagactcagtttgtgctgacagaggggacaggacagtggaaggactggaatgtgtgttaaggatggtcgtagctgtgaaggggcctgagtgtgggtaacactggttagagatctatctgtaaggttcactttatgttaatagcattcagagcagcatgaagaaggtccagtgagtgctaatgtgggtcagctatagagtaccccaagtgcatgttaatagaggtcagaatcatgtagggggaacagtacgttaatgaggggagtcagtactatggagaaggtaacaagcagctaggccagggaggggcccaagaatgtggtggcaagagttacttagaggaggctaagtgtgtgctgacagagttcagggcggtatgttatgtgttagggctttgaatgctgatgggtatatgagataatagcaggtaagatgtagtgaggcctccttgagggtctagcgtgtattaatggggatcaggacatagggtgcgatgaccaagtccttagtggttggtgtgttgagtatccttgagtatgagagtagtctgaggatgggtgtatgtctttggggatcaggaagggtcaggcaggacatgtgccttttttggggtaaggttttatgtccagtttcttgctccctccttttttgaaatctaaaaagctcattcaactgaaatgatatttaaaagtttccttgcgtataaatgttcaattatctctgttcacaggggcatgt

SEQ ID NO: 137140 - DNA, 1161 bp, Homo sapiens
ggggaagcacctgatttcaaggtagcagatgacccatttctctcctcaaatccagccccagtctcatcctcgacctcctatctagctctacttcccttgggcccagggccatcttaggccctgctgtgagtccagatggttcctgggtcaggtctttccccctccttgctggcccagagcccaagaggaagcagaagacggctggcctaagccttttggtggccccattcccttcagcaatccatctaggtcatcttcctgtcgatgccagcatccctgggctaccttgtttagggttgttcaatgaatagcagggactcatcacctcagcagaggttggtcctaggccctcagccccctgattcacttatttctgccataagcactttttgagcatctactctgtgtcagtcactattccaggtcctcaggatatagccgtgacctaaacacagaaatctaccctggcggagctgatcttctagttgtggcggtgaggagatagacagtaaagactaaagaaaccaataagtaggtggtgtcatttctgaggaggtaatgagtgctggggggataactggcaaggtgagggagttcgggatggttgagattttaaatagggttattcacagaggcctcatgaaaaaggtgacctttgagcaatggcccaaagggagaggggagtgagccatttcgaaatttaggggaagggtgttccaggtaccaggaacagccagtgtaaaggccccgaggtgggactctactgggtgtggttgcagaacagcaactaggaatgatggcgggggggtgtgggggtgggggggggccgtgggcaagaggcaataggggcaaatgaggtaaagaaacacctgtgggccacattgaggactggggcgtgtatttggggtgatgaaaaatgtacattcttgagtagaggagaaatgtgacttggcttgtaaaagtctagattggaccctaggggtcctaacctgatcaaaccgttctggcagccctgagaagagctggtgtacactgagacccccccgccctccacacaatcccacccagtggttgggtctgggcaggacaccctgacacacgctcccctccccccccccacctgggtagatgaatgggatgatgcagtggttgtcatgacga

SEQ ID NO: 137141 - DNA, 2780 bp, Homo sapiens
catgtgctctcttctcccccttccctcccatcttctctcaacaccgtctgtctatctgtccatctgcgctcctcttcttgcctttctgcccaggccccgtggtgggggacagaaggtgccttgcctgtcacagctgccccaaggctccctctgcccttctgccctctatgatggcctcctcagtcctctggtacctgcctgccctgggcctgccttcccaggacccttggcttcccctgccaccacctagctgccggctctgagctcagcttgcccttggaaggaagggttccactaggtgacttttgcttccccaccccccagttcaacctgccctagatgtacctgagcttccctgggctcaggtacatcaccctctccccgagggactccaggtttcctgtgggggccacgtgcacacatgtgtgatgatggaatatgtttcgtgggggatggggtgtcctgtggttcctgaccccacctggcctgccctacccctctccctgccaccagagattgtgcacgaggacttgaagatggggtctgatggggagagtgaccaggcttcagccacgtcctcggatgaggtgcagtctccagtgagagtgcgtatgcgcaaccatcccccacgcaagatctccactgaggtgcttgaccccgtctggatggtggaggaactggaaaagggggttggacctggggaggtggagctcatgatcctgtttctctcttgccttacctgctaggacatcaacaagcgcctatcactaccagctgacatccggctgcctgagggctacctggagaagctgaccctcaatagccccatctttgacaagcccctcagccgccgcctccgtcgtgtcagcctagtaagcaccttctgttcccgtcctctcctttttcttctctcccagacccttctcctgagccagctttaacctgcctcatttgtcccacagtctgagattggctttgggaaactggagacctacattaagctggacaaactgggcgaggtgagaggcaaataggaggcccatggtggggatgaaggtcagtgggaactcctggaatctcatagcacctctcctgtcacacttcctcacattccagggtacctatgccaccgtctacaaaggcaaaagcaagctcacagacaaccttgtggcactcaaggagatcagactggaacatgaagagggggcaccctgcaccgccatccgggaaggtacacacccccatcccatctgccccaggcttccccaacccacccctggcgcacacactccataatgagaacaaagactggttctaagaccccccaaaacactctggctttcatgggaatgcctgtcacccacatatccaggtaataatcagggtaaccaggaatctgttcccatttggataaaaggtagatgaattgcaaaccagggtttggttctgagaacacccctgaaagtgctcaccagtttatttactgtaacaatttctagtcagaatatcacatggaatgaatttgaattgcactgaaatttagtgtgcaaattcgatttcacgcgatgctgcaggcctatgtactgagggttggagccaggccccttcccagaaaccaaaaacaggttgtgaaaatctagtgtcacatgagcctggggctgcaatcccaggttcttgctccatactctcctctgagtcttattttccacatctgcaacatggagacacaactttcttctggcatgaggcgggttagagctggtggctccgaggcattaccctgaactgtctagagaaagaaagaaaacctgggcttgtccctttctagtccttgtcctcacctctgtcctgagggtaggaccctgactcttcccctgtcccactcccatgcttcctgcagtgtccctgctcaaggacctcaaacacgccaacatcgttacgctacatgacattatccacacggagaagtccctcacccttgtctttgagtacctggtaaggttgagtggcagtaggtcccagggggaggtgaggagaaggccaggagccataggaagtaaccctcattcctgtaccacctcttctttcctcaggacaaggacctgaagcagtacctggatgactgtgggaacatcatcaacatgcacaacgtgaaagtgggtgtggggcaggaagcaggggcacaagggggcccccactcacccactccaacccacaaatctcccagaaacggacttttccctttggctttttttgctaggagcccttggagggcactgggaccctgtcctcttttgtgtgacaaggctctgggcctagtgtctgtgtttgggaggggagcagtgcctgctgggggtcgggctagtggatagtctttgacctctgcctgccattcctgggtccccagctgttcctgttccagctgctccgtggcctggcctactgccaccggcagaaggtgctacaccgagacctcaagccccagaacctgctcatcaacgagaggggagagctcaagctggctgactttggtaccactggcctcccctttcttattggctccccagcctcctactttcccatgaccacttagtctcacttcccttcagccttgccagattttgcctaggacaccctcagtctcaactgcactctccccgagactttgcccatgactccctcattctagctgtcctttctctgatttccaggcctggcccgagccaagtcaatcccaacaaagacatactccaatgaggtggtgacactgtggtaccggc

SEQ ID NO: 137142 - DNA, 1205 bp, Homo sapiens
taaggacaggtggaagtgtggcaggggccatgtggtaaagggggtggcttggtcacaacagccacccagccagctgcctttctattcactgtgccctccctgcccaggggtgtgggctgcatcttctatgagatggccacaggccgtcccctctttccgggctccacggtggaggaacagctacacttcatcttccgtatcttaggtgaggaggcatgggccctaggcgctgtggagacacacggggaggacctgtgaaatgtttgggataactcctcttccctactaggaaccccaactgaggagacgtggccaggcatcctgtccaacgaggagttcaagacatacaactaccccaagtaccgagccgaggcccttttgagccacgcaccccggtgaggctggtgggtgggtgggcgttaggggccagagtgtccaaactcattttaaatcaggtctctttgtccttgtggcagacttgatagcgacggggccgacctcctcaccaagctgttgcaggtgagaccaccttgggtcagccttgggggtatgggattccaagtgtggggaaacagggaccccccccctcaaaccaggggcagggtctgaggtgggcagagagacctacttgttgaagatatcaatactatccccctccccgcacccccactcagtttgagggtcgaaatcggatctccgcagaggatgccatgaaacatccattcttcctcagtctgggggagcggatccacaaacttcctgacagtgagtggagctggggaatggaccggccagcgtggggactgggaaacaggactgctggggccagctggcgggttgtgtaggattctggctgtgccacctctacgtggggggacatcttgttcacgtgtgtgatgggttgtatttgttatgaaaacattttttagttttcagttccttttacctttcatgaaaaatttaaaacatacataaaaatatatgcaatagcactttactttttttaaagtagacatttccttacatgtgctaaaaaatgcacaaatcataagtatactatacaatgaattttcataaatgaaacacatccttgtaactagcacaaaagtcaagaaacagaatgttaaaagctccccacccccagctcccttgcatctccttcagttattcccagccccttcccaaagggtggccactgttttgac

SEQ ID NO: 137143 - DNA, 1483 bp, Homo sapiens
ccagccttcggtcttcgtcgatgcctgactcaggtaggtatagccccttgtcttcctccctgccccacccacctacctgcttacccaccaacagccatctgctctgctttcccccacaggcaggccagctttccgcgtggtggacaccgagttctaagccacagaccgaggccccagcaggcagcggctggagggatgccacacccctcacagggcagcccccaactacatcttccctgcttactctctgcctacctgcctgagccatgttcacctgcccacttgtcccctgctgcctgcccaaacaccccaccattggcctgtcaacccacccattggcctgtctgctgggtgctaacaaagctctcatcactccttcacttggtctgtctgtctctgtcttggtagttgccggtggacagcatggccgtgccagcctcccacactgaggccaggtctaccccccatcataccagcccccaggaccactaccccacggccagccaggggtccagagctagcccaggctggggatctcgactcagacaagatggtgacaatgccttgagtctgaggcatcctctgcctgctttcctgcctgccccacctgcctcatattgtgtgggcctttttttgtttgtttcattcattgtttttttttttttaattattttaaatgagatttttgttttttttaaatgcaatatctctgtatacagactggctgggccccaccccctgcgtgtggccctcccacagtattttgtgcaatgaagccctgctcccagcctttcagagacagggacacagcccctatttggaaccctgatcatcaccagaccctgggattggctatgggaaagcatgccacagccactcgccttcctacccccgcccgccatccccagttgcagggggatctggggactaccagagactctgggaaatggacaaggtggggggccccactctttctctcctgcagtcccgtagctggggcctccttccttctcagggtctccccagcccagtccccttgctcccatcccactcggtgctgttgggtaggggccctgccaggaactgaccagctcagcgaggagccataatgtgcatatgtgcacaagcagggttgggggaggggggtgtgaggggttgtgcccaggtgttgccccctatctcctggggagggtgaggcagggcagggacagtctccagggtcagtccctggatgggtggttacctccccttcctccaccctaagccctggggccctgaaatggggtgggagggcaggggtgggagccctcctagtgggtttggggggttgggttcctgaatgcaccataatcgctgtatgaaatattaaaaagtctaaagtgaaaagcctgcttgcaaatccctgtaggggtggagggtggccgagctggggtgattattgggaccttggagaattcatacctcatcaccactgtctaggaaa

SEQ ID NO: 137144 - DNA, 2972 bp, Homo sapiens
tcgcacagctgcgttggctgtagaagagaacggacggcgatggcgacggtcgcagcaaatccagctgctgctgcggcggctgtggcggcggcagcggcggtgactgaggatagagagccacagcacgaggagctgccaggcctggacagccagtggcgccagatagaaaacggcgagagtgggcgagaacgtccactgcgggccggcgaaagctggtgaggctgggctgcggtggagcctcggcagagggaacggtgggggcattgacaaccgctggggattcggcggccgagggccgcgggaaagctgctgcggggtgcgggggcgggggagtggccggcgggacagcgggctaaaggggcggggaagtgcctttgaatgaatcgcaacgtctggaaaaggggcggggcctgtgtggtgcagtctgacgcctgagaacaaaatggggtttgttgtgatgagaccagtttcggtcctggaggtggggccgggcctgcgtagtgaaactgcgtaggaacctgggaagaaggtgggttctgctacataaggcgggggcgcggcctgcgctgcgtaatgcaacttttgggggcgaggagcggtttccgattgctccggggcggctgggaacgaggcgagctttgtgacgtcagcagaagagcgggatggagccgaacggtccgagggagggagcggggacctccgtgggggaggggggaggagcctggagcctgggaacgaggttaggttggtgacgtgagctgaggggcgtgctctgaggccgagggacgacagtggaggggaggtggtgcctatgaggcagaaaatggcgcctgcgaataagcaaagtttatgacgcgccgtggtttttgattctggcggaagccttcccgagtcgagagaacgtgcaggtgattagcaccggaggggccttccatgtttaattggttttctgtgttggtactgttttgtttttagaatcaagaaaaagtcgtttttttaaaaaatagaattttgataaatcggcttgttttactgatttcttgctaaacagtccttcttgaaatttactgcttctgagttcattttatttctcgccgagttgcatctcgttttttaattgtgaaatacgtaagacttaaaaagattatataaaacatttacgcagcccagattgacggacatcctgttaaaataaacggcctacactcttcaaaaatgtcaggatcatgaaagacaaaggctgaagaactgttccaaattgaaggaattaatgcaatttaacgagtcatgataactaaatgcaacatgtgatcctcgattggatcctggaacagaaaaaaaaattattttaaaaatcaattttttatcataagattatttttgtctcttttactgtaaaaggcaatggaaacgtcggtgaaattttattaaagtgggtagatactagtactactaataattgtgatcattgtggctgtgaaaaataatatccttgtttataggaaatactgaaaaatttagggataagaacgcatcgtgtaagcagtttattctcaaatgcctgaaaaattagcatatataaatttatatatggcgaggggaaataaaattggggagatgttggtcaaaggatacaacatttcagttagacaagaaaaataagttcagatctattgtacaactatagttaataaattcattgtatacttgaaaattactgagagaagattttacatgttctaccaccccccaaaaaataagtatgtgacgtaatggatgtgttaattgccttgacttagtcattccacaatgtatacataagtcaaaacttcatgctgtacactctaaatatatgcaatttttgtccattttaaaataaataaaaataccaaaaaatgcatgtaaagaaacaacgattgagcaaatgagtaaaatattagatttggagaatctggatgaaggacatatggggattctctgtattatttttgccatttttctcaatctatttcaaagtttaaaaattaaataataaataaaaacgtgtgaattcaccatccatgttaagattcagaacactgtcttaagaaatccttctgtgcccctcccagatggaaattcccctccttgctccatgggaaactgttatcctgaattttgagttaacagtctcttccttttctttaatgttttaccacagctgtatgcatccctaagcggtatgtattgtctaagctttcactttatacatatatggaatacatatatataaaattctactggatgcatactgtgagcccttatcttcgcatcgggtaatacatggtatccacatggcatcattggtgatgttaaccttgatcacttggttatggtagtgttggccagctttctcaactgtaaaggtaccattttcctctttacatatgcagtaattatttttaaaacatgtatcatgtccagccattcctcaaaatactcttaacagcttcccatctcttgcagcgtagatgctaaaatccttacaatgaattgcaagcctttatgaagctggtctcctgcttgcattctgatgtcttcccatatctctcctctgattacgcactccctccctgtctccatccaggccggccatattggactcttgctgttcctcaaacacatctaaccttagggctttttcgagtgaggtttactcactacagagttctttaataaccacaccagtgaaatgtgtatctctgttactggggagatgagttgagattttccaaatcgggaatacaaacccaagccgtgtttttctgccattacgtcacacttttccagcaagaaaaagcctcatttcatcctgagaataaacaaaataaccacagtgttttgtaactcatttgaagatgttcaaaagggccttgaggctttgatccttgcctcttcctacctttgtagccttgtgattgtgtcactggtag

SEQ ID NO: 137145 - DNA, 1059 bp, Homo sapiens
acatatttcatatcatttcaacaaatttgaggaagcacgaataaacctaagtgactttagcaagatcagttgtacctgtatatactggcagcaagaaactagaaaattaaaatttatgataccatttatgatagcatccaaaaaattgaatacccagctgtaaatataataatttgggtgttattgatacagaccatgacacctttgttgtgactgccacctggcctgacagagattgtgagacatcctgatttcagagatgttaacaatgatttttttaaagtgtctttgacttgaagcaatatggtaataattttctgtgaaaaattatgtaaaatgtcagtcctctatgaaatctatagaagttcagcctgtgaccaggtctggaagttttgcttaccactctacagcgtgattttaatgttattttttgttcaaaatctgctcttaaaaagaagttgagcagtgcctacctttgcattggaaggtactgttaactatagctttactgaacaaattaacttcatagactggctatggaggcaagtaaagccacaaagggtggatggtggtgtgtggggtgcagggttgggtctgagcattgagccaccggcacagaagggtttgtttccctggtgtgagtgatatggggcagggtctgtgggggtcagtgcagcaaaaaaacaaaaccaacaaaaaacccacagaaatgtttgcctatctaggtgacttgtgactattccaagatttgtctgtccctccatcctcccacctctctgatcctttcatgaacaagggaaagttgacattttaaagaatcacattgatgaggttaaattgggagaatcgcttgaacccggcaggcaaaggtcgcagtgagctgagattgtgccactgcactccagcctgggcgacagagcaagactctgtctcaaaaaatgataataataataatgaggttaaattgcttgaaaaccagccaatataatgttatgtgcatttcatcaaatttggttattttttaaaaagcatttatttgaggctgctcagtatttggga

SEQ ID NO: 137146 - DNA, 2736 bp, Homo sapiens
attggtgagtctaagggtcacgcaatgggttggtgttcctagctactagtcccaactcagtgacttgaggttgcatagggttaagctgaagctgactgagaaggcactggtcagactttggaagacccagaaggcattggctaagttgggtggaggcactgaggggatctactagagccctgagggtatgtgagctacattctagtggcttacgtggtgtggcagaggatatttgctggagatctccagtctggagtgtgggccagtcatttggagactgattgaggacacaggtattggccaagcatgtgaggtccgtagggatgagtcaggtatgcccagatggattgatcattttgggtctcacaaagatcttgaatgtactccatcaccccgcacaggcctagtattgcgcacagctcgggagcggtttctggtggagccccaggaagacactcggctttgggccaagaactcagaaggctctttggataggttgtatgacacacacatcacggttctcgatgcggcccttgagactgggcaggtaagggtggggagggcttttctgttcaggtggactggcagatagactcacctggcagtactcgggggaaatgaaggctaggtacccataatgtcctccattaatacctttccttctttctctttctccaacccagttgatcatcatggagacccgcaagaaagatggcacttggcccagcgcacagctgcatgtcatgtgagcccttggggtatctggtccagagcgggggcgtcccacagtaggcaaaatgatttagcccatgagcacattgcacccccatgcagcaggccctcagctgacagtttctcatctaaccccaggaacaacaacatgtcggaagaggatgaggacttcaagggtcagccaggcatctgtggcctcaccaatctgggcaacacgtgcttcatgaactcggccctgcaggttgggccattatagttgtgtctggcacagccacgtggttgggcttcaagagctgaggattggggacagagctggggtcctgaggggactacagggcaaggggtcaggatgaaagctgaggccccacaagtctgaagtggcacgcccacgttcattcctgaactatcagcctcttctctcagcttgccctcattttccctcttctcttccctgttcccacgttcttccttctcgtgaaatcctaatgccttctctcccctactctcctgctcctctctctcctcccttccccttctctcttgttttcctctctctttcctcctggcttctttttgtgtatcctcactttgaaccttctgtctcccctctgcctcattcacctggtctctggcctctgcagtgcctcagcaatgtgccacagctcaccgagtacttcctcaacaactgctacctggaggagctcaacttccgcaacccactgggcatgaagggtgagatcgcagaggcctatgcagacctggtgaagcaggcgtggtctggccaccaccgctccattgtgccacatgtgttcaaggtgtgactcaaccctgggcacccccgaccccctacgtctcttggctctcctaactccctctctctctgatgaccctgcccatcttcttagaacaaggttggccattttgcatcccaatttctgggctaccagcagcatgactctcaggagctgctgtcattcctcctggacgggctgcatgaggaccttaatcgggtgaagaagaaggagtatgtggagctgtgcgatgctgctgggcgaccggatcaggtaggctgcccccgcatttgcagtccaattaacatcaccaaggcctctgcctcggggattttctggcctccctggggtatctaacacgccaccattttctgttaagtttctctacctgacctcaactccagccttactcttaaccttagttgcaataccatatctgcccccacagtcaacccagagtaaaccccagcgcagtctcctgccctaaatgacccccagtcttgaccgtgaacatagtctctgtgtatccctagctggagctctgcctctggactttagcagtggccttccgcttcaccccatttgaatgcaccccaagccatggtttcctcttaccctgggcaagccccaccacccaccatgacactatcaacaggaggtggcacaggaggcatggcaaaaccacaaacggcggaacgattctgtgatcgtggacactttccacggcctcttcaagtccacgctggtgtgccccgattgtggcaatgtatctgtgaccttcgaccccttctgctacctcagtgttccactgcctatcagccacaagagggtcttggaggtcttctttatccccatggatccgcgccgcaagccagagcaggtgtggggcagtgggggcctggggagatgatgatggacacatagagtttgattagctgccatagctcaaggcttcttgcattaactcaccacaagcccttttggtcttttgtggataccgtttttcccttagcaccggctcgtggtccccaagaaaggcaagatctcggatctatgtgtggctctgtccaaacacacgggcatctcgccagagagggtgagactgcagaaggaggctggatgggattccagggcaaggaggcagaagggcctgggaggccgtgcagactaacagtcccctctccatatcccattcctagatgatggtggctga

SEQ ID NO: 137147 - DNA, 2625 bp, Homo sapiens
atcacgccactgcactccagtctgggcgacagggcaaaactccatctcaaaaataaataaagccgggcgcggtggctcacgcctgtaatcccagcactttgggaggctgaagcaggcagatcacgaggtcaggagatggagaccatcctggctaacacggtgaaaccccgtctctactaaaaatacaaaaaattagccgggcgtggtggcaggtgcctgtagtcccagctactcgggaggctgaggcaggagaatggcatgaacccgggaggcggagcttgcagtgagccgagatcgtgccactgcactgcagcctgggcaacagagcgagactccgtctcaaaaataaataaataaataaataaaaataaaaatgccttcaggctgtgaggatgagtgggtggggcagccagggcagagtcagggagtctctgggggccctgatcaggtgtgcctgctgtccaccccccacagctatgaggtgtcaggtcgcattgaggccattgagggctcaagagaggacatcgtggttcctgtctacctgcgggagcgcacccctgcccgtgactacaacaactcctactacggcctgatgctttttggacaccccctcctggtatcagtgccccgggaccgcttcacctgggagggcctgtataacgtcctgatgtaccggctctcgtaagtgtcctcttccccgggggtggggggcggaggggtctgaactccgacttgggtgtttagctgcttatttgacacctcccctgtaacaaacaaaagacagtccaaacttaacatggccatagaagaacttgtagggttttttctttctctagacctctggctttgctactgcctgtcttgggtgctagggatacagaggtgaacaagatgcacaaaacagacaacttcatcttgtcttcagttgtctctcctggagactgttgtccctcctgggagagtcttggtttttttgtctttttgctgacaaattttcattttgcctaaaatctagagtctttactgtggcacacaaagcattgtgttatcagaattctcccccctcattttgcattcaaaagtcattccccagaggctttccctgatgggaagttacagccggtatgtgtcttgtctagcagtggcttattagagtaaaagtccacgctccatacctttttttttttttttttttgagatggagtcttgctctgttgcccaggctggagtgtagtgacatgatcttggctcactgcaacctccatctcccggattcaagcgattctcctgcctcagcctcccaaatagctgcaattacagccgcgcgccaccacgcccagctaatcacactccacacctctgactgggacacaagttccttcattctcaggccactgctgacagccttggcctcttcatgcatttacgcgtcaccccttcagccctctcacacctcagattcagaacggtttacatgtggatctaccaatggcttcccattatcttaagtaaaatcccgggctctatccccactgtccttgtacccgtcttgggagtctcctctgctctgttgcagacgctacgtgaccaaacccaactcagatgatgaggacgatggggatgagaaaggtgagggggctaacagtcagtgggcgggggctctgggttaggtctgacccacgtagggttcgtctaggtgtgcattgcagcttagcacttgaggctcacaccttcccatctctgacatcctcctgtcctagaagatgacgaggaggataaagatgacgtccctgggccctcaactgggggcagcctccgagaccctgagccagagcaggctgggcccagctctggagtcacgaacaggtgcccgttcctcctggacaattgccttggcacatctcagtggcccccaaggcgacgacgcaagcagctgttcaccctgcagacggtgaactccaatgggaccagcgaccgcacaacctcccctgaagaagtccatggtatttcctttggctatcagcgagggctggggaggctggaggggagatttcctggcagcaggatccatgaccacctctccctcacccccagcccagccgtacattgctatcgactgggagccagagatgaagaagcgttactatgacgaggtagaggctgaggtaaatgagatcccagggatggggggtacttccagctcttgcccctcaactcttcgtacatcctccccacaactcctctagctgggaacagagccaagagatccaggtcaagcttggccttggggcctgaacacctactgagagctccagggcctgaggttcctagcttcaaagtcggtgctctgacccactcagtgtgtgtctcccccgctgggcccccactccccatttctccatctgtcctcacagccggccatctggttgtctgttcacccaatcctagggctacgtgaagcatgactgcgtcgggtacgtgatgaagaaggctcccgtgcggctgcaggagtgcattgagctcttcaccactgtggagaccctggagaaggaaaacccctggtgaggggccagagcggggcctgtgtgtgggggtttcattggatggaactactatatttagctt

SEQ ID NO: 137148 - DNA, 1861 bp, Homo sapiens
gaggtcaggaattcaaggccagcctggccaacatggtgaaaccctgtctctattaaaaatacacaaattagcagggcatggtggtgcatgcctgtaattccagctactcgggaggctgaggcaggagaatcgcttgaacccaggaggtggaggctgcagtgatccgagatcgcgccactgtactccagcctgggcaacagagcgattctctgtctcaaaaaaaaaaaaaagaaaaagtccgtttgctgactcgggctctgtctgtaggtactgcccttcctgcaagcagcaccagctggcaaccaagaagctggacctgtggatgctgccggagattctcatcatccacctgaaacgcttttcctacaccaagttctcccgagagaagctggacaccctcgtggagtttcctatccggtcaggggccagggagaggatggctgggggaaggcagggaaaggagggggtgtaccagtattaaccctctccccacccacagggacctggacttctctgagtttgtcatccagccacagaatgagtcgaatccggagctgtacaaatatgacctcatcgcggtttccaaccattatgggggcatgcgtgatggacactgtatgtgccaggctgtgggtggggcctgccctgggggttctgggcaggggggcgatcaggaccttcccagtgagtgactagggatgtgagccagtggtgaggttatcgtggtgggaggagtgacaagagtgaatctggacacttctgagaggcaggaagggtaggcgaggataactctccttccctttcagacacaacatttgcctgcaacaaggacagcggccagtggcactactttgatgacaacagcgtctcccctgtcaatgagaatcagatcgaggtgtgacttccatcctacctcctccccttcttcctttctgattccacctccccacccccacaatccacactgactcctgtcctctccccacagtccaaggcagcctatgtcctcttctaccaacgccaggacgtggcgcgacgcctgctgtccccggccggctcatctggcgccccagcctcccctgcctgcagctccccacccagctctgagttcatggatgttaattgagagccctgggtcctgccacagaaaaaaaaaaaaaaaagccctctctgcaatctcgcttctcgtgtccgccccgcttctcttattcgtgttaggtgcccccgccaggcattgcaggcttagtcgtggctactgttctcctgtgccgctgcatcgctctctcccgggaaagaacaggtcgtgtctcctcctagcagtgcgcgccccgcctgtgtttgcccttccagcagtgaccctcccttctagtctttatttatggtcgtgcccttccctctcctcagcccagagtgttctgcgtgggtggtgatgggggttcacctgaacacagagtgtattttcttattgaggccctgtaccttctgctgtgtgtgtgtatatataaagcaccagtctgctccccactcagcagtgtggttttttcctccatggacttaactaagcaccagttttgtgcctgtgttctgtgttcttatcaaaggccagatgtgtgatgggtgcagctctgagtggttagtgagcaccagctgtgggctgggtactgctgttctaagtgctttgaaagcaccctctgtgtgccaggcacgattccaagcaccaatggcatgcccagttttttccaaaatattttccaaatattgatacgtaatcctcacaacaatctcatgcaagagttgtcatctccagtttcggatggggatactgaggtacagaggtcacagaattgctcagggcttgtca

SEQ ID NO: 137149 - DNA, 1005 bp, Homo sapiens
gtgactcatgcctataatcccagcactttgggaggctgaggtgggcagatcatctgaggcctgtgtctactaaaaatacaaaaattagctgggcgtggtggtagacgcctgtaatcctagctattcgggaggctgaggcaggagaattgcttgaacccgagaggtggaggccgcaatgagctgagattgcaccactgcactccagcctggacaacaagagtgaaactccgtctcaaaaaaaaaaaaaaaaaaaaaaaagaaaagaaaagaaaaagaaattgcaaagggctttcaggtagattctcgtttgtcctctgtgataatgctctgggatgtggagcagccgcttgggaggttgggcatctcgcccaaggtcatgtagcacgtaaggggtatctttagctaggtcttctctccagagccacaccctttctactgtgttgcttctaacatgtacctaaaagcaattttatttgcttacagtaaaagaaactacttttcagtcctcctaacgaatatgattatatgtaagcttaaaaaaaaaaggaaatgtgagccagacatgatggctcatgcctgtaatcccagcactttgggaggggcaggtggatcccttgagcccaggagttggagaccagcctgggcacatagtgagacctcatctttacaaaaaaaaaaaaattaccaggtgtggtggggtgcatctatagtcccagctatttgggaggctgagccaggaggattgcttgagcccaggaggttctaagctgccataagccgagatggtgccactgcacgctatcctgggtgataaagtgagacccctgtctcaaaaaataaaaataaataatttttttttttttgaggcaggttctcgctctgtcacccaggctggagtgcagtggtgcgatctcggctcactgcaagctccgcctcccgggttcatgccattctcctgcctcagcctcccaagtagctgggactacaggcacccaccaccacgcc

SEQ ID NO: 137150 - DNA, 1710 bp, Homo sapiens
tataccttatcactcaccctagagaccctgtatcactcaccccacagacccccttattattcactccggtgtccccaacactcatcccacaggctacccatcaactttctctagtgacccatcactcacccacaaaccccaatcactcattctgcacctccctataaatgaccccagagaagcctccttactcatcctactgagcatcttcgagtacaaaatccatgtcataacatccccataattatcttaatgcttgatccatgtcataacatctccatatttatctcaatgcttaagtggccctaagtccgtctgttaaactcactcccagagccttaagtcctgaaaactgcttcgaggaaccccggcgcttctggacttgatctgcacatgcttagtgtcagctccgaagcggccgctcgcccacaattacacctggtgggtgcccttacaccgcgccggtgcgtgcgtgcgcgtgcgcgtgtgcgtcgaaggagaggcgggctttccaatttccttcagtgactctcaggcaaggaacatggctgtctccttgggagtgtctctacgggagccgccatcttggaagggcggtcatttctgccgcggagcccgcggtcccctactcgatatacccctgtgggattttccagtggccgaggcactgggccatggaatgtaccaccaggcttctcccctccgccgcagcctctaggagttagtcacctccgaggccccggcgggcgaggcgctttgcctcttccgccctcagggtgccctcggcctcaggccgtccctaccggggagcctccgcctctttaaatatcgcccagcccccacccccaggagcaggtcgcgagacgcacccgcccccgcccctgccgccgcactgctctgtgggacgcggcgacccctctcccgcggcggccgggaccccgcgcccaccgcgtctggagcccacctggcggccccactggctacatttccgacctggaccccggccggctgcgggaaacactcggcgtctcggctgtcaccgaacctgtgcagttgccgcggggggagtcgtgcgtgtcagatttaggccaggaagcggaagtcgccagcagcgagagtttaacctctgtgggcgcagagggttgcggggattcagcgcccgggaccgtggatctgtgcagggagtcataggtgtgtgtgacatcagtggtggaacattttggctcgttttcacaattcagtcattatcctttctgctttcctcctggaagcattaaggttgaagttttcttctaaagatcaaagttttgatttgttatattagttcggatttgtttgatttttgtttgtgttcggtttcaagtgctgatttgtaacttttctcccccccccacacacgccttttgacccctgaattatttaaaagtccattgttggagtggcaaacatcctccgagactcaaagggcaaggccatgggcgctttattccggctgctgctccaggaacgtgggaaagcagcggagttttattctaggggaaggaaacaaaggcggccgagtgccagctgcacgtttggtgggatttggtcatcaggggtggacatgctgcccaatggagctgtcggcagtttgacccagcttggtccgtcgcgtcctgttctaggaatcgattattcaaagaaggaatttagagggactgcagaaaatgt

SEQ ID NO: 137151 - DNA, 1065 bp, Homo sapiens
tgttggccaggctgccctccaacccctgggttcaagcaatcctgctgccttggcctcccagagtgctgggattacaggtgtgagccactgtgccccacctggaatttgttttaactggctaaatccaggacccctggagggtataagtgaggttaaatctgcagggtggtctcacctggctgcatggggtcctactgataattttgctgtgaagatgccaggaccaaggggtggactaagcagaagggggttaacatagcagtcctgtaactattgtcctttgaaagtcctgcttacaagcttggcccttggctggcaattaggaacttggatttcgggagtattcccagaattccttaactgataaggatggcttactcttcccaacctgtttgtgcaaacagtggtttctgctgatcaccggctttcattctgggagcctggaattttggtaagcactaggtagagggtgcctagtgaccagcccccagtgaaacctttgggcaccaaacctctaatgggcttccctggggagaagcattatacatgtgttcctggatttttgttgctagaaggacagctctgtgcaagcctcctgcgagggggagacagcatgaggaggcctgtgtacagcatccttcacattctgcctgtgtctttttaccttgacgattctgtcacatatccttttgctgtcataaaccttagctgtgaggacaattatatgctatgctcagtgctatgagttcttccagcaagtcactgaacatggggggtggccctgggaccccccaacagaatgggataaattaataattatgagatattccaattctatcatccctgcgtctatgagaacctgtaattttgttgtgagagaaatggaatgcaggccgggtgtggtggctcatgcctataatccctgtactttgggaggctgaggcgggtggatcacctgaggtcaggagtttgagaccagcctggccaacatgatgaaaccccgtctcaactaaaaatacaaaaaattagtcaggcatggtggcggctgcctgtaatcccagctac

SEQ ID NO: 137152 - DNA, 1070 bp, Homo sapiens
gaacacatggggtttcacatcctaatatattctggatcagaatttgctgtacaatggatgggtggggatacaagtcctggagggcactggggcagcagggctgaatgtcagggcagcctagggcatagggtggaaatgtgagccaaagaaagctggaggcaggagagaaaatgacaaatgtcacttcttggtcccttcagtgacttcctctcagccacctctctagcaactgaatgcaggggtctgacttatctcccgccttgctgccaataacaggaagtactagagacagaggcccagaccctccctcccagctccttgatcaatgccaggccctgactcatccctccatttattccggtcacattgacaagctggaagagaagggacacgtcaggtgcagagaacacaggaagagaggtcctgactggggaggagagtgaggggaatcaaatggggggagcttctatttctcacctctactcgctccatttattttactgccacttctgccccatcccccagggagcccaggtccccacggtccccgggccaggcaggcaggtgggttctggggggaaaaggcggctctcccagcacctctgttatgagatatgtctcaggcctatggtagctagagctgtaaatcactcttcctaccctagtcagttagaaggatgaagacagagttgtctccacattgggccggaagatgccaagtcttcatccagtggtgctgcctgacaaatttgtcctcctgcacccatgtggggagcacgtggtcagggctgaatgcaaattcctcaccatcctgggtccaatataaccaagtggaagtgacttttagcctaggcagtgcctggaagtgactacaaagtatatcacacactttgaaattaagtgtatattttatttttatttttatttatttatttttgaaacagagtcttactttgtcatccaggctggagtgcagtggcaccatcttggttcactgcaacctctgctttctgggctcaagcaattctcctgcctcagcctcccaagtagctgggattacaggcgcccgc

SEQ ID NO: 137153 - DNA, 1025 bp, Homo sapiens
gtatgaatatttaaaattacacagttttgctttccagagtgatgataaaagtgtaccatttgagtcactaactcttttttttctttttaagagagtctcgctctgtctagcaggatgcagtgcagtggcacgatctcagctcactaaaacctccgcctccagggttcaagcaattctcttacctctcaacctctcgagtagctggtatgactggtgtgcaccaccacccacctcagcctcacacagtgctgggattacaggcgtgagccactgtgcccggcccattttagtcattaacttttaaaaataaacttcacacagcagtacatctcagatgtttataacaaaaaggagggtggatgtgtgtgtggggggtgagctttctaatttgaccacgtcaatattgtatctgccaagcagtttccaacttgtatcaagtcaaatgagtacttagttgttttctttagttcttagaatatttcccctacattctccatggctcggttctttccagaaaattccctggatggaattttccacatagcccagcagagggccctgtattctgagccacagtcaggcatacacagaagacactgcagacaccaatcagcaaatcaggaacgagaattcctctcctcccacactccagccaaagggctctcaggttccagttgcagccggtcagctaacaactgacggtgtctgcacttccttttagtctaggcggcggtagaaatggtttctaagaatacccagtggctctggaaaacatttccatcatgtgaatgagcctgcgcgtattttatattacagcttttattcccctcagattcctattctcattttaaaatgtatttaaaagatatagagacatataaagccttcagaggaaaatgcattaaaaaggaatatatcacaatggtaaaccatgattactactaaagagattatggcttatttcactccattctttaatttcccagattttacaccattatcgtgtttcttttattttgaatatt

SEQ ID NO: 137154 - DNA, 2955 bp, Homo sapiens
atcataaaagggtgcttagggcactggcccaaaaagggtacttaaggatttctccgcccagatgccaaagccctaaggtcagccccaaatgacctgtgttctgctttatacgtctatgccactgttggggttaaagccctaggcacgcaggtcttgcctcaactgcgcctgcgcgagtcaggacgagcgcttgccccagatcttgacgtttcaggcggcccctcctaatccggaacacgactcacattccgttggtcttgccttgacagacgtgaccctgacccaataagggtggaaggctgagtcccgcagagccaataacgagagtccgagaggcgacggaggcggactctgtgaggaaacaagaagagaggcccaagatggagacggcggcggctgtagcggcgtgacaggtgagggcgggcccgggagggctcggtttctggagcggctgccgggcacgggcagggagcccggaccgaaagctcagctccaggatggctgcgcttgggccccggcgttccctgcccggaaccggaggagtggtttgacccggggcgagaccatcgtcgacagcgggggtggggtgggtaacaggaataggcgggcaaggctgcgggtgatggtttcgcccgctgctagtggtggtgcgcctgcgcagagccggaagccctttggtaggcgggacccgaccgagtggtgccgggattccgtcttaacccccgctaaggtgtccaatgacctttccttaccaactgcggggagtgtgtggaaacgcggttcactccccggtttccttattctggatcagtgtctgaccgcccccgccgggagaatgtcaggattctcgcctctgtaaccgccttccatgatccctcattcagtttagaccagtaatatgcctgtgacccctcacaggttgtcaaggagaattttggagctccctctttacctccatttttctccccgcaacaccataccttccttctccttttgctatgacaatgtctggtggtccaccattacctccccagttcggctcaatgtctggtcatttccatttccacccttctccccattacagtccctagtgacgcctgttacatctcccttccgcatagtatgtagtgaccccccccccccatgaattcctcatcatagaggcttgggacttccattagccacctaacaacggtgtctgtggtcctaacatcaacattacaccccagggcttagggatgtccacagtgccctttaaggacatgtttggtgcaacctccatcttccccaaactaagggcagtatctgataatcctctctttcccatcaccgtgcctgcgactcctccctcaccacagtaactggcatttcccccgttctctgttaaaaaaccaggacactttgggaggctgaggcgggtggatcatctgaggtcaggagttcgagaccagcctggccaacatggtgaaaccccgtctctactaaaaatacaaaaaattagccgggcgtggtggcacacgcctgtagttccagctactcaggaggctgaggcgggagaatggcttcaacttgggaggtggaggttgcagtgagctgagaccatgccattgcactccagcctgggcaacaagagcgaaactctgtcagaaaaaaaaaaaaacagaaaaaaaaaaaaaaaaaacccaggacattctgttcgtgcttcttatgtacctgacggctcagtgcagtgtgtactgacttccccattggtccccagcacagagtcttgtgtgctcctctaccctccaagacagtatgctctgtcccccttccctgttctctcccccgcaaccctgtgcagtgaagctgagaccttggcactcaagagtgagacaagcaacaggagggcctgagcagagaaggaactggaaggacttcagatgtgagcaggatctcttggactgtcgtgtgaaaattaggctgcagggggcgacaggagcctggactttgaattttattttgtcccctgccactttgcttctagactatcattattggacctctgaattcttgtctgccttcttgtaggagccccatggcacctgcccagccccacctcagcccatcttgacaaaatctaaggctccatggagccaccacggggcccccctgccaatggggccgagccatcccgggcagtgggcaccgtcaaagtatacctgcccaacaagcaacgcacggtggtgagtcatggaagcgaaatggcaggggctgtggatggacccagttgtaactctgggatcaaaagggtgacaacggttgggggaggcctttgcagaaggatgggaacatcagctgcgcttctgttgggcattgaggacccctacatctgcacatacacacaggtgactgtccgggatggcatgagtgtctacgactctctagacaaggccctgaaggtgcggggtctaaatcaggactgctgtgtggtctaccgactcatcaaggggtgagtgtggcagccccacgcccacccactgggtgtcccacctcccatcccctcctcagtcatttgattccttctgtactttatcacagagtcttccattagtcttcccttagtctttagtccccccttatctgcagggtacatgttccaagacccccagtggatgcttgaaaccatagatagtaccgaacccaattgctatcagtcggaacatgtttctattcttgtcttctacccataaatgtaatgccttttccgtcttaactaagcacgtatcatgcactccggccatcacttttgcagtttgaggtatgacatcaaaactagcatgaatttatttttccttcttcacaattccaaagatggaagattctttcttacagtagatctcagcaacctcagcatatgattttcttttaagtcaagaacttttacctttttgcttaaaggaagcacattacagc

SEQ ID NO: 137155 - DNA, 2223 bp, Homo sapiens
gctcccctggatggcgaggagctcattgtcgaggtccttgaagatgtcccgctgaccatgcacaattttgtgagtgcagggtggacggtgggggtggaccatggttgggggtgtccttgaccaggtctcaaacttccctgctctgtggcatcaggtacggaagaccttcttcagcctggcgttctgtgacttctgccttaagtttctgttccatggcttccgttgccaaacctgtggctacaagttccaccagcattgttcctccaaggtccccacagtctgtgttgacatgagtaccaaccgccaacagtgagcccagcctggggtgggtggggggatggggagcacagaggcccagccacgaggcccttacagacagctgacccgtgtccccttgctttatacccttcatgccctcaaggttctaccacagtgtccaggatttgtccggaggctccagacagcatgaggctccctcgaaccgccccctgaatgagttgctaaccccccagggtcccaggtagggatgccttagctgaagagctgctgggggagaaaaagatcttggggctcttgtagaccacgagccatactttattcatttgtttacttgacaaacatttattgagcacctacaagtgtgagtaagggcatgaaactgggaccttgggcaagtcacctcatttctctgggcctcagttttctcatctgtaaagaggggatgatgatactttctaccatataaaggttctggtgaggcttaaatgagttaagacatgttcagtgcctagaacaggatctggtacagtgtaaataatcaatttttttgttattaattataaatatatttataagcatctaactactttgctaattctagtataatcatactcaagcctttccattttgaaatacgtattattttatcataaattacttcccttttattgcttttttatgttaaatattatataaaactatagctatattaaaatatattattgctctaatatatattttatgatgtgcatattttatggtatatttatgttattgtatcatgttgtattacataattttatataatgtagaacatcatacatgtttatatgatacataaaataaagttagggtattattttaaattatgagtgtatgtgcattaattacctttgagtttcatttcaggatagtgaagggaacattaacatatttttgtaactttacaatatgtttagcatatatcatatgtataacatgtatgtataacaatatggtaatatgtatattttaaaacattgccatttttatatagatgatacatattatataacatttgaaaagtacatgtaattataatatataattataaaatatgatacattaccctttccccactatctgtgtggcctgctatcctgcctttaggcgtttactccattgtcatctcctcctcagagaaacctttcctgacactttctaggaacactttgtgtctccttattttgctttactatttttctttattgcacctatcaccatcaggcatattatatatttgttttttatttcagccccaccagggcaagaactgttattttgttttacagttttatctccaccacctagaatggtatctggcacacagcaggcactcaataaatgtttcttgaagcaatgaataatagtactgccagtggacattcgctctgtgtgagccaaatgcatgtttatggctgggggtggggtggggggctttctcggttctctgattcctggcagtgatttcacagcctttcccctggcagcccccgcacccagcactgtgacccggagcacttccccttccctgccccagccaatgcccccctacagcgcatccgctccacgtccactcccaacgtccatatggtcagcaccacggcccccatggactccaacctcatccaggttggtgctgtgggggacaatgccggggaccacagggcagagggtagagccatccctgttggcctccatgccctctttttgactcctgtccctcttcttctagctcactggccagagtttcagcactgatggtgagtcccctgtgcctgcaccctgacccccgctgccccacttacctccactcacatcctctctgcaactgcagctgccggtagtagaggaggtagtgatggaaccccccgggggagccccagcccagccagcgtgtcctcg

SEQ ID NO: 137156 - DNA, 1772 bp, Homo sapiens
ggacgggctcgtttggcaccgtgtttcgagggcggtggcatggcgatgtggccgtgaaggtgctcaaggtgtcccagcccacagctgagcaggcccaggctttcaagaatgagatgcaggtgctcaggtgaggtggcatgtgtgcgtggatgggggtggcaggcccggccttggcatctctctgggaaaaggccatgcttggagtgcttcctggacatcacctgtgtttgtgttgttaaaccatcatcagaagttgtttctctctgaagggtgtccctttcccctctgggaaatgagtatgtttagaggacctgtgatcatgcagttgtttgtgtttgggttattaatgaatggttctgcctccaaaatgtgggtcttctcatttgcctgctgcgaactgggtctgtgtgtgggccaccattcttgttactgcattgccaggaaggcttccatctttccttcccctctgcttgggctacaatggtaatgttctgtttatagtgttggttcttgttattcattaattctaataccttgatttaaacaatattatcatcatcaccataatctaatcattgcttaattattataattgctgtaatatgtaatcaatacagtattcatctagtcacgctaagaaagccaggtgtctcctttttgctgctatagttactatgtagcatagtactgtatacctatatactacaggtagtactggatagcgtctaccaaccctggggatgttggcattggcttttcctctgtgtcagatgggcacaattatgttacagagaataaggtagctaatgcaatgatcagttttacagttgaggaacatgaggcccagagaggttaaatgtctttcccaaggttgtaccttgagtacctggtgaggcctagatttgaacatgagtccagactccaagctctttacctctaagcttctcatgctgctgaacaggctctaatcatcatatatcaccaatgttttaatcctgcatctatccatattatattgatacatcagtgaggaaggttggcattctgctttctcatctgtgagatggtcacagacccaggtaatggtcagagtcagaggggtgggggatgttaatgattagaaatgctgctgtaggcagggagggggaggggcagcaattcctccctcctgcttttgttgggagactcggatggggaagctccacatatgagcccacagcacagaatcatagcccagtaaacacatctcacaaattcatggaatctggcaatgctttggtcctgagtgccccaaaagacagggtgaaaataaatgaccgaggaaggtaaagaacagtgccactcctgatgctcggtaagtgacagttgctatttttcctccccacctctgacactgccctccctgcctgcaggaagacgcgacatgtcaacatcttgctgtttatgggcttcatgacccggccgggatttgccatcatcacacagtggtgtgagggctccagcctctaccatcacctgcatgtggccgacacacgcttcgacatggtccagctcatcgacgtggcccggcagactgcccagggcatggagtgagcctcccagcctggggaggggtggggggaaagggtgggggaaatgaggtaacccccagccaatccgccacctgcctccacccccacagctacctccatgccaagaacatcatccaccgagatctcaagtctaacagtatctatctgtccctgggctggggttgagtgggggtgtcaagg

SEQ ID NO: 137157 - DNA, 1042 bp, Homo sapiens
ctaatagccatgcctctcaccctgcctgggaggttcccattggtgcccctataccactcatccctctgatcctgaccaggagccccttaatatcacgcaaactatccacaaccttgacgtgggcagggaacgcctgctaatgccccccacactcagccccgctgtgactcctgaacaggaagcccctcggagggcatccgaacccactatgcctctgatgttgaccataatgccctccacaactgtcagacatcagactctaaccagagtccccaagaatagtacctgaaccagccacacctctgacttctaagagactgccattaaagccccctggctggccacagctctgccacctggcaaggagctctgggacacatgcccctcccttgtaattcccagaacccccacaagaggcatccttctaagcccttgacacccccactcaaccccagcccagggacagatagatactgttagacttgagatctcggtggatgatgttcttggcatggaggtagctgtgggggtggaggcaggtggcggattggctgggggttacctcatttcccccaccctttccccccacccctccccaggctgggaggctcactccatgccctgggcagtctgccgggccacgtcgatgagctggaccatgtcgaagcgtgtgtcggccacatgcaggtgatggtagaggctggagccctcacaccactgtgtgatgatggcaaatcccggccgggtcatgaagcccataaacagcaagatgttgacatgtcgcgtcttcctgcaggcagggagggcagtgtcagaggtggggaggaaaaatagcaactgtcacttaccgagcatcaggagtggcactgttctttaccttcctcggtcatttattttcaccctgtcttttggggcactcaggaccaaagcattgccagattccatgaatttgtgagatgtgtttactgggctatgattctgtgctgtgggctcatatgtggagcttccccatccgagtctcccaacaaaagcaggagggagg

SEQ ID NO: 137158 - DNA, 1017 bp, Homo sapiens
tggacacccacagtcacctaggccttgggtatctagcaggccccagggccgggatacctagaaccctctaggccccagacccccacagaagtacaagctcccccagacccagaactccatgttttcccgagactcagtactttccaggtccctaagcctcctagaaacccgtgggcctataatcctctgagccccagatacctacaatccttgacaaccccaaatttaaatccctctgttctgaaagcagagaatcctcccaagtcctcaaggacagagaatcctctgggccttgatactgacagtaccccagctcgctaaaaatgaaccttccaagtccctcaatacaaaattccttgggcctcccagcccctgaccccagatcacccctttcctgcccccgtctgcccccagattatctttatggtgggccgtggctatctgtccccggacctcagcaaaatctccagcaactgccccaaggccatgcggcgcctgctgtctgactgcctcaagttccagcgggaggagcggcccctcttcccccaggtgggctgggtagggggctggacaccttgggtgggtgactctgggatagaggaagactgagatggaggcagatgtgaatatgaaagctcagaggtatagtgtgtgtgtgtgtgtgtgtgtgtgtgtgtgtttcaccatgaggctgggactgttgggggtgtgtgtgtatgtgtgtttcgccatgaggctgggactgttgggtgtgtgtgtgtgtgtgtgtgtgtgtgtgtgtgtgtttcgccatgaggctggggctgttgggatgcccacagggctctggacacccctcctcacccccacctgccctcagatcctggccacaattgagctgctgcaacggtcactccccaagattgagcggagtgcctcggaaccctccttgcaccgcacccaggccgatgagttgcctgcctgcctactcagcgcagcccgccttgtgccttaggccccgcccaagccaccagggag

SEQ ID NO: 137159 - DNA, 2234 bp, Homo sapiens
ctggggagggggtccctgggggaaccgaggggtcctggaagtgggaggggctcccaaggtattgaatgaggttgaggggagctggtgaagggaaatccttgtggggctaggtgttgggtggcatttgaagatgtggatcttcagagggatggaagatccatgggaaggggctcaacagtaggggtttcttgaggatttggaaaattatgatgggaaataggtgtgctggagagatttgggaccaaaaatagggttttccaggaacttcagggctccaggaagggattctgcaatgggttgcctggtatttgggcacttccaggaaggaaaacgccctctggggaaaccaggggcggaggtcttcaggaatgtggaggttctaaaacagaagtagatcctgaagtgaccacgagtggggttctaaaaggacttggggattccacatgtgagaaccggatttagggccaggaggagtcaggtttctcaaggtactcggggatcttgaggaatgagaggtggaatcttggagaaccgggagatgggttctcaagggatttggagactccaaaagtgagaaatggattcagggcccagagaagggttgcccagggattttggggttctcagagtggggtatcagtcggagaagaggctggcgaaagacttcctcaggctgcggatggtctcagctttcacctcgtcctggctaaggctgggcctgggcggggctggctctggaaggttgaaggcattggtcagagactgggatttgctagagagagacaaggtggaggcgtgggaggaagggggaagaggaaggggaggaaggggagagaaacacaacgttaccccaggcccagccccagccctgcccctctgatcctggggctgtgcctgtgacctccccacctgccaccatgggcctggaccctaacaggttctcaaggctgggagcactcaggtggagtgggtggagtcctgggccagggaggcgagatctgggacaggctgggaggacttggatccagggtgaagtgtgggattcgtggcaagagtcctgggcagaaccttctctgtgaattcttggctagtttgatacaaaggggaagatgagcagggaagtttccaatctaagggtgaggtgtctaggagggcatagaaagggcttggaccaaggacaggctgttgggcaagtcagcctaaggcagagcagctgggtggggcagggaggacgtctgagctgggatgggagttggaatggaccagaaaaggcagatgggtgatgattcgcggggagactgagatgggccagaaggatgtgaaggaggaggaaaagtatgaggatggagtgggaagagccagatgataggaggactaggactcgggccaggagttttagggatgggttggtggcgggggggcgagtttggcagggaaggctctgggctgggcaggaagttgcagagggtgggtcagccaggtgcctgggaggccctggaggaggaaactttcccagggcctttgaggaggaattcgaactgagtgcagtttctctgggattctggcaccaaattcctggggtgggggtgcggagcctctggtgggccgggaggagcgaaagcttgggggaagggcttggctcaggctggagagagttcgtgggacccctgcataggacctgggtctgaggagcaagggagctagggctgctctactggggcagcggcccgctttgtgagcagcaaggcgaaggctgctgtaggggtccccttacttgagctgggggtgcggaggtccccctgcagcggcggtggcgggtggcggcacgtcctggctgggtttctgggccagctgtggtttgggacgtccagcggggcccgggccgctgggccgaggctgctgcgtggtgggtggcccagtgcggggcacgggacccgcctggctggcctggcgtgtggggccggctgggcctgggggtttctggggcgggccctggcgctgctgcccgcccggtggggccccagaggcctttggcggagccgggccagagacggatgtctgacgggtagcctgtggggggcccgcctggcgctggggagacggagaggcgggcgggcgggctgctggaggcgccccggggcctcccgccactggccgggattggcggccttgaccctgggtcggcggcgcggcctgggacgcgggctgctggggcgctgaggtgggacttggaa

SEQ ID NO: 137160 - DNA, 1033 bp, Homo sapiens
tttgctgtcggtccagttcgcagaatactttaaaggttactaagtgcctcgccattcaccaagatgtctcgattcgcagagcactaaacaatctaataagggttttgctagtcaccagggacgtgcaagttcagtctagtgttctgccattgcaagggatggccccttcgaaagttcgtcaggcaccttacagtgtactaagcacattgctgttggctgaggacctctgtgccatggagtgcttcagtttgcactgctgctgcctggcatctgttcctccctctaccccacctacccctgggtgctcatacctcaatgatgtgatcccttccgtccttgccatgtagcgcttccactgcgcagatgtccagtcccccaaaaatctctgagcacgtgtccacccacagcttgtatctgccaagacaaagggtggggaagcctgtcagtctctcacctgagctgtcgtgctcccacccccgcttcccctcacaccctgagttcgggctgcccacctgtcagacatggcaatttgctccagcatcgcagagccagtattggtcttccagttccctgacactgacgtcctcctgggggacaaggggacagaagctcaggggtgcctcagctgcatgaggcaaggcaggggaccccttccagggctttggtctctccactcacatgtaggccttgtagttctgcccaatcttctggacacgcacgtcatatttggcatcgatgaagggctcggcagtggcatacgtcttggtcagtgccacgacacttgcgatgtcctggaagtcatgctggttgtcaaccttgacctgtggaagtgcgggcaaggatcagggcctggtcaggatagggcagctgtggggagtgggggtgcctgggggagcatgtatacatgacacacaggtgaggcgagtacacaaaaattaggtggacatgccaaggcgctcaagcaggcacgatcatgggtctcctgttttgtatgtgagcacacaggcacaaagttgggtgtgtagaacactga

SEQ ID NO: 137161 - DNA, 1118 bp, Homo sapiens
gtctcttgattggacgggtaatcttttgtgttgtgtgtgttcccctgatggtgatgtgggtttgggtgaggggagggaacctgggtgtgtgcccaagtattgattgtgtgcctaagggtgtccagtgtgtgctgccctggagtgctggctgctgacccacgctatgggcacctggctggctgaatgactgtgtgggtgtctgtgctgctccagagctcatgtgctttgagcctgtgttggctgtcagtctcaatgtcactggcatctctgggtttggcgatgtacatctgagttccaagggctcatgcctctcaatagtttatgtgtgcaggtgaggcttacatacaaggtttggctgaggggttcagtcactacatgctcaccaccactccccaccccccccacccccacacacacgcactggcacacacttgcctcactatcatccatccactgtaaaaacaaactttctttttactggaacagtcccccacgctcataccatgcctctgcccgggaaagcaggggcgggacgtctggaacttgttggtggggtggagtgagggacagacagacagggctctgggttcaattctgggcccggaggtggagacactgtgtgacccccagctgctgcctgcctgtctctgacctgtgtgtcctgggaagtgactcataatgcagttcccactggctgggatcccctcagtgccgccccacccctggaggtcaccctttctgccctgagcatgtctcctctgccttttccccaccagctcagcagtacaacgtaccccgtggttgtgaagatggggcacgcacactctgggatgggcaaggtgagtctctggctgggctgtgcataggtagatgtgtatttgtgcaatgcacaccagtcattctgtgtgatcgcgtctcctggggtgtcgttatctatcaggttggtgcaaaagtaattgcgggttttgccagttcttatggtaaaaaccacaattacttttgcaccaacctaatagatttttgttttctcacattcagctgacctcatcgacccctttttcctcctgcattcagccaattttgtgtgtcctgttattttgcttgtctccagcatcgtg

SEQ ID NO: 137162 - DNA, 1038 bp, Homo sapiens
tcccgcccctgctttcccgggcagaggcatggtatgagcgtgggggactgttccagtaaaaagaaagtttgtttttacagtggatggatgatagtgaggcaagtgtgtgccagtgcgtgtgtgtgggggtggggggggtggggagtggtggtgagcatgtagtgactgaacccctcagccaaaccttgtatgtaagcctcacctgcacacataaactattgagaggcatgagcccttggaactcagatgtacatcgccaaacccagagatgccagtgacattgagactgacagccaacacaggctcaaagcacatgagctctggagcagcacagacacccacacagtcattcagccagccaggtgcccatagcgtgggtcagcagccagcactccagggcagcacacactggacacccttaggcacacaatcaatacttgggcacacacccaggttccctcccctcacccaaacccacatcaccatcaggggaacacacacaacacaaaagattacccgtccaatcaagagacacacaactccacaggcacactccacagaaccgggcacatactcaacacacaggcacacataaaacacccctaggcaaatgcacagcaaataaggccctacacaacacacagaggtgtatgcacttctaggtattcacatcaccactgggacccgtaagagacccacgccacattcctgggcatacaaaaagtatatctagacacacacacaacatgccttgccacatatacaatacagagaggctacacacaaccagagacacccacaactcagtttgcagaaaacattcctgggcactcccaccccaacacacatacagtcacacattcaggcgagagggatacctcaagtctcccccgctcctggatggggtagaggaaaccaggttggacggccctaggctccccgctccctccacccccacccccacagcacagctgcacagtgcccctctggtggccctccctctcgctgacaaggtagagagatggcattcccggaggg

SEQ ID NO: 137163 - DNA, 1038 bp, Homo sapiens
cctccctaaattcccccagcctcttatatctcttaatatacacaacccctaaactctgccgtctccaaactcctccagcccccaatcccaaattcctcacccccaaactcctcaacctccagaattccccaatcccctcattcctcaaacttcctcagcccccttctcccccaagtgccacaaccccataaccccgcaactcactcagtccctcaataatttaaactctcccaactctctaaaccctaaattcctctgcgctccccaatccccttaaaatccctaagcttaccaacccctcaagcccaaatccagccccctaatcccccccataggctgccccggggcaagatggggtggatgacctgcccaggtcagcagatcagctgggccggggcctgcctgacatcccccttccccacagaacccaccatggccccctttgagcccctggcttctggcatcctgttgttgctgtggctgatagcccccagcagggcctgcacctgtgtcccaccccacccacagacggccttctgcaattccgacctcggtgagtcctcaccccactcagcccacacactctgccttggtttccctttcagtccagtggggctcaccatggcacttacctctagaatgattccactcgcccctgcacttcctctgctttagccacactggcatcctcacacttccttgagtactctgtgcccaagcccaccacaggatctgcatgctggctgctccctctgcctggtacactttccccccaggtatccacatgggtggctgcctcaaacgtcaccttctcaggatggccttccctggccatcctgtttaaaattttaacccctgccccttagtactcctgatctcctgttaaacagaaaaatattcagtgatacttgttataacacagtaaggaagaccatattcaggaccatggtgatgggtataggaaccactgcaatgggatcttgcagtcggtgggagagattgggctcaacactgaatatagcatgggccagtgggaat

SEQ ID NO: 137164 - DNA, 2831 bp, Homo sapiens
ggaggaggttcaggagcctgagtaaagtttggtcaagcaaagaatctttgtcagccccttacccaggtctgtaattccccattatacttaatgtctaacattccatatccttattttgtttgttcttagcctgtctcctcctggctagaatgtgaactccacaaggaaagggatttctgtgttttgttcactgttgtgtccctaacacccagaacaatgtctggcacacagtgggcactcccaaatatttgaggagtaaatgaacaaatcaatgtatgaaaatggcttaagcagtgcccggcaaagagagacactcaacatacagatgaatcaatgaacaaatgtgtaaatcactttgtgtgctgtctggcatccaataacccctatttatgtatgcgctttgctggtatgatgatgatgatgatgatgatcttatttttattggctcatgcagtccatttgactcatatttccctcctctcctgcagtcatcagggccaagttcgtggggacaccagaagtcaaccagaccaccttataccagcgttatgagatcaagatgaccaaggtatcccctgcccccgcctctttcccagcattttctaacatcttcctcctggtcaaaacagaaacttctggccactggttggtgcgagaaagttggctgtgatcttgggatgctatatgacttcagggaagaacctggagtgggaggattatgtcagtaaaagagacacttcccctcatccatcaacagatgtataaagggttccaagccttaggggatgccgctgacatccggttcgtctacacccccgccatggagagtgtctgcggatacttccacaggtcccacaaccgcagcgaggagtttctcattgctggtgaggcaccgtccccgcgccctgtgccacaccaaccagtccctggggcgcggcctagcaaccacgagggggcgaggctctgatgggaatggtcccactggaaatggggaccaccccaatttcagtctatcagaaggccgggcctttggcagcttggcagctcagccaatcacaagctgcttgtcggtccccgccccgcctttctccttaggaaaactgcaggatggactcttgcacatcactacctgcagttttgtggctccctggaacagcctgagcttagctcagcgccggggcttcaccaagacctacactgttggctgtgaggaatgcacagtgagtgcctggaccctgacctccaacgggagatccttcccggggccattccctaaatcgtgggcttgtttcttgctccctctggctattctgtgtccctgtggctgctccccaaccctaagggctgtccctgatctctcttgctatttccccaagcccgagactgctcccttacaaattctggctgctccctttccctgtgtccaataccgtgtgatcacctgtccctccctggtccctctaattctcccttgtgactattctgtaatcccactccccgttcctgagcccccgggattgtttcttggttccccagaatgttctccaagaacccaaagtgctgttccctaatcccactgacccttcctcagcacatctgcttgttgctctgcagctctgactattccagacaccagagggtgttacactgacctcctggctagtccaagcctgttccctgatggctcctgatggcctctgagcccagtgactatcttgaagccccactggctattcctgtgcttaaactccttagccgccaaccgggtggggccccttactactgccagtttttccctgtcctttgggacaattccacaggcgacctgcctgactgacccccagggcctattccccagccaccattccaggacactgatttactggcttactgttacctttcaggacccagtgacatttccctcaatgggaggggctgtcctggggtatgtacttaggtggggtgagagcaagtctccccagcggctcagtgttgaaagctgaggagaggaagttctgctccacgggggaggcagggagaagccctcagagatgtttccctcctcccttccaggtgtttccctgtttatccatcccctgcaaactgcagagtggcactcattgcttgtggacggaccagctcctccaaggctctgaaaagggcttccagtcccgtcaccttgcctgcctgcctcgggagccagggctgtgcacctggcagtccctgcggtcccagatagcctgaatcctgcccggagtggaagctgaagcctgcacagtgtccaccctgttcccactcccatctttcttccggacaatgaaataaagagttaccacccagcagacactgtttctgtgtagtgcctgggaacaaacccatgttgctgatgacctggtgtgagcaccctgggaccagtggggatgagggatgccaaatgttgggtttttatattttacttaaattctgatgtactggtagtaattctcaacattggcattagcactgatgatctgcaacagcagcaatggtcactgaacctgcattatcaaccgtaacctctgaataatttctccagccaatactttaaaacattttcctatactgattcctaattgctatttgcccagggctttctagttataaattatcccacagctgacaaatcactgccttactggaaattccccattcacacatcttgccagctgacagagtcattgacaaatgccctaccaattggcaaatgactatcattgcctcaagcacagtcctgatgttgtccagtgaggatgccccatccaaacacgtgggtgttactgtcctcatcctca

SEQ ID NO: 137165 - DNA, 1079 bp, Homo sapiens
gagggagacctgagggtgaggagtccacacagggtggggacaggttggctggcctgccgttaggaatccctaaaggggaacctctcctcatggtgtcgccacagttgttgtgggtgggcgtgtagaaggatctaaccacattgctctttattttcaggtgcttctgtgagccacaggttcaggactccactaggaaactggattgtctgtgagggggaaaagagagagggacactgggactgaggaacatttatggcgtaaagagctgggatcttagtatcacatcaggagcttttgggtctcggagacctaccccattccttcaggcagagcagggtcaggagcttgtattttggtgaggagactggtgtgggggagaaatggacattaaattattggtactaatcatacacattatttccaatatcgtatattatcatgcctaatatcaaacattgtttgcaatattataaataatcactactaaagttataagttatagttatcataactacttctagtaactaatgcttgtaagtgctatatgcctagcactgttccaagtacttcacatatacaacctcatttaatatggacattgtctctatgagttaggccttctttttatccctgtcttacagatgcaggaactgaggctcaaagaggcaatatgatttattcaaggacacagagctaagacatggcaggggcaagatttgaatgcagatgatctggctccagggttcctgctttttttttttttttttttttgagacggagtctggctctgttgcccaggctggagtgcagtggcttgatctcagctcactgcaagctccgcctcccaggttcatgccattctcctgcctctcgagtagctgggactacaggcgcccaccaccatactcggctaattttttttttttttggtatttttagtagagacagggtttcaccttgttagccaggatggtctcgatctcctgacctcgtgatctgcccaccttggcctcccaaattgctgggattacaggcgtaagccaccatgcccggcctttttttttttttttttgagacag

SEQ ID NO: 137166 - DNA, 1358 bp, Homo sapiens
ttgaggaggagtctcgctctgtcgccaggctggagtgcagtggcacaatctcagctcactgcagcctccgcctcctgggttcaagcgaatctcctgactcagcctcccgagtagctgggactacaggtgcgtgccaccacgcccagctactttttgtatttttagtagaaaaggggtttcaccatgttggccagcatggtctcaatctgcccgcctcggcctcccaaagtgctgggattacaggcatgaaccaccatgcccggcttgaatcattagttttaaggaaacccaatttgtttatcattattattagtctacattctttgagagacagtagagcagaatgtgattaagagcatggactctgtagccagaatttctgtataagaatcttacctccacaacttattagttgcttaacacaggaaaagttacttaaacgccctgtacctcagtttattcatctgcaaaatgtaggtaataatagttcccgcctcatatagttggtgtgagaatgaaattacttagtaaatgtaaggtgtctagaacaatgcatctggcatatattaactgctacctcagtgttgacaaatttctccttctattcttagttggttgagtatttttgtcgtgaaaggatgttggacattgtcaaatgcttcttctgtgtttattgacatgattgtgtgaattttgtcctttattctatgaatatggtatgtagtacattaattgattttcatgcaagttgatacgttcataagtttgtttatgatgtgtctaggtgtagacatttgcattcctaggctaaatctcacttggccttggtataaatcctttttgtatgttgtaggatttagtttgtgattattttgttaaggattattgtatctatattcgtaagagacattgctctgtagttttcttatgatgtctttttctggttttggtatcaggataatactggcctcatagaataagttggacagtgttccttcttctatttttgggaagattttgtgaagattggcattaattttttttctttttttgagacagggtcttgctgtgttgctcaggctggtcttgaacccctgggctcaagcgatcctcctgctttggcctaccaaaatgctaggattacaggtgtgagccaccatgcctggtcggtattaattctttttaaatgtttagtagaattcaccagtgaagacatctggtcctgggtatgtctttgtaggaagttttacttattcctaaatcaatctcttcacttgttataggtctattgagattttccatttcttactgagtcagtttttgtagtttgtgtctttctaggaatttgtccatttcat

SEQ ID NO: 137167 - DNA, 1080 bp, Homo sapiens
ttcataaggcccaggttctttttctttttttttttttggcctttcagcatgtagaatatctcctggcacacagtaggtgtacaataaatatttattgaatatgaagtcctgagagcagcatctggcatgcagcagatgtctagcaaatgtttatttaattaataattgaaggctgggtgtggcggctcatgcctgtaatcccagcactttgagaggacaaggcaggtagattgtttgagcccagaagtttgagacaaacctgggcaacatagtgaggaccccccccatctctacaaaaaacataaaaattagctaggcatggtggtgcgcacctgtagtctcagctacttgggaggctgaggtgggaggatcacttgagcctgagaggttgcagctgcagagagccatgattgtgccagtgcactccagcctgggagacagagcaagaccctgtctgaaatatatatatatatatatatatttttttttaaagtctgacttgtggcatcctggggtccctggctctttttctgaagaaaagttgtctccccacattccatgcctaagttcttgcccacagaaggatgggtggggaggtaggaactttcccccagctctaagggagagttcttatgccttgctcataacaccaaggtacccttcttatactcaccgcacgaccttcaccccattccgaagaacttccatatccacagagaatccaccattggcatgggccacaaggttgagatcagagaattcggcctgggaaggagaaaaaaactggtgattcacctacatcacacaaaaatggccactcagtttgcagtatggacaactgacccccaggtccaaatgtcccaacttacctgttctactttaatgtcaatttctccatggatctttttccctttgaagtattttgccctggagaggaaaaacaacacatctgtcaatgatgaaatctcagaagggaagacaaaacacaggcccttgacccttttgccccttcaatgctactaaagaaaccacaaagtgccttataattattgaaatattttgaaaaaatcaagagtgctt

SEQ ID NO: 137168 - DNA, 1101 bp, Homo sapiens
taggccatgtgaccatgcagcccttcatttggggacagtctgcttcaagggtctaggggctgagaggaaggattgaggaggcctttctcctcactccctttcctcctccaacagtggctgggggctgggggccttggggccctgtgagcccctgccctgtgacctgtggcctgggccagaccatggaacaacggacgtgcaatcaccctgtgccccagcatgggggccccttctgtgctggcgatgccacccggacccacatctgcaacacagctgtgccctgccctggtcagcatctcagggttcacgatttgcatgcctaagtcccccttgcccttctctgctgcccagctcctgctgctgaggccttgttcctgtctctgattcctcctttcctggccctgataccttgtttccacccctggtcccccattcacacatctgatcacctctactccctcctaccgccctcattccttcctctgaacccccttgctgattccctgctttggtccaatcccctgttgccctgtctctgcagtggatggggagtgggactcgtggggggagtggagcccctgtatccgacggaacatgaagtccatcagctgtcaagaaatcccgggccagcagtcacgcgggaggacctgcaggggccgcaagtttgacggacatcgatgtgccgggcaacagcaggatatccggcactgctacagcatccagcactgcccctgtgagtgtcccacagactgtgctctgagggtggggtggcccatgcaggataaggggtttccaactctctgctgtggacctcacgtctctgcagcctccctctcactttcccaccaagacctccagttctgactctgtgacccctacccctcattgcagtgaaaggatcatggtcagagtggagtacctgggggctgtgcatgcccccctgtggacctaatcctacccgtgcccgccagcgcctctgcacacccttgctccccaagtacccgtgagtgagagggcaaagtatgcctgggagggggtcattatattacaggcgggagagtcggctaccccaggaaaccagggtttccactgctgaatcta

SEQ ID NO: 137169 - DNA, 2794 bp, Homo sapiens
gaaatggggaggggagagtagagaaggaggcagaggggacagggtggggtcaaagcaggatgccctcccagttcctcctgcctctaggttcctctttccctgctgattccaggagcctatcaacccagataaagcgggacctcctctctggtagaggtgcagggggcagtactcaacatgatcacagagggagcgcaggcccctcgattgttgctgccgccgctgctcctgctgctcaccctgccagccacaggtgagggggtgagggcccagctggccccaggggtgtccaggcccaccacatccctgaccgagccccacccacccatcccctggccctgttacaggctcagaccccgtgctctgcttcacccagtatgaagaatcctccggcaagtgcaagggcctcctggggggtggtgtcagcgtggaagactgctgtctcaacactgcctttgcctaccagaaacgtagtggtgggctctgtcagccttgcaggttagggggagcctggggtgggggatgggggggagggaaggactgtctgtgggggtcacccaaaactgggcactttctttctctgggacttccaagggtggccctgaggccctgatcgtgaccatacctcagggtttctcaaccttgttactattgacatttggggctggaaattcttggctgggggaggggattgcttacctgtgtattgtgggatgttttgtaacacccctagccttccactagatgccagtagcaattctccccaccagctgtgacaaccaaacatgtcagcagacattgccaaatgtcccctgggggtcaaaatcacccctgattgagaaccactgacatagctcacacatattgagcacctcctgcacactggaagcattgcaggtggggtgcagcttggtatttccctaattttgatgacagctcatgtttattgagtgcttactgtatatggacacactgtgggggcgggaaagtttggggaattcaaagggcagctctaggcccctaattatgatgacacttcacattcattgagcactccctgtataccagctgcatggcagggttgggagatgagcttgaggatttctgagggtagctctagtctcctgatcatgatttccagcttgcatggattgagcccttaccgtatgccagacctgttttctacttgtttactatatatcccagatacaccgtgggcatggggagcttggggatttttgagggcagctctgggccccaagtcatgtcaacagttcatcacatctatttggcatgaacagcatacctagggctatgcagtgggttggggatagatctggggttatttctgaggaggcctctgaggtcatagggatgatggctcaggtttattaagcactttctatttacctactaccgtgtagtgtggtgatctggtgggtttctgacagcagcccttggtttctagtccttacctttgcttactgcggacctggtgttggccatgcagccttccaatggtaactccagatgcctgattgtgaaggtaaatgacattatcaagcacttattgtatatccactgcttcccatcagtatcccaatatccctaaaaggtaaggacttatcaatccatcgcacacgcacttgcctagcaacccttcgtgtctgcccacactctggagtcccacatgccattcttgttagctcatgccaggatgggatgtgtgtgctcttctccacaggtccccacgatggtccctgtggtccacatgggccccctgttcggtgacgtgctctgagggctcccagctgcggtaccggcgctgtgtgggctggaatgggcagtgctctggaaaggtggcacctgggaccctggagtggcagctccaggcctgtgaggaccagcagtgctgtcctggtgaggaggatgagcaaggcgggcaagcactccctgtcacccagcactggtgggaacgatcggtacagaggtcctcagagtgggcccgtccccagtgtttgtaaggacctaaggaggagagtggtgggaggtgaggtcagagaggtgaggagggtccattgcctgggggccacagagaggacgttggcttttcatctgagtaatttggactgtgggcagaggaggaacgtgatctgactggggttgggaggagaacagactgtgcacggtgagggtgagaggggaagcggaggcacccatgtgaaggttgctgcggcaggcccggtgagcggggatggtgggcccagaatggtggcagaggatataaggacaggattagctcatgtggggcactcaaggaagcaaagagccctgaatgacaccccacctccatcccattaccctctcttctctcccacagagatgggcggctggtctggctgggggccctgggagccttgctctgtcacctgctccaaagggacccggacccgcaggcgagcctgtaatcaccctgctcccaagtgtgggggccactgcccaggacaggcacaggaatcagaggcctgtgacacccagcaggtctgccccagtgagtgagggaagccacaggatgctgatgggtgcacccagcgtgggtctgcggggttacagcagggaactgccaggctgagaggactttagcatgcatgaccacacctgcatccctccacctcccaccccaccacagcacacggggcctgggccacctggggcccctggaccccctgctcagcctcctgccacggtggaccccacgaacctaaggagacacgaagccgcaagtgttctgcac

SEQ ID NO: 137170 - DNA, 3388 bp, Homo sapiens
gagtgtggttgttcctgaagagggtggagcctttgagtgtgattgactgggctgatgctggctggagggatggggtttgattagtgaagggcagggctggggacttttgtgggtgggaccgagggtctttctgtgggactgtttctaggttggggtgtggcttaaggaacctgagcagggctttttggtctgggatgtgcatatggggtttcatgggtgggacatgagttggaagttgaccctgagctgttgggatggtgacttgagaggtttgagagcagcatttggatagggtcttgtgggtggtcttgaccaatgaggtctcagcaactgagggtgggctctcgggagtggggagtggggggtgtctgcagagtttgagagatcataggcatggcctccatggttaccatctaggtgtgtgcactttggggagtgaccctgggagtgtgagtgggaaatctgtggtggggccgggaccaagtcccttccagcatcccacatctactttctactcacttgagctccgaccaccctctccccacagaccccggtgctgctgacacccagctcgctgcctcctagcattcacttctggagcaccctgagtcccattgcgccccgtagcccggccaagctctccttccaggtaggatcctctttccccgttttggacagggtgagagacccaagaatggcccccatctgtgacctctccctctttttgcccccagtttccatccagtggcagcgcccaggtgcacatcccttctatcagcgtggatggcctctcgacccccgtggtgctctccccagggccccagaagccatgactactaccaccaccaccaccaccccttctggggtcactccatccatgctctctccagccagccatctcaaggagaaacatagttcaactgaaagactcatgctctgattgtggtggggtggggatccttgggaagaattactcccaagagtaactctcattatctcctccacagaaaacacacagcttccacaacttctctgttttctgtcagtcccccagtggccgcccttacacgtctcctacttcaatggtaggggcggtttatttatttattttttgaaggccactgggaggagcctgacctaaccttttagggtggttaggacatctcccccacctccccacttttttccccaagacaagacaatcgaggtctggcttgagaacgacctttctttctttatttctcagcctgcccttggggagatgagggagccctgtctgcgtttttggatgtgagtagaagagttagtttgttttgttttattattcctggccatactcaggggtccaggaagaatttgtaccatttaatgggttgggagtcttggccaaggaagaatcacacccttggaatagaaatttccacctccccaacctttctctcagacagcttatccttttcaaccaactttttggccagggaggaatgtcccttttgttcttccccctgagaagccattcctttgtctgccaacctccctggggtcctgcctgtttcctcccaatggagggtttttttggggggtggtccccgtctggggggcccctccagccagtactccaggtctccctgtctctcccccgctgccattttgatagtataatctatttttaaatggggcttttcaataggggagagggagtcatctcttcctatatttggtggggtgggtgggaaggaagggatttgggggggaatcttcctgccgcctcccccactccaagtgtttatttttgataccaaacatgaattttcagttccctccctcccagccccccaatttcctgcgggcgggtacaaaggaccctttcaatgtccctggagttgggagggaggaatgggggacataaagcctgtcctgtctctattctaggcaagagagagtgggttcaaaagactcctgggctcacctgttagcgctggcccagcccaggccttgggacctgggggttggtgatttgggggacagtgctacactcgtctccactgtttgttttacttccccaaaatggaccttttttttttctaaagagtcccagagaatggggaattgttcctgtaaatatatatttttcaaagtgatgctggaggctgctggcactttttctctgatgttgtcaggactagctgagcgtgacacgcatgactgtgtgtggagggtgtgaggcagaggtcgattgtgagagaaacggtgtgatggcgtgtgtgagaaacaatagtagggactgcatatcggtaaccatgtgtgtgtcagagacgtggaaagctgtgattgtgtgtgagagtgtgcagaagttgtgaccacagacttttgatggtgtgtctatgtgggaaattgtggctgtgtttcagaaaataactgagcctggatgaatagtcaaggtactgtacaagaacctgtgatggtatgcacaaaataatgtctacgagaagggaacggggactgcagccctgtcactgtttgatggcgagcaagacagactgggtgaccaaaaccacatgtgagagactacgtgggcatgaaactacagtagaggttgtcagggattgtggcaaagattgtgtaggtgacaaacctcactgtaggcgactcaacgtttgagaaatagatgatgtgcaaaactgtttacttgaggctgtagtgtcagctaaagctgtaagactgtatgggtgcgaacttgattgtacgggagagaatggctgggagaccaaaccagtgaccgagaccaaagatacaagaaggtgcaattgtgtgtacgaaagcaggcgtgagagactgcagcaaagactgagaaaaacgaatggctgtgactgggagagtgtgacaggctgtgtgtgtgtgtgtgtacacctgaaactagttgcaaatcgatttaccattactaccacagtctatcccacaggttcagggactgtgagaaagtaggagagaaaatgacggtgagccggacggagccactgacatggtgtgagagaccacatcactgggcatgcaagggagagggacaaggaactgtttatgagagacttggcagtagcagtaactggaagtcagaaactgtgggagaggaacttgacaactgagtgatgtcagagcaccagggggtctgtgaaacagttcataagaaaccataaatcaggggccatacaaaagagctgagcaaatgagacatgccaagtgaccacgtgacagtgtgtgagaaacttgtaaagctgtgcacgtgtgtccgtgatgagctgaccatatgaagaaaatgacggtgtgcacgactgagagggcatgggtgactgtgggtgacttatcgagggcctagtggtgattgtgaaat

SEQ ID NO: 137171 - DNA, 1052 bp, Homo sapiens
ttgccacgggggcctgttcctagggcacaaagttactgagagacccagagatccagtctctctgtggaacctccaaaatgccccagcagtcctgcctccagcctgttgcctggcagtatttgccagttgaccttatgcactgccctctcttctgtcatcttggcaacctgggccccccacctcaccctttcttccattccttttcctagacgccaccctttgaattgccatagagaatgggccaattcatggtggaggtttgttcattcccacaacaatcaaagggccctaaggtttacgctttcacacacccaatcattccccaggtaccccaaattacacccaaaccctaactcagccctaccttgtcttagcccctgcttgtaagtgttccagcttccaatgggcacagacctggatcccgctctccctagtcgggcccctattctaggttgagtccagccaccgccaatcaatgcagagccaggttcctcccctttttaactctggccgcagttcaaccctgccctctgaaagcatttcgtttctgccactcaatgctctttcgtgtgcctgacagccatcctgccctcctacctccgctgtgttctaaattcgtctttacccagctctatggtcttgtctaaccgtagagctgccctgcccgcctacgcggagcccagtccgacccactcccgccggctgctacgcccatttctatacaagccctgcttccgctgagcagcatggcgtgcgacaccgcccccttggtgttttggcaggggtctagaagtccctcgtccgccaatcagagaaaaacagggccacccacccccgtccttgggggctgtcttccatcaatcccatgtaagccaatcagtgtgaggcagacccccgcccccccgacacaggccccgagccttttcagttgctcacagtccgtcagtccttgagccaatcggcgtggagcaccgtgaaggccgaacgcgcctcctcgggactccaggggccgtgagcgttccatcatttccccttacgccaatcacggcaca

SEQ ID NO: 137172 - DNA, 1050 bp, Homo sapiens
acttttttttccaatttaacatcctatcttattgctctctgcttttccaacagtatttagtttcatttacccctcaaactgactcctacattgacagcacaataaaatccacattccttattatattaagaccctgtgtgatctaacctcttcctatctcttggaccttgtcttaggccactttccctccccactcaatttctaacactctgacctcactgcttctcaaacagctctttgttgcctcttgtcctttttgtggaaaaggccttcctactgcttaaccattaggcattcttcgattccttctcattcttcattcttgagaaaggccttccttgaccctttatatcaattaggattcttttgggcgagatctgatccaaactggcttagagaaaaggagtcaactgactggttcatgtaattcaacctccttcctctgctgcaaccttcccttggctcccatctcacttaaggtcaaagccagggtccttaccatggccttgtaggcttcacacagtttgtctccctcattacctctctgacctcacctcttacattcccccttcacttattcttctccagccagagtggcctctttgctgcacctcaaacatgccaggcacactcccacctcagtgcctttgtgtttgctgccccttgtgtgtggaacacatcctccatatagccacactactcaaaattcactgtctttaagtctttactcaaatgcttctccgtgaagccatccctgagccctctttaaaattgcagccccccactcctgtactccttattgtctctcatttttaatttttgttattgtagttagaaccatctgacacatagcttttattccattggttttttgttatgtctttctttacaagaatttgaagtccatcaggccgggagttttgtttgttgtgtttgctgctatctcccagtgcctaaaattgcctggcatacagtaggcatttaataatctttgaatcagtgaaaaccagatggtggcttggcatttccacataggaatgagccaggtgg

SEQ ID NO: 137173 - DNA, 1023 bp, Homo sapiens
gccacattgggagatttgtcttgggccatacataaaatacactaatgctaatgatagctgatgagctaaaataaaaaagttgcaaaaaaaaatcacataatgttttaagaaagtttatgaatttgtgttgggctgcattcaaagccgtcctggaccgcatgtggcccactggttgcaggttggacaagcttgatttacggttttgtgcagggaagggcagttgggagcatagatgagggatttgaaatgtagctagggaaggcctcccagaggaagggacatttgaatcatttgactgagtgacaaagccatggggctatctggcgaagagcattcctggcaagaggaatagtgtgcctggtatgctagtgaaactaccaagagaggtgagcttggtttcaatggaatgagcatgggggcactgagcaatacacttagattaacaacatctcacaagtgtgagtaccattgatttaaacttctttgttggttgtgttttgtgtttatgtctgttctacattcattttttccagagttgcctcccttagagtttcagtaatttttatcttttcaaacctttccagccatgggaaggactagcaggtgctagtggacccaaaagaacctcagacctgctgagatttctgattcttggtgttcagaccaattagcaaatagtttaattaaacggcctgctttcatggtcaacacaattctgaactggtggtcatttagaccaagtccactttgtttttgagacggaattttgctcttgtcgcccaggctggagtgcagtggtgcgatcttggctcactgcaacctctgcctcctgggcttaagggattctcctgcctcagcctcccaagtagctgggactacaggcacccaccaccactcccgactaatttttgtatttttagtagagacagggttttgccatgttggccaggctggtctcaaactccgacctcagatgatctgcccacctcagcctccctaagtgctgggattgcaggtgtgagc

SEQ ID NO: 137174 - DNA, 1664 bp, Homo sapiens
acgtcattcacccgcgccacccggaagccgcggttcctaccaaccgttcttattgctggcggcctgaggtaaaggccgcgcttgggtgtccctgggtggtcgggtccccgagttgggaggggcggaaggctgaacctccagcttgagccggacaagccgattcccagcgttgagagggtagagatgaactgtgtgtgaggccaaactggatcggtcaacatggtcttccccctccccactccccaggagcccatcatggcgacgccccctaagcggcgggcggtggaggccacgggggagaaagtgctgcgctacgagaccttcatcagtgacgtgctgcagcgggacttgcggtgagtgacagtgcggggggcggggcgtttggaacattccacgtggtgggtggggcgttcaaagttagggccaaccctttgaattggcgggcgaggcgttcagagtccggccccgcgctccttggagcgagaagtggggacgacatccggggtgcagtttggctgggacgtggcgttcatagcaggggcgtgtcagcgcatgcgcggcctccgatgtttaacagattaaggcttgttttctggagccacagttctcgggttcgaatcctggctcggccattcttcatccttgtgaatacgtcctacctcgcctttctgtgccctataaactttactcttctgtgaaatggggagttttctggaaccttccccatgcagtggttttgagtttttgatgtgtcccatctttgtcaagaatttagcatggatgcctgaaacatagtagaggttcaatgagtatgaagaaatattattgcaatctttgttaatctaagcaggaaataaggtgttcagaactaggcctatgagcatcctaaaagggatggaggatttttctagggtgaggatgggacattatgattggagttcagtattgggagtataataatagtaattataactaacatgtatatagagagtttaccatttgataagcattattctagatgctttgtagtaaacgctcatttaatcctaatgactctacaaggtaatactgtcatctgtattttataaatggggaaactgagtcccaaacaggttatttacttgccaaagtcacacatctataaaggatagagcccagatccaaacccaggcagtctgacccagagccgaaaattaacttatgcactaaaaagccttttcagtgtatggtgacatgagagtctcagagggtcatgatatgaggtatactaggaggaatggggctgcctattggtcaccattgtactttcgtcccatcagaaaggtgctggaccatcgagacaaggtatatgagcagctggccaaataccttcaactgagaaatgtcattgagcgactccaggtaaagactatgggattgggtaccatttttttggtatgtgtgggcaagggagggaaatgggaagagagactccagacccaaccctgtcacctgacctaagagttcaccactgacccctacctctttttccctggccccacaggaagctaagcactcggagttatatatgcaggtggatttgggctgtaacttcttcgttgacacagtggtgtgagtgtctacccgcccctctgagcccacagggttcagcttaccccttccct

SEQ ID NO: 137175 - DNA, 1371 bp, Homo sapiens
ctggagtgcagtaacatgatcactgcactcaaagtgcagtgcactcaaagctcactgcagcctcaaaatcctagcctcatgcaatcctcccacctcagcgtgctgagtagctgggactacaggcgtgtgccattacgcctggctatttatttttatttttagtagagacagggtctcactatgttgccttggctggtctcaaagtcctgggctcaagcagtcctcctgccttggcttcccaaaatgttgggattacaggcatgagccactgcacctggcctgtgttacactatttttttgtggtctcttcctgtgcttcattaacctggtcatgccagtatttgagtgaattcatctcattagaactgacttttgaggtcagaggtgtgatactgcctggggaaggaggtcagcttgcccgcctgaagccccactaggcaggtgctgaacactataaggcctatagacccgcacacataaaggggaggagtacacatctctggactgaaggtggcctaacctcaccccatgacgggctagagtgggaggagttccctgtggccaggccagtgatttggggtactctgagacaagaggacatccttactgttggggaccactatgccaggtacatgagctgatcaggcagagatgccaggctgaggccattcccatatgcacagctgggggagatgcctttacaagcagttagcatgccacagctgttgtgacattcagttattcttttgtgaatgtcatcttcgtagcccctttgcagaggaatatcgataccccaacccttgggctaagccagataaagcattgcttaaagtgaccaaaggcaggaagtttaagtcccagagcctccaggccctccaaaagaggtggctgtcctattgaatccaaaccaggggacccctgttgagcttgctcacagctgcttctcaccaggatgcctcacagagaggaggtgggagcccaacctccacggacaaccagaaggaggagaggaccctggagaagaggatttgcaccctctagaggataaggcagcacaatactaccatgggagagtgaggaacttgaccctctcctttgccagtgatcacctgcaaagtcaaaaggacagaagagacaacaggggagggtcaagaaggagaggccatctcttatctggaggaggacacaccctctgtctcacacggaggccctgcctgtccttaagaacctagcccaggaaccaaatgaaaaagtggctgcctggctacagagaatgtattcgaaagaggcaacaggcccctctggcagacaatcagcctttaccacattaactgtggtttgccctccagcaaatcaacaccacgggccaac

SEQ ID NO: 137176 - DNA, 1004 bp, Homo sapiens
ggacacaaatggcaagctgatggcccacatgtgggtgaatggaggtgagtgaagcacagacaggggaatggatggagatgaacatcagcatgtgaataaaaggattgggattggaggaagagagaggagggcaatgaagggctaagtggggagtgaatggagtaaagaggggcagaagggtggtgaacagggaagagtagggcgaaatgggggaaatatccagtgttgtgagttactggagaagaaacagttgagtgtaagtaaacatgagtagtgttggggagagaaggagggagtagactggcagtgagtgggtgcagagtggaggaaattgggagtgatatgaggcacagtgtgaatgacagtggttaatggggttgggtgaagagcagtgcaggaaagtggcaaagcatggcatgacgctaatgaatgaagaggggaagaatgccgggcagtcaaggtgggaagactgtgctggaatgggaggcactctgtgaggtgagtgatggggatctgtggtgtcagaggttataggttcttggggtctcagtgatgcatgaccttgcgttggtggtgatggggagttgggtggaggtgggaggtgatccctggggtttctgcacaaagaggagctgcgctgaagaccctgtagtgaccacaggtgtatgggatgggatcagcctgtgttctagacagtgctcaatgaatgtcacttctgtgttccattcctgatgtggtttggatctgtgtccccatccaaatctcatgttgaattgtaatcccgtgttggaggaggggtctgatgggaggtgattggatcttgggggtggagttctcatgtatggtttagcaccatcccgccttggtaccatatagttagtgacttctggtgagatctggtcgtgtaaacgtgtgtagcaccttcttcctttcttcctcctgctcctgccatgtaagatgcctgttccctctttgccttctgccatgagtaaaagctccctcag

SEQ ID NO: 137177 - DNA, 1397 bp, Homo sapiens
gagtaaattcagcctttcttcttttcatctcagtcataacccaaaagctacgggagaaaaagcagaagtgtaatctctgtatctgacaaaattaggagacagctgcaaccctaatgagagggctgccacaggcagaggaaatgaagcactggtgcaggagatttcagagtgagagtgctcaaggctgcaggtgcaagacagcactggtaaggactcttagctgaggttcgggatataccccgaggcgcggaaccatagatataacagtggtaacagtgcgtgggcaggtaggaggtaggatgtttcctagaccatttggggtctgaggagaaacaggctggggcctcgagaaggagtcactcagacaagccatatttttagaaagtagtctactgatgggagcaacagttatggcatgctgggggaagagaagggacttttccttgtgaagagccctacagctgcccctatttactgacttgggagaagtaaagtcagaaagaacgaacagctgtggggggaaaaaattctcagttgtcaaaaaaaaaaaaaactgatctgcttagaatgtggccctggtttcttttcccacatgaacctccagcaaatagcaagtccaggaaaaactcttctcattcaaagaggaattattcaaaagtaatcaaaaccacaaatgcatttggtttttgggccagcaattccacttctaggaatgtacatactcacacatgtacaaaatgatgaacatacagtattcattaatgcagcgtttgtgaaaacaaaagattggaagctgtttaaatgacaccatatcagggttctggttccctaaattgtggtatattcatacagcctactcctgggtagacaacaatgaataaataaggagaacttggaaaccatttatgtagtgatgtgggataaccttcagtttatgttattaggtaggaaaaataaggttgaggacagtgactgccatttgtatataaaaaggagaaaaatggtaagtacataattgtgaattcataagttatctctggaaagagacatgagaacctggtaaccctgattaccttgggaggggaaggggcagtggtggctggggggatggaattgagagggagacaactgtatcctttcatagcttttgaaaatgtgggtgtactatgtactatgtggatgtactaccttttcaaaaataaaacatttaaaaagctattttgttttactgttatagtaaagtcacagtctaggtacaggattttataacatttaatatagatatgctcaatgtagagtttatttttggtgaataaattgaagaaccaagcagatagaacaacagttattcaatcaattccagaggcacataggcattattttcctgaggttgccaa

SEQ ID NO: 137178 - DNA, 2018 bp, Homo sapiens
atcgcttgagctcaggaggtcaaggctgcagtaagctgtgattttgcccctaaactccagcctggcaacagagctgagatcctgtctcttaaaaaaaaagtttatatgataactgaagatcaagggtataagtttcgcagagttgatagaagtcaggtatgatgtataaatagacgtaagaaagactgaggtgtcagggtaagattgttcttggtaacaaaaagaccagcaggtgagagtttagtaaaaaactctctctccaggaactctgataaaatgagattatagtatcagctttcatatggcagaataattctaaagaaggtccgctccataatgtcaaagcataaaggtggtttattgtacttctttctagaagtctgtcaagttgatgaacagattgagaggcaacatcaggatgaccaagataaatgtctgctgatgcaagttggattttctgacaagaaaacaattatcaccaagagtgctcgtgactgtcatgagtttggaaacatacttcatctgagtacaaaccttgttgcttcaatacaaagacccgataaacacgaatcatttggaaataatatggtagataatttagacttatttagtagaagttctgcagaaaataaatatgataatggatgtgcaaaattgttcttccatactgagtatgagaaaacaaatcctggaatgaagccctatggctataaagagtgtgggaaaggtcttaggcgaaagaaaggccttagtctacatcagagaattaaaaatggagagaaaccctttgaatgtactgcatgtaggaaaaccttcagcaagaagtcacacctcattgtacattggagaactcatacgggagagaaaccttttggatgtaccgaatgtggaaaagcttttagccaaaaatctcagctcattatacacttgcgaactcatacaggagagagaccctttgagtgtcctgaatgtggaaaagccttcagagaaaagtcaactgtcatcatacattacaggactcacacaggagaaaaaccttatgaatgtaatgaatgtggaaaagccttcactcagaagtccaacctcattgtccatcagaaaacccacactggagagaaaacctatgaatgcactaaatgtggagaatctttcatacagaagcttgatctaattatacatcatagtacccatacaggaaagaaaccccatgaatgtaatgagtgtaagaaaactttcagtgataagtcaactctcattatacaccagagaactcatacgggagagaaacctcataaatgtactgaatgtgggaagtctttcaatgagaagtcaaccctcattgtgcatcaaagaactcatacaggagagaaaccctatgaatgtgatgtgtgtggaaaaaccttcacgcaaaagtcaaaccttggtgtacatcagagaactcattcaggagagaaaccctttgaatgtaatgaatgtgagaaagccttctctcagaagtcctacctcatgctgcatcagagaggtcatacaggagagaaaccttacgagtgcaatgaatgtgaaaaagcattttcacagaaatcatatctcattatacatcaaagaactcatacagaagaaaaaccctataaatgtaatgaatgtggcaaagccttcagagaaaagtcaaagctcattatacatcagagaattcatacaggagagaaaccttatgaatgtcctgtgtgttggaaagcttttagccagaagtcacagctcataatacatcagagaacgcacacgggagagaaaccctatgcatgcactgagtgtggcaaagccttccgagaaaagtcaacattcactgtacatcaaagaactcatactggagagaaaccctataaatgtacagaatgtgggaaagcctttacccaaaaatcaaaccttattgtacatcagcgaacccatgcaggaaagaaagcccatggaagaggccacactcggaagtcaaagttcatggcacattagagagctaatca

SEQ ID NO: 137179 - DNA, 1034 bp, Homo sapiens
tgcacacaaactactcaggaatctaaaaaaaatgtgaatataaaaaggcacagttggccaggtgcagtggctcacgcctgtaatcccagcactttgggaggctgaggcaggtggatcacctgaggtcaggagttcaagaccagcctggccaacatggcgaaaccctgtctctactaagaatacaaaaattagctaggtgtggtggcaggtgcctgtaatctcagctactcaggaggctgaggtgggagaatcgcttgaacctgggaggcggaggttgcagtgcgcagagatcacaccaccgcattccagcctgggcaacagagcgagactccatcttacacacacaaaaaagtatgattggttaaatcaccctctggagagaaggggactcatcttcacagtttgctaaatgtccctagggaagtttgtctctcattctttctctttccaccccttcctctgattccctttctcctccctatgtatttatatcgaattggtcatttttcctctctgttgttcctggttctttcttggtgctttgagattcattcttttatcacttcccttgtgttagaagaacttcctttaggcattttcttaagagtaggtctgccagagacaaattctttcagttttccttcacctgaaatgtcttaatttccccttcattcctgaaggataactttgccagatatagaattggtggtagacagtccctttttgttagcacctgaaaaatattatgctacttttttctagcctccatggtttttgttgagaaatctgctatcattcaaattgtttttttgttgttgttgtttattttttgttttgattttttacctataggtaatgcattgtttttctctggttgctttcaaaattttttctgtttctgtagttttcagaagcttaattttgccatggcttggcatgaattagggatttggtcagcttcttgaatctgtaggtttatgtcttttgccaaatttgggaagttttcaggtattatttcttcaaatactcttgtt

SEQ ID NO: 137180 - DNA, 1063 bp, Homo sapiens
tcttccagagagcagtctgatggccagctgatgtgaggggattgctaggcagctaattctgggcactgaaagtctgatggggtctcctcatctgctgtactcttctccacttgttccagctcggccgtcacacatctctgctttttcccaagaagagcaggaaatggccaaaccccaggtaagtatgttgtctgtttcttcattcctctattttactgtggatgtgacgaaatatgtggaaatccctgccataaaataggaaagtatttgtaaataaggattggatcaggcaaaataagagacaacagatcaaggccaaattagaatgtagaggtgtgcaggactcagggtgtaacagatattgatgttgggctgtcagtttctctttgagccttctggtagccaaagggaaacataaccagtaccttggctcaccttactcatcaggagagagcacacagccttcatgggaagtcaaggttgcctggaattgtgtttaaaggtatttctttgctgggtcttcatgtggatagtgcagttgccctcaaccacagcctggtgacaaatgctttcctgcagatatgtgctacagctttcctcagtgagctggagacatcatgtcaaaatgtaacttgggaatgaaatctcttagggaacctgcttgtctttccaatgattttcctgaagcaatttcttagtcggactttgaattatcttttgtccaagagacaaaattttttcagatacctgcagcccaccatattttttctttcactttaaacatttttattttttaaattaacatacagtgaaattgatttttgttagattggtgtaactaatctataggatagataatagtttcatcaccccaaaaaaactccttcatgctactctgttaatagtcatgtcttccccaacctgtaacctcaggcagcggtaggtctgttctgtgtcactgtagttttgtcttttcaagaatgtcatataagtgaggtgtcatgtattatgtaaccttttctttctgagatgattgatttacatgcaattgaaagaataatac

SEQ ID NO: 137181 - DNA, 1075 bp, Homo sapiens
tgagcagcgagcagaaaatctgttatcgagagagagtgaggttgagggggcaagtgctaggggtcgtgggctgagtgatggggagttctgtgggatgagtgaagtgggagttgggggttgagtgatgggggaccgagaggtcagtggacgaggttctaggggctcactggtgaacaaagttatgggggctaagcaggattaaatggggcttattaaactttgacttttacacgttttccagcacagtgacctgcccctaaaggttcatgcgcatccctcagacccctctttagacgcgccccgcttctccctctgccctctccccttgcccaagccccgaggtgggggcctggtgtgaatgctccggccgaagtgaacctgcacccccgcacccgaaggcctctttccggcttctgggcaaggcggccccggtgaggtgagcagaaggaaggagaggcacctgcgaggtctcacctgaccccgggcctcgcccaagttgggggcgtgggaggaggggtaggtgcggggtctgagggagatgggggtaaaatgtaattgggataatagttttagagtgtagttttttttggcatttaataaataacatttgaatatatagattaattctgaaatagagaaaaagaaaatcaacaggaactaattcttcccccacacatttaaatgtccgtttttagacatttttggtgtgtataggggtatgccttttaaacatttaacatataactttaaaatggattcccgcagttttaaaacctactttgtaattcaccttaggatttttttgtacaccttttaaaaacgtttagttgagatacatataccacaaagtgcatagatactgtacagttccatataacgcttttaacagctttgtagcattttatcttttatattttgttattattaatcccttatgggtcatagaggatcgtttaagtttggcattattgaaatcaatgctgagacgtgggtacgtgcagagaaattatgatacattatgataaattatttccttaaggaaaatacctacaaatacactttatgggtcagtaca

SEQ ID NO: 137182 - DNA, 1058 bp, Homo sapiens
catctgtctttctgtcccttctgtggtctgtctgttcctgtgctgtttctcatgcctgctttctttgtaacttcagttctcctactctctctctgtctcctctctgcacctttttctgccatccatcccatcctgctgtccgtctgctctgtgagtccatcccctctgtctgcctgtcactctctctagctgtgggtctacaccctcaatctttcaggccatttcccccaccatcaacacacaaacaaaccgctgtctccctccaagtgggtccagatagggggcgccccttctccacctcttcccccgcccagggccagaaggagggaaacgaaattaaaattaacatttcttctcaggaaaaaaaaaaaagtaccgctccagagcaggagcctaggcagccgagagggtgcccgaacctgagtctgagttgcggccacttcaggagctgagaggagcaggtaggtgaggagggagcgtgggctgcggggatggtgttcctgggggcctgagatatgagtaggggtcctgggagggggctcggggttccttggagacattttagcactagtggggaatggaatggcgtgtatggggaggtcctttttgtaccctgatcccaggaagtgaattcaggtgtgggtgggaggctccggagggtgctggtggtgggggatgggactccttgagaccctccctgtcccaggaacgggattcaggacttgggaaaaggatttcctgagccagtttgagctctaatggggaccttgaatgggggtttctgagatacctccttcccaaggagtaagcgcgggagggagctggggtttcttcagagacgctgtacctacaagacaggggctccaggctcgggtggggattgcagagacacccccaccccaggaaactcggtaggccacgggagggggtctttgatgaaggtctcagaaatagctcttcctccggaggggaaatgagggctcgggccaggttcctgagacaccccacaccccacacctaggaagtttctcaagtctggcagtgtctccaaattgact

SEQ ID NO: 137183 - DNA, 1991 bp, Homo sapiens
gaattgaaatgagttcctaagggttaggagctcagaatatgcatccagttggcagacagtaatttgcatctggaaccttagcagtaagacagcctggaaaatgtatttagtgtctgatctgtgtggtacaagaagatgcacagagccagatgggacccccctaacgctgttcctcttgccacagtaaccggtctccatgatgttgatgagtatatgcaggcccagctcctcctagctgtgagtaaccctggccacccctgacccactttggccccctcctggctgtctccacctcagcctcagccgtctgtcctgcccacaggctctgaacattgctacacatgtcctgaagccagggggctgctttgtggccaaggtaagtctcaaggaacttggtggagtagagggaggtcgctgagggccaccctcacccgctgtctttgccttctcaccctgcagatattccgaggccgggatgtgacgctcctctacagccagctgcaggtcttcttctccagcgtgctgtgtgccaagcccaggagcagccggaactctagcatcggtcagtggggtggaggggccaggcaggcagagggggatctctgggacgccgactgcacgaggaggaagcggcagtcatgcctcactccaccttcccctggcagaggccttcgctgtctgtcagggctatgaccctcccgagggcttcatcccggacctgagcaaacccctgctggaccattcttacggtgagagctggagcatgggccaccctgggggactctgccacaccttatgcaatctaggtcccatgagggcccacagtctcaccccctgggggaggctctgtcccctcatgggaatttttttcccaaggggatccttagccccattctctgatggaaatcccacccctttatgggtattttgtcccgggaggagcttcagcccaggcagtcctctagtggtaactcttgggcctggtgaaaattccatcccaggaggatcctgagccctgccccagtggagactccacctgcctaaggacattctctcctaggaagatctcagtcatgtcccaggtggaaacctcctcggtgtgaaacttttgccccttaagcctctagcaggaagagacagagcctgcccctgggatgacatttgagtgagggagacgtcatccaggcagcatataatccaatatcaggtggacataaatgcagtgaaaaatagcagggcaccgatgttttagaaggggtgattatggagggcctccccgaggaggtgatctgaaccaaatgaaggatttctggtggggtgggaagagagtagctggtggatatgtggggagggtttggcagccataccgccgcctgtgtcatgactggccccaggcatcctgaccttgtcctcagttgtctccccctgttcctaagacccagatttcaaccagctggatggtcccacccgcatcattgtgccttttgtgacctgtggggacctgagctcctatgattcggaccgcagttacccactggacgtgagtgcccaaccaacagtaggtgggtgggagggaggctgtcctaggttaccaggtcctcaccatctccctacccctctgtccctgcagctagagggcggctcagagtacaagtacactccacccacacagccccccatctcgccaccataccaggaggcctgcacgttgaagaggaaggggcagctggccaaggagatccgcccccaggactgccccatcagcagagtggacacgtttccccagcccctggccgcccctcagtgccacaccctgctggcccctgaggtctggaaatgtgactctcagcctgccttgaccccttccccgtgtgcctttttctgacccaaatctcatggtttctggggccaaaattccctttcctgcctcccaatagctataaaaaattggtaaagccaagcataatgaatggaaaagtttcgccaaatat

SEQ ID NO: 137184 - DNA, 3720 bp, Homo sapiens
gtggcccctgagaacaaggacatcatctcccacaaccacatcctccaccatcaccccacaagacattgaatctggatacaataatgttatcctatataaattgatatttgaatttcttccaaggtcccccaaatgccctttatagatgtttcttttctttaaacccaggccctgccaccctctccagctccccaacacctgctttgggcccctccaatcccactacattccagcctgaaggcctttgccctggctacgccctctacccaggtcatcctccccttcctactagcccaccaaccttctctttcttgttctccctctctctctccctccctccctcccttcctcccactccctctctttctctctctttctcgttctctctctccctttctttctccctttcacccaaagggttgccatcctacctgaagcatgcaagcaccgtggcaggcgggttcttcagcctctaccacttcttccagctgcacatggtttgggtcgtgctgctcagcctcctgtgctacctcgtgctgttcctctgccgacattcctcccatcgaggcgtcttcctatccgtcaccatcctcatctacctactcatggggtatgagtatgcatccttatcctcacactgttggctgaagtgcatgggtgggtccccaggccccatatgaagttgtccaagacagggagggtggtgagattccccggagaaagaagggagtctgggagaatcatttgcctatgaggagacacagaacaggtaggacgtggagtgtccctggagaagggaatctgggagatttgtcctttcacaggactgtaagggacaggttgggcatgggctccccctggaggagggagcctgggagaatttttccaccatgagactgttgtaggacaggaggaggtagaaccctctgggcaccttggacccccttcccctgtcccccatggtctcagaggccatgagtgtcatgggaccaagaccagcacctttttcctcagtgagatgcacatggtagacaccgtgacatggcacaagatgcgaggtaggtagccctgcccctctcacctgcccaacccccctgccccactcctcgtctcctaactgcccccaccctgtgcctttcctctcctgcttttctccctcacctgcccaccccactggacgtgcagacctcacattactcttgggtccgtgtctctttccaccgtgcattttcccgaagtctgtctgtctcgtgtcatgtatgtgcctgactctctggagtaagggcatctatctgtcctgggcttccttgcccacctgcctatctgtcccatgcccacctatccatccttgtgcccgcttttcctaccacatctcacctggtgcacctcctccttgccatgctgatctgctctctgcccatccacttgaccatgggcaccacacataggggcacagatgattgtggccatgaaggcagtgtctctgggcttcgacctggaccggggcgaggtgggtacggtgccctcgccagtggagttcatgggctacctctacttcgtgggcaccatcgtcttcgggccctggatatccttccacagctacctacaagctgtccaaggccgcccactggtgaggtcctgagtggatgggtgggcagggactgtgggagccaccctggggcagcactcatggagtgcttgatccctacagagctgccggtggctgcagaaggtggcccggagcctggcactggccctgctgtgccttgtgctgtccacttgcgtgggcccctacctcttcccgtacttcatccccctcaacggtgaccgcctccttcgcaagtgagcacagccttcgaggcccctgcccagcaatgagggggttgggtagggacccgcggtttccccagttctgagcctgtctcttaatgcttctttctgtcttctgttactacagcaagaaacgcaaagccaggtaaatgagggcaggtgtgagggcacgtggagtggggctgacatgagtgggggcagagcccatgaccaatgggttctgtgtgtccaagtgtgtctgaccgtcaactccatgactagacagagactgtggttggctggctggctgacgaagcttggctctgtgactctgtttgactgacactccaacacatactgtctctggctgtccatctgttcagctgtctcgctgttagaagcaagtcatattaactgtcatggagagtgacaagtatgtgttggttgggtgactttaacctgtcagtgactctgtctagggatatgtatgatgtatgtttgtctattggccactgacccccgaatgtaagcctgtgtggctgtctggctgtgccatcatcagtgatagggtatgtggctgtcattggataagataaatctgtgttcaagattctgactttttgtagctttggccaggaatgggtctgactgtggcatgtcatatgcctgtctgtggagttcatggactacctctgcctgtgtgtctgccttccctgatggcttggtgttgtctagctgaggggttgtacccgactctggtctgtgcctgtctgcaggactgactgcctctagtttgactatagggtttgatctggctctttggttgtatggcccctcccctactccctggctgctgattaggtctaatgccgaatgagtctccaaaaggtcaagtgacttgaccagtgtcacccagctaagcagccaggcatgaatcccaggcctaacttcagaacctatgctttttccaacgcaggatgctgcctgtttttgaccatgtctgattacaactagtagggggggtgtgtgtgtgcacagcagggtgtttgatggtctctgtgcccagctcagggatttttggctgtcctgtagtcgctgagtcaggttagagcattgcaaggctgggagtctgataagatttgtgtctggctgttagagggtgcaggtctgtgaagtcgggcctctgatggtggctggctttggccgtctggccacgtgagcctgcagggccatgccatattataggatagctcatgcatccatttgagccacataagactaactgcctgagggtggatgtctgtgtgtgactatcatagttcaccttttttgtggctacatttcatctgtcttgtctgaacaattcagaccagcctccagggcctctctgactctcttttctttcttctctgctgccttcctgacccctgggggccctaggggcaccatggtaaggtgagtctacagagcggggcccaggatgctgacatgtggtggggtatcatgttgggacctgaacgtgatgcctctcacccctgcccctttctccccaggtggctgcgagcctacgagagtgctgtctccttccacttcagcaactattttgtgggctttctttccgaggccacggccacgttggcgggggctggctttaccgaggagaaggatcacctggaatggtgggggggcttggggaccccctctcccacagggtgctgcctagaggagctgcagggaggagggcgggtgctcccaggggagggaacggccaagacagaagtgtggcggtcagatgagttgagatcccaaatggatttgcatatctcttctgcccccagggacctgacggtgtccaagccactgaatgtggagctgcctcggtcaatggtggaagttgtcacaagctggaac

SEQ ID NO: 137185 - DNA, 1065 bp, Homo sapiens
ctcttcccctccagatgttttcaagaatgctctccgcctggggaccttctcggctgtgctggtcacctatgcagccagcgccctcctacatgtgagcagggtggagcaggatcagggtggaagctgggtgggggcgggtggcagggcctcttcctcactcatttcattgtcatctgcattcccccagggcttcagtttccacctggctgcggtcctgctgtccctggcttttatcacttacgtggagcatggtgagtgcagggcccagcccagccgttggatagaaggttggtgggggggctggagacagcctcccctgaggctaacctgacccccttacctctccccaccaccctagtcctccggaagcgcctggctcggatcctcagtgcctgtgtcttgtcaaagcggtgcccgccagactgttcgcaccagcatcgcttggtgagggttcagcctgggcaaccttgtgcccaacactccctgtcaaaaatgttccttctatctctatcttgtatgtgtctcagggtgcccaccttcttcttttggtgcctgagccatccccataacctctcctctattcgctggcatccgtttccctaacaggcatttatcgagcatctgctgtatacacacctggcattcgtttcccccagtgaacatccgttgagtgcctgttggtgctctaggtgctggagacacggtgaatgaaacagactgaagtcccagccctatgggacaaacattttaaccgggcagacagtagataaaaaatgagtcagtaaagtctaataatagtgtgtcagattgcaagtagtgctaaggagaaaatgtgtagggcaaaggggacgggaagtatgggggtgatttccatttgaaatagggaggtcagagaagcctccctggtgaggtgatgtttgaggcctttaaccgaaggaggtgagagagggaaacgttccaggcagagagacacccagtggaaaggccctgaggtaggagagggcctggaatctttgaggaatagcaaggcagccagggtggcttgagcagaggtagggtgaggag

SEQ ID NO: 137186 - DNA, 1659 bp, Homo sapiens
cgcctagagcagtcacagaaatgtccttgggcaaaggatgggttttcctaagaacttctttgtccttgctaagtgggaccatcacctctttctctcccacagggctacggcatggcatacactgtccacaagtggtcagagctcagctgggccagtcactgggtcacttttggatgctggatcttctaccgtctcataggctgaggcacatctgtggaccctcataaccctcttaagacccctctcagggtgccactgatgggggatgagggaaggccctctctctactccttgaccccctccatccttgacccccaacacctcaacacacacacacacacacacacacaaaatcacaccattttcatgcctgtcaatccccaccccaccacaaggcaggaagggggtggtgcctgctggggcctagagggggatgcttggggaaacagagaaggggagatccagggcctccccgccttccttcttcctttttatatacaatttgttattgtcaaataaaagtaggaaatattcaataggcttcttcttcactgctcagaggggaataggaatgagtgaggaagggagcacagcatggataaaggtttggaagctggaaaccatgaagagagagcagactgtgattggttcatggttagtttatgattgattagatgatgagcctgaagatggcaggatcctggtcctgcttggtttgatcagggcagggacagattgcatagttggatgtgggggaggcctgattggctggaaaactgaaggatccccattctgattggttgctctgagtgggacacagaggagagaaagcaagagagatgaagggttggtgcctatttatccttaggactgagggttgtgggttctaattggatgggaggtctgggatgggtctggattctgattgattgctccatctgggggcccactggtggttaggcgtttgattggctttttagaactggcatatggagattgagggtcttcatgccaattggtcagtaggactgagaggcctgggttctaactagttcttctgacttgaggtcgggagaagagagaatgaccgctgctattaggactgaggagttctgagcactgaagagctggggagggggtggttgcagtgtatagcgtgtgatctgcttgtaacagtttcgttgcattatactaagggttactctacctagaaaagggcggaggtgaaaggatgcaacgcaacgctaatttcaccagcggaagaagcgggtacagaccttaatgagtccccgttttgatcgactgataagggaatggggaaattgaagccaggactcgatgcagattggctacggatccaaaacgcccactaaccttggcgcgtcccagtctccaccccaaacctaactcaggtgaaaatggcgccacgcgcgggggcggggctagaggtacaaagagagtgtctattggttgggagcggcacgggccgccttcttcgcttcaccattggctcgctccgtaaggcaagagaacccactaggggatgagcccgaactagggatgtgacagagcgcgagacccagcctaaagagagcccggagccagcgtgggaggccgctgccgtcgcgcgccttggtgagtgccctccacccggcccct

SEQ ID NO: 137187 - DNA, 1077 bp, Homo sapiens
cctgggactgtaggcacgtgccaccacgtccagctaatttttgtatgttttatagagttgggggtctcactatattgttcagactggtcttgaactcctttatgcaagccatcatcccacctcagcctcccaaagtgttgggattacaggcatgagccatcgtgcccggcggtctttttctttctgattctctgctcactcttgtattcactcatctgttcacctacattctctctctctcattggctacttcactcactccatcatctacacctgcttccttttataccacacacacttcttgagtaccaatcacagccacactgttttgtgtcaggctttacacatattaccttgttttagagaaataaaccactagaatccaaacagttaccccatttcacggatgaggaagcagacgcatgggaaggttatgaagtctgtcttcttgcagggacccccagctctcacaagtgtgtgttcctttcactgcctttattcttcatatctctctcttcttttcttcagggaaagagtatgccaagggagacagccgatacatcctgtaagtgtttgcctctgtcaatggagactggcattggttttcggggggtggtgagttggggagcactaatgggctaacctgtaggaagagcacaccgataccagtgtcccctcatgctttctcctgcaggggtgacaacttcacagtgtgcatggaaaccatcacagcttgcctgtggggaccactcagcctgtgggtggtgatcgcctttctccgccagcatcccctccgcttcattctacagcttgtggtctctgtgggtaaggaaagggcactagaggggcactgggcactagaggggttgatgggggatccacagacacagatgtatccctgtgggtgggatctctcaacggtgcccttccaggggtaagtcagactgaatgacaaaccccctgaggctctggaaaggtcatgcccttctctgagcctgcactctcaggtggggagggttcatttttcttcctcctcctccttctccatcacaaagtctcctgtgaaggttacatgag

SEQ ID NO: 137188 - DNA, 1451 bp, Homo sapiens
tacaggcatgtgccaccgtgcctggctaacttttgtatttttagtagagatggggtttcgccatgttgcccaggctggtctcaagctcctgagctcaaacagtcctcctggcttggcctcccgaagtactgggattacaggtgtgagccactgtgcccggcctcagtcatcttgtgttattaaattgttagctttctttagttctagcgatatgagttatctttagtcccagaatcctaagctgtcttggatttgaggattttgaacttccttaaatctgaaggtgtgagctctcctgagttctgaaattctcagctctctggtgtctggaatctcacttttctgatttctcagattttcagctctgtgatttcagaatacttagctctgagaccttgaatgatgacttggaaagtgctttggaatagagaattggcgaaagtgtccccttcctcactggggcttctccttcccctcctgccacccacaggccagatctatggggatgtgctctacttcctgacagagcaccgcgacggattccagcacggagagctgggccaccctctctacttctggttttactttgtcttcatgaatgccctgtggctggtgctgcctggagtccttgtgcttgatgctgtgaagcacctcactcatgcccagagcacgctggatgccaaggccacaaaagccaagagcaagaagaactgaggagtggtggaccaggctcgaacactggccgaggaggagctctctgcctgccagaagagtctagtcctgctcccacagtttggagggacaaagctaattgatctgtcacactcaggctcatgggcaggcacaagaaggggaataaaggggctgtgtgaaggcactgctgggagccattagaacacagatacaagagaagccaggaggtctatgatggtgacgatttttaaaatcaggaaataaaagatcttgactctaacactgagagatccttaattactaaccccagagatgcgctatgactgaccccacagatcccaccatcattcacttattccagacccccatcagcatctaaagacctcccacctctgacctcacaaacccctatcactgaccccccgccagaccccataactcactacacagaccctatcactggccccacagtcccctggtcttaactcgagctgccataacagaatgccacagactaggcttaaaccaccgaagttcattttctcacagttctggagtccaagatcaaggtgtcagcaggtttgacttctcctgaggcccctgtccgtagcttgcaggtggccaccttctcagtgtcctcacatggtctctatgaactagcgtccctgtccctggtgtctctctgtgtgtccaaatttcctttttttttttttttttttgagacagggcctcgctctgtgtcaggctggagtgcagtg

SEQ ID NO: 137189 - DNA, 1095 bp, Homo sapiens
ggctcacgcctataatcccagcactttgggtaggccaaggcgagtggatcacgtgaggtcaggagttcaagaccagcctgaccaacatggtgaaactccgtctctactaaaaatacaaaaattagctgggcatggtggcaggcacctgtaatcccagctactcgggaggctgaggcaggagaatcacttgaaaccaggaggcagagtttgcagtgagctacgttcacaccactgcattccaccctcggttacagagtgagactccgtctccaaaaaaaaaaaaaaaaaagcatatacggcatacctgttccacttttgcacaaatattttatttctaaagtatgtctgggctctggactagggtgaatgaagttcagatcccagccctactatttcctggctgtagaatcttggtcacttactatttgttccaaacctttttgtcatcgtctgtaaaatgagaatggtaatattagcgtgcactgtttgtgggaggaggactggcaaaaatatgagagtaggagtttgggctcttgagcttgggcctggccttcaaatttccactctttcactcactagctaaggggccttgggcaagtaccttatcatgactgtgcctgtttcctcaaagagagtcatggtagtagtagtactcaaccgataggactgaagtgactattgcatgagtcagtattggcaaagaattcagaatagttcctggcatacagcactgtggaagcattagctagtattattatttcttatattgctgttgagcgcttgtcctagtgcttggcacatagtaactgctcaataaatattactttatatcattaaaatattagaggctgcccagccagttcctgagacatctactacaaaagaattgttcatggtttgattttgttttttacatgatttggatgatacaggaagagggactgggagttgtttgttcccctgcaggtagcccggcttcagtagaaggagaggaagccggccctgaggtctgggttatcatccccattcttatagcactttgttctgtttgcccaggcccattgctagaagactgggacataatcagccccaaag

SEQ ID NO: 137190 - DNA, 1029 bp, Homo sapiens
aggccagcttggatggcctccagcaactcagggataacatgggctccaggagggaccctctggtccagctgccccacccagctgcccttatcagctccaagtccctctctgagcctttattgaactccccagacccactgctctcctccttttcccaccctgattccccatcttcctcatctccaccatccacccaggaggcctctcccactggtgatatggctgtaggatcccccttgatgcaagaggtaggctccccgaaagaccctggaaagtccctgccacctgtaccaccaatgggcctgcccccaccccaggagtttggccgggggaacccattcatgctgttcctctgcctggccatcctgctggagcaccgcgaccacatcatgcgcaatgggctggattataatgagctggccatgcactttgaccgccttgtgcgaaaacaccacctggggcgcgtcctgcgccgggctagggctctctttgctgattacctgcagtcagaggtgtgggactcagaggagggggctgaggccacagccgcatcttgatcaggctttctcaagccctccatcggccccaccagatctccattctttgccatgagggccaacacatgagaccccacctccctccctgcctgccagccctagacttgttggagcatagagcccttcctccccaggcctaagtatgtggagctctgctttggcactgccccgcagaggccacgcctatttattctgtttctgttgttttgtttttaacaactatactttgcacacatgaaggtcactgtggtttgtgtgtttctctgcctcctccctgggttttgctgtagatggagtcctcaggggccctttacctgatggaggggaaatacttcacttggtggagagaggctccagcttcccccttgtgatggggagagtggatgctgacaatcagttcccaaaggtgagcccaggtggagcactgcttgaggaaggcctgagtctgtttttttggtacatccatcggcct

SEQ ID NO: 137191 - DNA, 1052 bp, Homo sapiens
tctctactaaaatacaaaattaaccaggcatggtggcaggcacctgtagtcccagctactcaggaggctgagacaggagaattccttgaacccgggaggcggaggttgcagtgagctgagatcgcgccactgcactccagcctgggtgatggagcaagactctgtctcaaaaaaaaaaaaaaaaagaggtggcagtctccttaggtgtaatccaccagcccgggtgtctggagggagacaggtggaggactgatttcctctggctgcctatttctttcccctgcagggcccttgctgccctgatcctagtcccccagacatgtgtaccagtggtttggatgattaatgcaatgaagggggcaaacaaggacctccccaaggcaatataggggagaggtgagagccagaacttaaatatctttttccctaacctatcctctatttactgcctctggccatccgcccgtcaaaacacacaccagttaaagacagccttccatttccccatgggtctctcattgctatgttgcaatttctggaacccatgtttccctctctagtttctccagagttggtttcgggcaaaggaatcagtagcttgtgctgtctgccatctttgcaggaaccagaaaccccaagtatcctagaggaatattagaggtttctgcctttcagggtatctgagcctcctattcacagaaaggactcttctatctctcagaggtcccaaactactatccacagaattggcttgtctggtccttcaaacacctgagctcataaatcacagaatgcatcccagagggtattagctgtttactgacaaaagagacatttcaggacctcagaaggccagacactcccataggttggatggccctttggggagtctgagcccatttccacaaaatgcattcgttagacccacacacagtgcttgagccccctagacacagaatagtcttgtcctgttcttcaagtgactgggctatcatctgaggaatagtcagcttccccccaatactgggggtgacgggagacttttaagggtc

SEQ ID NO: 137192 - DNA, 3499 bp, Homo sapiens
tccctgttttttgtgctcctccgagctcgctgttcgtccgggttttttacgttttaatttccaggtaagttgcatatgtcctgcgaaacggcggctcctcgccacacacgcgccgcgccggccgtgaccggggaatagcgagtggggagagtaatggccactgacacgtaggcttggctttctctgggacgggcgggtcccgtgcttggaggtgaaacatttcggttggtgggaggccggcgcgctgtatctgagtgtgaggcctaccgggagggactggtggcgtcggtggtggcagtgaccacgcgacagccgacacttactttccttatcccacgtggccgccgccatcttgttctgccggcgttaagggaacgcagggatgttctgggcttgcgcagtggcacaaaatgacgggcgtggcggctatgaatgtgagagcatgcgcaatgtggccccctaatggtggctgcgctgagccagctcctcagattaccaccttattggccgcctttctcagcttttctgtagttacccatattttgttcctctttcttgtctattttctgtgctttttctctgctttccgtctcgctattttctcacatctccattttctttctccttcctgccaccattcttcatgttcttcccacaggacttgaactgccatgtcctctgaagaaggaaagctcttcgtgggagggctcaactttaacaccgacgagcaggcactggaagaccacttcagcagtttcggacctatctctgagggtgagacgggccatactcacaatgggggttggtgagagaaagtctgggatccttgcatttcaaggagtattaactgaaaagttaggacccacgcctccaaattctttttcttcctaagcctatggtgtagactaaggatgaggggaagcgtctttgggattagtgggagcgctccgttttccctacctatgccatctccttttccggccaccctttgctacttaacctttggggtactgactggtccacattgctccatcttctctccctctcacagtggtcgttgtcaaggaccgggagactcagcggtccaggggttttggtttcatcaccttcaccaacccagagcatgcttcagttgccatgagagccatgaacggagaggtggggcctcctatctgcagagggaccttgtccccatctgcggcttccttcattctttttgtttttccctctgtgtctgctcggggcagcgtggccaccaagccccgcagtgcccactcacaggagcatgactgccttttgttctagggggtggagggcagcggcagacagagcctggccgcctgggaggcgacgactggtcctgcatgaggccgagaagccacctgtggatggttgacctgccttgggcttaggtagtagagtctgcagacctgtgggcctggcccggagaggacctcgtgagtcttctgacatggactctgaagcctcaaaccaagagaggtgtctgtctagccctgatagtcgggcagcttagaggagtggggaggagaactcagcctgagttcagtcaagatgtaagtagtagcaaggggaacatggtgcattcaggtcattttgtgtgggattctatagctcctgatgaagccattctggggtaaaggagcttattctggaacatggcacccagaacctggtgcccagcaggaatttttggcctcttttgcccacttacccttgcctgctcttccctcaccattgccctgactgactgccaacccatcatccttgtgtctcccacacttagtctctggatggtcgtcagatccgtgtggatcatgcaggcaagtctgctcggggaaccagaggaggtggctttggggcccatgggcgtggtcgcagctactctagaggtgagtgcagtgatcgttttgatcatggggtgagagggagagttgcctatgtgtggacaactgccatttaaatatttttctgctctaggtggtggggaccagggctatgggagtggcaggtattatgacagtcgacctggagggtatggatatggatatggacgttccagagactataatggcaggtgggtagccaaagggctgggatgttctcctattgcttccctctccttaagaactcagcgcctgggtgttcatgcataccacaccttgctgttactaatgtgtacctaaaatgagtatgaaatttagcattttaagttaattgtgtagtcatatagttgcgacatggtaaagtatactatatatgttgtgctgtgtgggttatataactatattgctttaacatgtaatatgatttaatatactgcgtataaatcgtatgccataaaactgtttactgtgatactcatatgcttaacatatcctgtttttgatacgtaaggtttatgttatgacccatactgtaaaatgtgacgcatataattacagtggtatatataatgcagtaccagaaaacttttgtgtgttttttttcccccccagaaaccagggtggttatgaccgctactcaggaggaaattacagagacaattatgacaactgaaatgagacatgcacataatataggtgagacttggatatcggcattgagtgaacctgtttgtcacactctgtcatgaccctctcaccttttctggcaagactgctctgcatttctgctgccctcatacctcacccagccaacctaccaaacattcctagctaggccttccttgctctcaggtgcatatcagagcaagtttgctagggggtgggatctgaaaacccatctcctataatcttctactcttgtgtgggatggaggaaatgaaggtgtgtccctgttgtccaaccctcagcatcttcatcagctctaggaggtgagcatgttgtcagctgttacttcatgacatcacaattctccccctcttgctgttcccagatacacaaggaataatttctgatccaggatcgtccttccaaatggctgtatttataaaggtttttggagctgcaccgaagcatcttattttatagtatatcaaccttttgtttttaaattgacctgccaaggtagctgaagaccttttagacagttccatctttttttttaaattttttctgcctatttaaagacaaattatgggacgtttgtagaacctgagtatttttctttttaccagttttttagtttgagctcttaggtttattggagctagcaataattggttctggcaagtttggccagactgacttcaaaaaattaatgtgtatccagggacattttaaaaacctgtacacagtgtttattgtggttaggaagcaatttcccaatgtacctataagaaatgtgcatcaagccagcctgaccaacatggtgaaaccccatctgtactaaacataaaaaaattagcctggcatggtggtgtacgcctgtaatcccagtgacttgggaggctgaggcaggagaatcgcttgaacccggg

SEQ ID NO: 137193 - DNA, 1654 bp, Homo sapiens
gtgggggcagaggtgggcggatcacctgaggtcaggagttcgagaccagcctggccaacagggcaaaaccccatctctactaaaaatacaaaagttagcggggcgtggtggcgggtgcatgtaatcccagctactcgggaggctgaggcaggagaattgcttgaacccaggaggcggaagttgcagtgagctgagattgtgccactgcactccagcctaggtgacagcaagactctgtctcaaaaaaaaaaaaatggcacatcaacgagagggaggcttggagaatatttggttggtgggtgggcagggactgccagagggttaggtgtacattgaggcctgaggcctgctggaattgggtttccttaactggtctcttatcttagtcccattgttctgagaacataagcacctaatctcatggcgtgagctaatccctatcataaatagtggtaccagttcattccttcccctgaaatgatgggggttgggcagagatgcactgaactcatctttgtgtatgagggccatgagagaggcctggtttgaaaacaatgctaagagctcagattccaggatttatgtaggggctcttctacttcccaggtatttgacctcaggtgagtcatttaatttcagccttatgccattttacattttctgtggagggttaggttaattggcatataaagccactgagaagagttggcaaagctctcagtcacggggatttgatcttttttggtgtgtgtgtgtcttgggtggtaaagtggtaattttgtaattctagctggtcttagttcctcagttctgctccctttagtcatggttctttctagtggctgtattgaggccccatgggtgttatccctccattggttctagtttggaacagaaaaatctgttgtattcatggctttcacctggctaatactgagctaagttaccaccaggttgcaaactccaggacattattgtcctgagctgcctattcccttgctggtgcgttgtggaaccctgtattattagttccagtcctggaggcctgcctcctgagtttcccagctagttgggacaggccccaatatcccttcttcctgtaacccaaacagtcatgaatttgctttggcaggtggatggagacttgggaacttccacctcacccactaagccaggcccaggctatggggcattgtggctaaccccaccaggtggatacttggtctgaggacgcatcttattctgggcctttagggagctaaggcagtgagaattggcaggaggactgctgtgaatgccttgtaggtcgggggattggagggggtcctctgctccctgtctctcaggatggcaatgtacctctcacccccagtgtcagctgaggtaggatccataatcagtaatattcctgcaacaaaatgttcctaagtggaatcaatgaagaccaaaatttatttgtataacaactctaaacctgctctgctctgctgtgtttacaatgtgctttgtgatcatccagcccagggagtcccagtctctggctgtctatctgctctaaggaagagagcccacagttctctatagtgccatagtctgtgatgaataaagttccagatttgaggtcaacccccgaccacccttaaagtgcttgttg

SEQ ID NO: 137194 - DNA, 1041 bp, Homo sapiens
acccccataatgtcagtctgatttctgtcgccctggtatactgaccctaattattgtctgcgctgacccagtcaccccgtagggaccccagcacggcagcagactgactctgttgtctgcaaactgacctcatgaccatgctcattattactgcagactcactcccaccacaggaccaagaggtccctcatcaccactgctagtcattcttaccacctaggccccagtcactgccacacacctcactctcctgccgtacccccccccccgagctgattgattccctctgtcctgtgcctgctgcctgccctgcatcctgaccctgcaggtacaacgcgtaccgcacaccaacgtttccacagtttcggacgcagtatatccgccggcgcagccagctgctgcgggagaatgccaaggctgggcaccccccagcgctgcgtcggcagtacctgaggcttcgggggcagctgctgggccagcgctacgggcccctctccgagccaggcagtgctcgtgcctatagcaacagcatcgtccgcagtagccgcactactcttgaccgcatggaggtgagcttctggccacattcacccccgggcataccctgcctgcacacattcactccactgactttcatcaagcacctgctctttgctgggcactgttctgcatcagcagaggacaaaaagataatatgccaagtaaaccagtaaacacacaaactttgtaaacaggtcagtaaacatatagcaagccctgtctttagtatctgctgagcagggggagggcaggaacagcagaactcgtgaggaagccactgcagtagtacaagtgggcagcggtggtggtggcaggggacacagtgagaagtgatctgactctaggtagattttcagggctccacacctcaaaggttctcgggctttttgcaagatgcacccaccctgaccctctccatttgcaggactttgaggatgatcctcgggccctgggggcccgtgggcaccgtcgttctgtcagcagaggctcctaccagctgca

SEQ ID NO: 137195 - DNA, 1006 bp, Homo sapiens
tggccccaccgtgtcagactccagggtagattggtcagagagcaggggaaggacattagaaagtctggtgtggcccggggtgtagtggggtgaactgcagaggaacagaccaagagtgagcttgtgggccgggatcctccccgcattagcagcagccccacaagttccagaaaggagcagccagggagcaggggaaagctgggatcacaggcctaggcaggccctatggttctcacactgtaggaggactggccaaggggcagcatgatggctctgaaggccctttagtcccgtaggcaggtggcctactctgggcagattgcaaaaggggctggctagggaggtggattcatgcctggtcaccttgtctacctgccacagccctattgtgaatagactctaatagggaccagccagtcgcatcaacagcagccccactgtggtcagactcaaggagggcctggctggaagcaggatgatggtctgtgcattctccccacaggtggggaacgccaagcacaacgtgcatgtcatgaacatctccacaggcaagaaagtgaaggggggctccagcaagctgacaggccgtgtccttgctctgtcctttgatgcccctggccggctgctctgggcgggtgatgaccatggcagtgtcttctctttcctctttgatatggccacaggtaggcagacagcaggcctgcatctgggtgctcgccctccagccctcccagggcacagccctcaccctcacctttgccttccctccctctgctgctgcagggaagctgaccaaagccaagcgtttggtggtgcatgaggggagccctgtgaccagcatctcagcccggtcctgggtcagccgcgaggcccgggatccctcactgctcatcaatgcttgcctcaacaagttgctgctctacaggtgggtcccccatcagggcctcctggagacggaggacctgcctcctccagcacactgggacagtagctcatctcctccatc

SEQ ID NO: 137196 - DNA, 1058 bp, Homo sapiens
gggtggcgttgccggctcggggccccggcgtccgaggccccggcgccgggagccggaagctcggcgcggaaaggatgaggctcggggagcgcgggcctggtgcgcggggctgggcggggctcaggggagggggcgcgcgcctcggaacgcagcgggcctggggctaagtggggacgcaggaggggggcgcgcgctgcagatcgcggccggaccggcgcgcgcacgcgcgggggcttgtcgaggaggccgcgcccgcgcgcgggaaaatcggcccctggtgaccgttacccattcggtgtccacgcgagacgccggaaggggagggaagataagggggacagacccccccttcagagtgcggggactgagaactcttctgggggaaagtatcgcctctcggcgtgatgggggaagggtttggaatagaggatctcccagaagagagaaatggggccttcctaataggacagctggactcccccatgtgcagggaaagaggggtgactcagttatgttggggggcccctctatgtgacgaaagccgcagggaggatgggttccacaagtgggaggacctctgaggggttcaggagagtccacctgtggccagttccggagccagcagctggagggtgttaattgggaccacttaagtggggtttcaaatgcaagtgaaggaaggggtttgcgaggacaggctgtagggagaggaaagcgtgggcacaggcgggctcagtctccacttggtcttgcctaagtagggggggtagggcttgcacacgaaataattttgaaaagctcttgtacgtttttaggttgacatctaaagtttaggtgtgatttttgcaatgggaggcagaaaatattaaacattttaaaaagatgatataggatgaggactgactgcccttggaatgttttgagacatgatttgataaaatggcttctaaagtactttgattaagaatgtgccttgaatcagaaagaaatctgttttttaaaatccgtgtgtcttacaaaattttggcagtcccagaaatataccaggtatatttaaa

SEQ ID NO: 137197 - DNA, 2459 bp, Homo sapiens
cttgcgaatcttctccagggtgcggacgccccagccacgcccatcatccgtgcggaagatgcagaggtcatatcggatacccttctgtaccacacgatttgggcagtcatagccgcagcggcagcgggagttgcactcgtagatgggcagcccggctcgaagccgcacctggccctggtcattgtaggcaaacttgtgcagtgacgcccccgggcagcagcctccagtgggtgcccacagacagtcctggcactcgcagcccacagccacctggttgagggtgatgccctcaccaacacggtactcattgatgtacacgaaggcccgcggagggccgtccaggtccacctcattctctacagtgatgcgtcccagatggctgcgcttggcattgagctcctgctcccagcgacggagcgcccgcctctgcttggccttctgcaccaggtagttggccaagcttgggtccaggtgccggggggtctttgaccggtggtgccgccggagcagctccctttctaagtccttgtggaactgcttgaggatacgcacacacttgagattctgccgtggctcccaggtgctctctgagtctggatatccacgccatttcaccaggtaatattcctgttcctgttgggggtgggtagggggacgggggtaccgtaagtagtgagatctttgggccagccttcatggggcttccatcccaaagctgatggataacacctaccccaccccaccccttttctggaatgacttcatgcggtgattaaaaagcatgggctctagagtgaggattactaggttcaaatcctcctctcccccttactgtctgtccaaactgttccaacttttaattaatctcccaaacccactcctctccttggtcttccccatcatcagctccctcccttctagctgttcagaccggaactcctggagtcatccttgacttctcttttgttcacacttccgacacccaccctctgcacatcccgttggccccaccttcaaaatacgtccagtgacaaaccatcatcactgccaccaccctggctcacctggaccctgacaagtccttgcctgttctaggcagcttacatgtattattaactaacttaatcctcacaaccccacatgaggtagatgctcctagttatccctcttttacgacaaggaaaatgaagtactgaaggtttgggtaggtagcctggggtaacacaaccaggactggaacccaagcatgctgactccagtttgttctcctaaccatcctgccactcccccttctggcaataactatccccatttcagttgttaggggattaaatgagtttccgagaggaaacgcctggcacactgaaagtgctcaatagccattagctattgacatttccactccagggttcagcatctcaatctctgcaattactttgtattcctagggagatgggaagagatttatttgggaattcattccggctcctgcccagaaagctacttagtttccctatctgtaacatagggataaaagggtctattcatcctgtgttttcagggtcaaaggagaaaattccctttggaaacagatgtgggcagttggggacaagagggcaggacactaacttccttgtgacctgtcccctcccagagcatggtcaccccagactcacgcggatcttcttgtaatcgcacaggtactcgacttcaaagtcatagaggttcctcttagagataccgagggcagggcaggagagcttggccaggcggcacaggtcctgcagctgattccaagaagacttgcaacacacgctgcagcctggatcaagcggggcagaaagaactattactgggcagcctgactaggccaggagtcaaaggggaccccaaatcctccctgggacatcccaaagactgactaagagtcagggaaatttaatccacaggccttccccagtgctgagactgttctacaacagaaatgtgctttgaaccccaatactcactgcccaaagctgcccctggagcagcagacctctaagcggggtttgcaacatgaattgtcctaaaggaatctatttccagagcttcaaactccatgtcattcctaaaactgcctgcaaacctgctttgggttcaggacctgatcacccctctctccactttgcaaaagaaagagaacaaccccccatctcagtaggatgcagtgccccgaggtggggcggatgggaggacaagattaaaacctccagggcaccaaacaaaggcgtaactggaaagactggtctttaatcccttatctcaaactcctgggccagatgtgttttggaattcaaaattttttggattttacaagactagttctaggatatcccatacatcacctaacacccccagcgtggccaggggacatcaagctataatcaaatgcattaaccgtcctgcagcaaaagtat

SEQ ID NO: 137198 - DNA, 1451 bp, Homo sapiens
cctcttctcatttcacaagggcccatcttatcaccaagcagtatctgcctgaggagcattgttttaccagtctgcacagaaggaacgcagtctggagtaggatgagacatgccttggacaaaggttggctaactcctttagactttcaggacactggggaaggccgagtgtattaggcaagccagccattgtaaaaacaaccccctcatcttagtgactttgcacattacaagtttgcttgctcatggaacagtccattgtgggggtttgagtgggtatcctttcacacagcaactgggacacctaggctctttccctcctgtgcctttgctgtgccttgaagccttggagtcactaccagatcctcagcattgcctggcaggcgggccaagtgggggatagaaggggcccatcctagtgggccaggcctagatgcagcacccatcacttctgcccatgctccactggctggaactgagtcactggccttacctccatgcaagagaggcaacaggatgtgctttagccatgtgcccagctgcacaaggctaaagcacagccataactagcaactagataactagcaagtatctacaacagaaaaatgtcgcattctaagatgggatgcagttagcatttgggatgagatgatttttcgttatgtagaactgtctcatgcattgggggacatttagcatccctggaccttgaccatttaaatccatgagtgtgccctgtcatagtgacaaccccagatacctctatatatagccataggtcccttaggggtgtgatatagttggaaagtgacagaaactggcctgaggaacactcacatgagggtgtccacactgtagcactgatactgatgacaaggagaggctcctactctgagaaactgtacagagggtcacatctgacagggacagagacaatcttgggtagaacaatctacaccacagaggaccctgacagtctgggcaaggagacagccacaccctgtccagataaccctgctggcctgctggaggagatgtctacatgccacaggacctggccatctggaaggaggaggtggggaggtgtccacaccctgagggctcctgacagtgggcgggggaaggagtcctgataatctgcaggaagtccatgtcccacagtgaccccagtgacctggaggaagagcttgtgctctccacactctagaggacctggtggtctgacttaggaagtgttcacacccatgttgtcatgacaggaaaaagaagtgtcctcaccccagagggatccggacagcctggagatctagtctacacccaagggcaccctgacagtatcgggggaagtgtccatgccctcaatgtcctgacgctctggaggaagtgtccagaggttgaaggaacccaaactctctggaggagatgtccagaccccataggacccagacagtc

SEQ ID NO: 137199 - DNA, 1053 bp, Homo sapiens
gatacttcctgctctgtgcagcccctaggacggtggactgtctgggtcctatggggtctggacatctcctccagagagtttgggttccttcaacctctggacacttcctccagagcgtcaggacattgagggcatggacacttcccccgatactgtcagggtgcccttgggtgtagactagatctccaggctgtccggatccctctggggtgaggacacttctttttcctgtcatgacaacatgggtgtgaacacttcctaagtcagaccaccaggtcctctagagtgtggagagcacaagctcttcctccaggtcactggggtcactgtgggacatggacttcctgcagattatcaggactccttcccccgcccactgtcaggagccctcagggtgtggacacctccccacctcctccttccagatggccaggtcctgtggcatgtagacatctcctccagcaggccagcagggttatctggacagggtgtggctgtctccttgcccagactgtcagggtcctctgtggtgtagattgttctacccaagattgtctctgtccctgtcagatgtgaccctctgtacagtttctcagagtaggagcctctccttgtcatcagtatcagtgctacagtgtggacaccctcatgtgagtgttcctcaggccagtttctgtcactttccaactatatcacacccctaagggacctatggctatatatagaggtatctggggttgtcactatgacagggcacactcatggatttaaatggtcaaggtccagggatgctaaatgtcccccaatgcatgagacagttctacataacgaaaaatcatctcatcccaaatgctaactgcatcccatcttagaatgcgacatttttctgttgtagatacttgctagttatctagttgctagttatggctgtgctttagccttgtgcagctgggcacatggctaaagcacatcctgttgcctctcttgcatggaggtaaggccagtgactcagttccagccagtggagcatgggcagaagtgatgggtgctgca

SEQ ID NO: 137200 - DNA, 2450 bp, Homo sapiens
ccagggtgagcacaaagggctggggtctgggaatggcaggcagcaagggcttccctctcgcctcgtcatcccatagtggggaagccatctcccccacccccaattcttggcctgtactttgccttctgccacatgggccctttcctggcatccacctccgtggttttcaaggcttccctgagacaatccacgtggaccaggtgctctacccagtgcctggcacctcatcaccaccccatcaatgcacattcttgtcctaagtgctatctacggactatctagatcttggttccagctctgagtggtgtcagcggtcatgacaccccaggtcagggcccctagcaaccgcagagctcccaagagccctaggtaccttcactgcactgtgaaggcagagcttggtcccagcctacctccagggctggccagctctgcactgccttcctctcactgctcagtggcccatggacacccacttcccttccagtggcatgtgggcatccacttctcagatatgcagccctgaagaagagaccctacagctcttagggccaacactacccagcactgtaagcacgagcagaaaccagcctcagcccgtagcccagggaccccctttctttcactagtacaaagtttctgtggttggggaaccagcttcatgtcgggctaggcactctggcctctgatgtctgcctgctctggggttgcttccccatacctttggggcagcagggaggaggcctgcagcagacccctcaatctccaggcagaagcaggtgcaaaaacaaatatattctggggctgggttgggactcaccccttggacctccttaataggccatgaatcccaacgacagagagtcttgatgttgaaaaactatttctgaaggtgggtgggggtttgtaagtgcaacccacagatggggctgggacagggaaaggggactcctggagtcggtcctcaccacggccacagccctgaacgtagagcaggtaggagcaggtgggggcaggtggaggcaggcgaggccctggcagtcattctcgacaggagggcagcagtgggggaggtgcatgtagcttcaggccccctcagtcagtctggcctcagacttctaagggctagaagaggtatttgcggcaggactcagtcccacacttgcattcaatacggacccgcttcttaggggagccagggagcccagccaggccaaagttggagtccatgcgggtgctctccatgtccacggggtccactgtggagtcacagccagggaggagaggagggaaggaggcagggagggagggggagaaggagggagggaggaaggtagggaaggaggcaggggacttgttagaaggcctggatgaagggtcccactaccctttataccatgagaccaaggatctttggggctgggagcaactctgggatttgagttgggagatcttagggttggtggtttggggctagggccagggctcagcactggaggttgttcaggccaggggttgaagaatgctgggggaggcagggagccgtcaaggaaccaggagggtcgttttaggtgtgtgggggggggcaggggcaggaatagagggccacctgggcatccagaggtacatctgaactctcctgccaaagacctgcccttgagggtctcagaggtggctagcttatcaaggaggggactggctggaggccacaagggtgtccagaggcttgggatgaagaaggccaaagggagctaggagtggggaggggctgggggatgagggaaactcagtcaagactggagtcaggagtttcttaactctccaggaatcttgggagaagttggtatgaatgcctcagggttagggttcaggggctgggaatgaggggactcgaggggtaggcaggggtctagtagtccgaatgggggactgggagtcaggaagagcatcttaaagctcccgctaaagaattttccttggttctctgagtgactggtgtgcctttgggaggggtccttgtgtcccaagtcacagtgcgcccctgcccccagtcccttgccacccccaccttgcatgttgtaatcaaaggtgagctcctcgcctgcccggatggttcttgtggcaaagaaagcgatgcggggcagccgctcgtcaaggttgtctatgaagacgttgtacacctgcaggttggggtcacactgggcgagaaagaacagttgggagagtgaggaggggctccagcctgcccctctcgaccccttgcccgcctgccgggggtacccacactgtggttgacaaagtgggagatgttgccatagtaggcggcatccacggtgtacacgtcctccacgtagtccaggtcaaagaggtaggtggcgccctgacggtcgtagatctggccccgccgctctgcctcctctgaggtaatgatctagggaaagggccatggg

SEQ ID NO: 137201 - DNA, 1046 bp, Homo sapiens
tgggattcatggcctattaaggaggtccaaggggtgagtcccaacccagccccagaatatatttgtttttgcacctgcttctgcctggagattgaggggtctgctgcaggcctcctccctgctgccccaaaggtatggggaagcaaccccagagcaggcagacatcagaggccagagtgcctagcccgacatgaagctggttccccaaccacagaaactttgtactagtgaaagaaagggggtccctgggctacgggctgaggctggtttctgctcgtgcttacagtgctgggtagtgttggccctaagagctgtagggtctcttcttcagggctgcatatctgagaagtggatgcccacatgccactggaagggaagtgggtgtccatgggccactgagcagtgagaggaaggcagtgcagagctggccagccctggaggtaggctgggaccaagctctgccttcacagtgcagtgaaggtacctagggctcttgggagctctgcggttgctaggggccctgacctggggtgtcatgaccgctgacaccactcagagctggaaccaagatctagatagtccgtagatagcacttaggacaagaatgtgcattgatggggtggtgatgaggtgccaggcactgggtagagcacctggtccacgtggattgtctcagggaagccttgaaaaccacggaggtggatgccaggaaagggcccatgtggcagaaggcaaagtacaggccaagaattgggggtgggggagatggcttccccactatgggatgacgaggcgagagggaagcccttgctgcctgccattcccagaccccagccctttgtgctcaccctggttccactggtctcaaaagtcacctgcctacaaatgtacaaaaggcgaaggttctgatggctgccttgctccttgctcccccaccccctgtgaggacttctctaggaagtccttcctgactacctgtgcccagagtgcccctacatgagactgtatgccctgctatcagatgccagatctatgtgtctgtctgt

SEQ ID NO: 137202 - DNA, 1134 bp, Homo sapiens
agttttcagaaccatttaaggatctgttttcaaagggcgaggtatctcgggtgtttgggcagtctgtgtccagggtgtgccagctcagttgtttgggggtctgtcccaggatactaagtctctgagcggtttggaagtcaatgatcagggtgtggagcctccaaatagtttgggtagtgacatctcaagttgtaaggtctttgagatggttgtgcatctctgtcatcaaaggaaaggtctctgatgtgtttaaggtctgaatcccagtatatgaggcagtatgtgaggtctaagagctgtttaagggtctgtagcccatagttttcagtgaagcctgtgttacttgcggtgtgtccaattatgagagctctgagatatatgtaggtgtgtatcccagggtatgaggtttctgagaagtttggggtcaatattcagggtatatggtctataaggccttataccctagatgccctgtgtatgtcctggttaccctgtgtatgaggtctctgggctttttgggatcctgccacctctgtatgaggtctttgaaatatttgggtatctgtcacggcacgtgaggtccctgagcaaaaacaaagagcactggctccctttcagattgagagatgatgaaaatgagtaagtatatctgaaatgtggtcttcattctccactttataccctggcaccatataggtgctcaataaatatttgcagaaaaagtttccccagcacacacaaacttttcattttgaatgctggaggcagattttgggttcaaagcctttaagagcagggaaggtccagctagaatattatcacattttaacctttccattgatgtattcctctggttatttttgtttgcttatggcaagtgattatggtttttccatttagacagcagtggatttggttttctccctccccactttgctccactccttctaccctcccccccacccccccagtgctgtatagtccctgaggcctgggcacttggtcaggcaggaggtggcagggtctcagccagacattaccagtcatggctggtcaccaccaatcatggccagtcaagactggtcaaagctggttatggctagtctaagttggtcaaagctgatcacggccagt

SEQ ID NO: 137203 - DNA, 1438 bp, Homo sapiens
tatttctagcctgcaaggtctattacttatttgtgggtgtaagtccaagggtatgaattctctgatctctttgagggtcagcgtaccagaatgtcaagtctagtttggttatgggtgtatgtcaagatgtgagctctctgatctccttgtggttgtatgtctcaggatgtgagggttctgatctgttcctgtatgtttgtcaacagtgtgtaatctctgatctgtttgtggctctgtgtcccaggttgtgaggttctgacctgtctttctttctttgtcccagcatgcgagatctctgaggtgtttgggtttatgtcccaggaattgagtctctggtctctttgtgagtgtgtgcctcaagtaatatgtgaggtccctgatgtagtctttggtttatttcccaaggtgtgagtgctctgatctattcatgggtatatgtcctggcatgtgaagtgtctggtatttttatgtgtatatgtctcagggactgagttctgtgatctgtttgtgggtataaggccccagatgttagttctctgaaatatttgtgggtgtatatctcagcttgtgtggtttttgatctttctgtgagtatgtcacaggatgtgaggtccccgttctttttgggtgtgtgtttcctagaatttggattttctgagctgtgtgtgtgtgtgtgtgtgtgtgtgtgcgcgcgcgcgcgcacatgtcacagggttgaggtccctggtctgtttgttggtgtatgtccaggatgtgagttctctgatctctttgggtgtgtacgtcccacaatttgaggcctctgaattagttgatactctgcatccagcatattaattctctgaaatatattttggggtctataccctaagtctcagaaggattctgaatcctgaatgcgagggttctgcgctttttctggtctacattccaggggggtgagttcactgggctgttttgcggactgtgtttaccttgtgaggtctctgagctgtttgtccactggtgtcctaggatacgtggtccctgagctcttttggtttcaaagtcccttgacctgtttgggatatattttcaggcgtgaagtctctgttccttttcagagggctcagtcccggggtttgatatatctgactcattaggggtttgttccagggttaaggtctctgagcttgtaatgggtgtgtgtgcgccagtgagtgagttttctgagttgtttgaaggtctataggtgtgaaatttcttaactctctggtggttcctgtgcagagtatgatgtctctgaactatttagcagtctctcttttcaggtgtgaggtgtttgtacccttgtatgagaactctgatgtatttgagtatcaccgccaaactgttttgagccaatgtcccaacaaatgagttatctgtgatgccgtgggttttgtcctagggttgattt

SEQ ID NO: 137204 - DNA, 2157 bp, Homo sapiens
gacccctgtggatactaaaatccgtgaacactcaagtcccttatataaaatggtatggtatttgcatgtaacctatgtaaattcttctgtatactttagataatctcaagatttcttataatacctgatacaatgctacgtaagtagttgttatactacattgtttttatttgtattatttttactatgtttttaaattatttttttcctcagtgtttttgatccagacttggttgaatccgagggctgatagtagatataacatatatatatattgtgtgtgtgtgtgtgtgtataatatatatacctgatttgttgaggtgtgtatgtgtccaagctgtgaagttattgagctatttgtgggttatttcccttggtttgaaaacctctgacctatttgggagtatgtctcagaatataagctctctgatctctttatgggtgtatgttgcaagatttcaggtctgtgatctatttctggctcttttccctagcatgtgaggtctatggcttgattatgggtctgtattgcaggattgagacctctgatttgtttatgggtatctagctcaggttgtgaggtctctgatctgtttgtggctttatgtctcaagatgtcaggtctgtatacctattctgcatatatatcctgcaggtaaggtctctaggctgtttgtagtttcatgttgcaggattcaaggtctctgatctctttttggttgtgtttcttacatgaggtctgtgatctgtttgctagtgaatgtcacagtatgtgagtgtctcttttgtgtgtatttgtcaaggatgtgaggtctaattcaacatgtcccggattgtaagatacctaacctggtagtgggtttatgtctgagaatgtttctttctgcagtgtgtgtgtgtgtgtgtgtgtgtgtgtgtgtgtgtgtgtgtgtgtgtatgtcccaggtttggagatttgatctgttgggggtgcattttgcagcatgtggggcccctgatatcttcgtgggtatatatcctatcatgtcaggtccatgttttctttgagtgtgtatgtcccagatggtgagttctcttatgtgtttgtgagtttaattccaagtgattgaagactctgagtattttttggtatatgtcccagaatgtgtctctgctctttttggatgtctgttagagagtggaggtgtcttatctatttggaagtgtatgactcaggatgtaaagtctgtgaattgtttgtgtgtgtatgtaggtctctggtagctaatggtaccccaaagatgtgcacttcctaatccctgaaacctacaattatgctaatttacatggaaagggggactttgcagaggtgattgtgagggactttgcagaggtgactttgtggaagttaagcatcctgagatggggatgcttatcctagattaactgggcaggcccaatgtaatcacaggtgtccttatatgagggaggcgtgaaggcaagagtcagagagggctatgtagtgatggaagtacagaaaagatgatggacaacatatacagagatcaaagagagctagagatagatggatacaaggagagacagatgggggaggaggaagaaaggggggtggggagagagacagagagagagagaaagatttgaaggtgaaacagacctctggctttgaagatggaggaagaggccatgagctcagaaatgtaggcagcctacagagactggattctttggccaggcgtggtggcccacgcctgtaatcccagtactttaggaggccaaggtgggtggatcacgaggtcaggagatcaagaccatcctggccgacatggtgaaaacctgtctctactaaaaatacaaaaattagctgggtgtggtggcgcgtgcctgtaatcccagctactcgggaggctgaggcagtagaatcgcttgaatcagggagtcggaggttgcagtgagccaagatcgcgccactgcactccagcctggcgacagagcaagactctgtctcaaaaaaaagaaagaaagaagaaaaagaaaaaagaaattggattctccccaaggaactccagaaagaagtcagctctgccaacaccttgacttttaccctgtaagactctttgtcagaaatgtaagatcataagtttttttttattttta

SEQ ID NO: 137205 - DNA, 2019 bp, Homo sapiens
ttaagtaatcatcttgagatgcggggacggttctggatttcccaggtgagcccagtgtaatcacaagggtccttagaggagagaggctggacagtccgagtcagagaagcagatgtgatgccagaagcagatatcagagagatagagatttgaagatgaaatgctcctagctttgaaggtggaggaaggggccacaagccaaggaacgcaagcagctctagaaactggaaaaggcaagggcacagattctcccctagagcctccaggagtaatgcagctctgctgacactgtgattttagccctttgaaacccatttttttcttctgacctgcagaaaagtaagataataaatgtgtgttgttttatgacattatgattacgatttgttacacattgatctctgtttattggtacacatcccaggatgtgaactccatgatctgtttgtgagtgtatgtctgatggtggaagtctctgatctgtgtgcagttgtatgaaccacattgagaggtctctgaatgttgagggtgtgtgtcccagaatccgtggtctctgagctgtttgtgtgtgcatgtactaggatgtgacatctttgagctgatttttgggagtacattccagtaggtgaagtctttgagatatttaaggattatgttccaggttgttacgtctgtcatctgtttggggggtatttcctgtgacatgaggtttctgatttgtttggttacatatgtaccaggatgttaggttgttaggtgtctggtctgtttaggtttatttgtctagggtgtgaggtttctgagctctttgtggatgtatgtctcaggattgaggccactgatctgcttactggtaaagaaatgtcccagtccatgagctctctgatctgctcgtggttctgtgttatgagatgtcgggtctatttctggtgttttcctaacctgtgaggtctctgacttcattggagttgtacattgaaggatttgagatctctgtttgtgggtgtgtgtctcaggagtgtatggtctgtgcattgcttgtggagtatatcccaggatgtgaactttctgatcagtttgttatatatgactcagggcctgaggtttctgatctgtttgtggattgtgttgcagagtttgatgtctgtggtctctttgtgggttcatgtacaggttgtaaggcctctactctgtttgtgggtgcatatcccaggatttcagctccctgacctgtttgatgctgaatggcacataatctgagggctctgcgctatttttggtatttggggtctctgatctgtttgtggttacgtgtccatgttgtgaggtctgttatctatttgtcagtatatgtgccaggatgtgaactccctgatatacacgtaggggtgtatctgatgtgaattctgtgatctgtttgcaggagaatgaaccagggtggaaggtctttaacctctttgagggtatgtgtcccagaatatgaattctctggtctatttctggattcatgtcccaggatgagtgatctctgatctagttgagtatgtgtgtccagggaagaaagtttgtgaaccctttgtggtttcaggtcccgtggcctgaagcctctgatgttcgtggatacatgtccaggttgttatgtctctgatctgttggtatatgtctcaggatgttaattccctgatctgtttgtgggtggtgtctgatggtgtgaaatgtctgatgtgttcactggtgaatgaaccactgtgtgaagtctttgacctttgttgagggttttaacataggatctgaattttctgatctatttgtaaaagcatgccctatgagatgtttgatctttgagctctttatggatgtacatcccaggatgtgagttctctgagctgttggggcatacatgttctaatgttctaggttatcagacctctgaagtttttttttagttatatttccaagcatatgtgatttatatgctgacatatatattcatatatatatgtaacaatatagctgtcc

SEQ ID NO: 137206 - DNA, 1051 bp, Homo sapiens
tggtgtgctctgtaaatgggaattatcatcatcattattattattagaagcagcggtcgcaacatagggaaatctgtcctcacagggaatggcaggctcgaggcatgtctaagagctaagacaagggtttggccgctggactcaccccatttcttcatttctggagagcacagagcgctcaggaagagaagccaagggtgaggagtagggcgccccagagccctgcctccagcaagagctggaaaccccgaggctgtgaggccaggcctcaccccattccctcccccatccccgtggagggggcgcaggctcagaagtctgcggcgacagttcagccagcaaggaggcagctgggagtgggcagataagggaatcagtggggccagatcaggctttgggggagacgagggcgggggtggggtgtcctggccgcgcgtcttctccgtcaggcctaagtttgagactcttcttcaatgtcctctcttctcggaagccttccctgactggctcactccctcctggcatcttctggggttctagagcccctgcttggtccaggccccatggcatttgtactgtttgtgcctcttctgtactgtggagcccatcagggtggggacagagcctgacagactgtggtgtcaaaagcaccaaggcaaatgtcaaccaaagcctggttaaggagtcaagcgtttgccctcagaaacaaactgttggttgactgttttaaaaaatggaaagtataaagggtgctgtaacaagcatctacttttgtcaaacattaatattttgccttattgacttcagattgtttttaaaggatatgcgatattacagatgctcttgtactgattccatttccctctctccttctactgccttgagcttggtgtttatcttcctcatgagtatttttactccatcactccatatgttggtacccataaacaccatatgatacctggggtttttttggcctgtttttgcacttcatggaaatggaagcacatcatacagtatgtgctgcttttgctcagcataatgtctgtga

SEQ ID NO: 137207 - DNA, 1076 bp, Homo sapiens
ggtaacgttccaatcccagccctcaagggagggtctcaccgggctgaagggagcagatataaggtctagggggcagatatggggcttagggggagatagaggtggaatttgaaggtcagatatggggttaagtcagagaggtttggggtgtagccatggagtttgtggggaggcagatatgggcggggttgtggagcagagacgagcttggaagttcagagacacattttgggctcaggaataggttgtgaaaacagacgaggttgggggatcggggcgaagtttgagagtcagaaataaagttgagaagtagtgtgggagtcagattctgagggtcatagaaaagtctggggagttcaagggtttttctggaggagagatggagtttaggagtcaaagatctgtttgggcagacagaatgtggctagtaaaggggagtttgagaagccaagatagaattggagtagagaaaggcttggagctggagagattcagggagacaatgagatgtgttttagggctgagatacggtttggggaaggcagacatgagggttcatgcggcagaacagattttggggagttgacttggtgtttgaagtgacaaagatattttactgagcaggcagggagttgggagagataaatggtttgcggagatcagagagaagtcattgggaacaaagagtgggtttgaaaggcagagatggtggtaagaggatggagctagggtttggcagatcagagacaggtttgggggctcagagagagtggggcaaagacaaggcgttgtagagcagataaggggtttgggagcagaaaagtgaggtttggaggagaagtcagggagacagagacaagtttgggtgagtggaaatcagatatgggacagggaaaggatttggggagataaagtcatgttttgggagacagagttagtgtttaggggagacagacctaggggtatagcgagcaaagtgaagggatccagaggatatagatatcttggacggagtggatgagagggcagaaagaggtggggtttagggggtagatttggggtagaaatgggagttg

SEQ ID NO: 137208 - DNA, 2384 bp, Homo sapiens
gggtgggacacacagttgaggcagggtagagccccgtcttgccgtaggcccagccggcatatggtgagccccctgggatcccctccatacagttgagcaatgggtacacctgaaagactgttgggggcaggtagggatggaggaaagaagaggcaaaatcagtctagggtcagcgcacgtcagggtgcagtggttcccagcacccccaacatggtggccaagttcccagcttttccacaggctaccagaacagctgctggccattggatgcttcctggatcctgacccccactggtcagtgtggcctctgcaataacctctgaccatttccaagtgggtttttgaggatgactgttgggatttggagctccacggatcactcgacaactagggcaaccaccacatacttccagtattgcctctcagtgtggccgccccaatatggcaggttgaggagcattggaattcccaggtctgcacttaactagggaaagtggtcggcacatccatttgagaagcttccagccatttctgagatatcctcacagtggtattctgacctagccaaggatctccatggcaaccccaacagcactcagccaatgccaagacagccactcaatggagttacctggggagtgtctgtaggcctcagcgtccctgtagtaggccagtgccgcagctgcagcggtggctgtgctcggggcagtggaggaagctgctgcatccaagccctcaggcccagaggggaagaaaacccctgattctggtgtggaggacaccagagcaggatccacaaactgggggaggggctctgaggtccccagggaccccaggccagggaactccatggagcctctggggattaacctgcgaggacagaaggggtcctcagacacagaaatccttccaccccacatcctttcacctgctcctcttcctcctttccccctcctcccactccatcacctcagtctccatatttctccttcccacctccccattcccccctcctcctcaccttagtctcccctctccttcccctccttctcttcctccctctcctctcttttccctcctgcatctccccgttccactcctgtgtgcccctcctttcatcttcctcctcgttctccccctcttgccgtttgtctttcctctcctccctcctctcgctcttcctccactctcatctgcttctacctctcccttcttccttccattctctctcttcttccccccttcccttttcctcctgtctttctcccgtctctcttcttcccatctcttctttgcccccctcttccccatttccttctctttccactcttttctcattctctcctgcttcctttttctcctccaccttcttcttttcctccttgacctcctccttctcctttcctgtttcccctcttccttgtcctccttctctttttgtcttcattctccttttctacctttctcacacaccttatctccctctcccccatccacacacacttttttttgaggcagggtctcctctgttgccaggctggagtgcagtggcacgatctcggctcactgcaaccactgcctcccggcagtgatcctcctgcctcagcctcctgagtagctgggactacaggtgtgtgccaccaggcctggctagtttttgttttttttttgtagaaatggggtatgactctgttgcccaggctggtcttgaactcctggcctcaagtgatcctcccacctcagcctcccaaagtactgggattacaggtgtgagccaccacttccggcctctcttcccctgtctacatctactctccactcctttctcctactactcattttctcctcccctccaatttcttcatccttctcctcccttttctgttcatccttttctccctttccccatctcctctcctcccctcctccacttcctcttattctccccgtccccccgtcctttcttccctccccctctagaagagtctgggtgagggtgggatggcatgcaggaccagagtcccttgcctcttggtcacttcacccaggactttggggttcaccatcctctgctccccaacttcatccctatctgttgtatcttgccctctaactttctcagaaaccccatggtttccgggcttgactccctcctccctccacctctgttgcgtctacagacagaaggcccccttagttcctccctacttcttggttgggggggggtcagtaccccccactgcttatctctgccttccccgcccaacttttgaaatcaccccaaggccactgacttcctctgaagagggtggcaggtgggaggtacctctaccggtaccctctcccctggagaggcccaccagagttctgctttcaggctcttt

SEQ ID NO: 137209 - DNA, 1046 bp, Homo sapiens
acacacccacaatttcaggactttggtggttttattttacaaaagctttgaaggttcaagccagggggtgcctggggcccagagacttgggttgtccagaattctggctacaagaggagaaggacaccacccctcctctggaggccatgctctgtgccctcatgagctgagcggagccaccacagtagtgctggtggtggggggcatggggcctgtggggaaggagcccgtgggtgagcccagtaggggtccagggaaaggcatgaggtggctaacaggccctgacagcaccacagggcccaggccttggtagagatgggcagtacctggggggcccagtgtcaggcctgaagccacctccccacaattcccgctaccgctgcccccagccaccaccataaagccaccagctggtccttcggctgctcctgtgcctcccagactggagccccgtttctttttcccttttccagatgccttgcggtttcgagtctgaataccatccttccgcatggtcagtggccggttcacctgccaaaaaggaggctgcgggtgtccccaactccagacctttgcctctctgtgtcaaccagggacaccctctctaccccacttctttcagggtaagataatttttgggtgctgagattgtccaaggaatcctgaggctgtgaggccctgagcttaggaaagcctccaaggctgataggagctgcccaaggtctagggcagggggttggacattagctgatgcctggaggtgggggagaggagaggaaggaggagggcggaggaggagggaatggagaaggaaggagggagggtaataacagagaagggggaaagtagaagagatggaggaagggggaaagtagaagagatgggggaagggggaggaaggagggaaaggggaaagaggaaagagggttgtgggggaagagagaggtagaacaggaacagagtggggggcagtgtggcatgaagacagggaaagcagaggggtggctccaaggggcagggcgtcacctggtgtagcttgtagtaga

SEQ ID NO: 137210 - DNA, 1224 bp, Homo sapiens
aaagagaatcgtgtaaaaggggtggagtctagcgggccgggcggggccgggtagaatggccacctgagtggagggagaaggcctgagagaggcggagtttggaaggctgtggagaatcagatcgcgtaaggaatggaatctaatagagggggcggagcctggaaaagggcagagaggtggggtcctcagggcacactagccccctcacatacccacgctcctccccccacccccagaaccgcggcaggggccaagcctcctcaactatgacctcaaccggccaggattccaccacaaccaggcagcgaagaagtaggcagaacccccagtcgccccctcaggactccagtgtcacttcggtgaggccctagacccgccctgatgagggggagagggagcaagttggtcatgccctggactctgacccttctctctgattcacagaagcgaaatattaaaaagggagccgttccccgctctatccccaatctagcggaggtaaagaagaaaggcaaaatgaagaagctcggccaagcaatggaagaagacctaatcgtgggactgcaagggatggtgagcagggcctggctgcagtttagcctcgtatgacaatcaaaacccaaaggttccccaccctggacagttccctctgactcagggcctaaaatggatctgtgtctccttttttttttcctctgcaggatctgaaccttgaggctgaagcactggctggcactggcttggtgttggatgagcagttaaatgaattccattgcctctgggatgacaggtgaggctgggtcctccaggctgtctccaaaccacaaaaatacacacacttagagcccattagcaagaataaatcttttcttaccccagcctggatactggaagcagatgatttggggaggtagggctcacacttgaaagggttcttttatgtagctaacaaacatttattgagtgcctattgtgtgccaagagttggtgatacaaatgtaccaaacaacagacaggggtccttctctaggagcggattgatgagtaggagggcagatcattaaacagccaacagcagtatgaggtgtttaatgaagacagacttaagaccaggggattcaagggtgtataatagaggatcctaaactagtatccgggcttcccagaagcctttatagaggaagagacgtttgtactgaaacagaaggatgaaacctcccgttt

SEQ ID NO: 137211 - DNA, 1048 bp, Homo sapiens
cagggtggctacaacctccgcgccctggctgaaggcgtcagtgcttcgctccacacccttctgggagacccttgccccatgctggagtcacctggtgccccctgccggaggtgagccccggtggaggaggggaaagcgggagcctcactgcccgcccacattccttgacatcatattttctccctgccctgcagtgcccaggcttcagtttcctgtgctctggaagcccttgagcccttctgggaggttcttgtgagatcaagtaggaagtggggtgtgggcctggtgtggggtggacgtgggatgagccctgggggagactgtcttcagacttcctctgactttactgggctgccttggtgggagagggtcaggccctctctctctccctgggccctggtttcaggcctcccacccctttttctgtttgggtcacctgagttccagagtatgacggggattcagattgagagggtaggacaaacgtggcctcccccttttagctgagaccgtggagagggacaacatggaggaggacaatgtagaggagagcgaggaggaaggaccctgggagccccctgtgctcccaatcctgacatggccagtgctacagtctcgcacagggctggtctatgaccaaaatatgatgaatcactgcaacttgtgggacaggtaggcatttggagggctggatgagtaggtgttgggggtccctccccctcaggcactaagcctctacctctcgtttccccactgctagccaccaccctgaggtaccccagcgcatcttgcggatcatgtgccgtctggaggagctgggccttgccgggcgctgcctcaccctgacaccgcgccctgccacagaggctgagctgctcacctgtcacaggtcagaccccggtgcctggggtgggtggattcccaggactgtggatgaggtctcaggggctggaacttgggtttcccctcctggggagctgctgcaggacttgagaggggctgaagtccctgtcttaggggtggggaccagggaggggacagaccctcc

SEQ ID NO: 137212 - DNA, 1868 bp, Homo sapiens
ggagccactccggaccagaccacctcagaggagactgtgggaggagccattctggaccagaccacctcagaggatgctgttgggggagccacgctgggccagactacctcagaggaggctgtaggaggagctacactggcccagaccacctcggaggcagccatggagggagccacactggaccagactacgtcagaggaggctccagggggcaccgagctgatccaaactcctctagcctcgagcacagaccaccagacccccccaacctcacctgtgcagggaactacaccccagatatctcccagtacactgattgggagtctcaggaccttggagctaggcagcgaatctcaggtaaggctcaccacacccaggtaggggcaagaaggggcaagaatcgggcttctctgatacatctcttacttctgcgtgtccagggggcctcagaatctcaggccccaggagaggagaacctactaggagaggcagctggaggtcaggacatggctgattcgatgctgatgcagggatctaggggcctcactgatcaggtgagctcagggagaggctgggactgtggcttccttctcttgccaatttgtgtctccaggtaggagcatgtgatgaataaacatataatggggagatggggtcttcagcttacctagtttcacccacccactccaggccatattttatgctgtgacaccactgccctggtgtccccatttggtggcagtatgccccatacctgcagcaggcctagacgtgacccaaccttgtggggactgtggaacaatccaagagaattgggtgtgtctctcttgctatcaggtatggagcagaggaaggggatggggcggaggttggcccgggagcaaactgcagggggatgctgacccccacctgacactcacacccccaacctcaggtctactgtggtcgttacatcaatggccacatgctccaacaccatggaaattctggacacccgctggtcctcagctacatcgacctgtcagcctggtgttactactgtcaggcctatgtccaccaccaggtgggccctgggtagacccttcgacacgtgcacactcaccccccacacacacaccccttctgtgattgggtaaagggagaccacaggcccctctgcatggctgcctcatgtgattattttgcatggggcgggggctgtgggatagtccagaagacagagtggttgagggctggagtgggggcagccctgcagccgaggtagaggggtcctcactctctctcacctgccctattcttgcctcctcctcaggctctcctagatgtgaagaacatcgcccaccagaacaagtttggggaggatatgccccacccacactaagccccagaatacggtccctcttcaccttctgaggcccacgatagaccagctgtagctcattccagcctgtaccttggatgaggggtagcctcccactgcatcccatcctgaatatcctttgcaactccccaagagtgcttatttaagtgttaatacttttaagagaactgcgacgattaattgtggatctccccctgcccattgcctgcttgaggggcaccactactccagcccagaaggaaaggggggcagctcagtggccccaagagggagctgatatcatgaggataacattggcgggaggggagttaactggcaggcatggcaaggttgcatatgtaataaagtacaagctgttaaaaaacctggagaaagctttttgactttgagcaggtggagaaccccacatccctggccagcagagccgatgagtaatgaaggaatgagggagtgggtctctgtcaggtcaatcccctgcccatccatt

SEQ ID NO: 137213 - DNA, 1392 bp, Homo sapiens
cctggcaccttcgacctgggcctggccacatggagcccttccttccagggggaaacccaccgggctcaggcacgccgcagggatgttggcaggcagctgcctgagtacaaggctgtggtggtgggcgccagtggcgtgggcaagagtgcgctgaccatccagctgaaccaccagtgcttcgtggaggaccacgaccccaccatccaggattcctactggaaggagttgaccctggacagtggggactgcattctgaatgtgctggacacagcagggcaggccatccatagggccctgcgtgaccagtgcctggctgtctgtgatggtgtgctgggcgtcttcgctctcgatgacccctcgtctctgatccagctgcagcagatatgggccacctggggccctcaccccgcccagccccttgtcctcgtgggcaacaagtgtgaccttgtgaccactgctggagatgctcatgccgctgctgcagccctcgcacacagctggggggcccacttcgtggagacctcggccaaaacacggcaaggcgtggaggaggccttttccctgctggtccatgagatccagagggtccaggaggccatggcgaaggagcccatggcaaggtcctgtagggagaagacccggcaccagaaggccacctgccactgtggctgctctgtggcctgaaggtcttggccaagaaatgtagacctttccccaggccagggtgattgttcatttgacatgagacccctgaggcaactagctttgagggacacatcaggtatactagggaaagatggacatctctcttgttttcacttggtgaggggctttttggtaacatgggagtgcctaatgttgcttttgttatgtcaagttgaaagattttgtgcaaaattaaataaatggtgttttgggtttcaaagctgcctccatgccgagtgttgtgtgggtgggagtgagactgggtagaatgttacttgagttgtgagaattctttcattcaagaaattcagggggagcccactgtgtgctaggctccgctttatatataagggaggtagaggcaaacaagacacttaaaaatccttgcccttatagatatggcatcaggctagatagtgataaaggctacgtgttaaaggcaggtgaaggaatagggtgacaggtccaggaaagccttcttgagagtaggtgacatctggacaaaaacctgaagatatccagaggcagagggactagccagtgcaaagaccatggccacaaatcagctgccaccacagcaaccctcagtatatccagggcctggagcaagagtacaggtaggcctctacactacataactaaatatgtaaacgttcagacattacgaatcaagctttacaaagtaaa

SEQ ID NO: 137214 - DNA, 1042 bp, Homo sapiens
ttttggtggcatctgggatgtttgaggcctacgaagcttcccgggctgggggtccctgtctcgacggacgctgacaaactcttttcccccacctcattttcccgcaggagccccgcggcctaagcgcagcgtctccgcccttggctgagactggcgctcctcgccgcttccggcggtcagtgccccgaggtgaggcggcgggggcggtgcaggagctggcgcgggcgctggcgcatctgctggaggccgaacgtcaggagcgggcgcgggccgaggcgcaggaggctgaggatcagcaggcgcgcgtcctggcgcagctgctgcgcgtctggggcgccccccgcaactctgatccggctctgggcctggacgacgaccccgacgcgcctgcagcgcagctcgctcgcgctctgctccgcgcccgccttgaccctgccgccctcgcagcccagcttgtccccgcgcccgtccccgccgcggcgctccgaccccggcccccggtctacgacgacggccccgcgggcccggatgctgaggaggcaggcgacgagacacccgacgtggaccccgagctgttgaggtgcccggcagggggtggggaggggtcgggcgcctgcgtccggagaggacgagggcgaggaactgggaagcctgcttaccccgtggagtgcgaacccctaagtcctggggcctaagagggagtgaggtcctggatccagggagtccaggcaaggatgcctggctgactcagtgggggaagtggaccccaggtcctgggaaggggagagggaggcggggaagccacagttttctgggatgaaaggcgatgacggctgtctactgaaagcagtgggctgaggacgccttcttggggagggaaccgtgtccccaggcagtatgtggttgtggatcctgcgttctgggccccgagcgtggggcgggggaacgccccaccgcggacaccgcctcactgctttgcgctcggccctgcaggtacttgctgggacggattcttgcgggaagcgcggactccgagggggtg

SEQ ID NO: 137215 - DNA, 1084 bp, Homo sapiens
ttggggctgcgccgcctcacccccgcccgagccggctcccgggacgtgcggagagatcgacgagggtggcccgggctccggccgccggtccgcgcccaggccacgccggcacacctgagacctgacttggtctctgcctgtgcgggtggcgttgtccggggcgccgccggtaaccgtgccctgcccacctctccgtgcccggtgcctgtgacgctgtccacggcactaaggcgctttaagaaagggcgcgcgcgcatcagtgtgtgtgcgtgtgatgtgaggagagcggtgtggaggtgtcgtgtccttgaaagtgtgtgttctttggtttgagcgcttccaagtgtcctagaaaggtgccgtggtgcgtctgggtgtgtagtgtgtgtgataccgggatacttctgtgcgcgattcttttgtgcgtccgattgttttctcagtgacaccgtgtggatatttgtgaatccttattatgtgtgttggcttggcctatgggcgtgtctctctctctctctctctgtctctctctctctctgtgtgtgtgtgtgtgtgtgtgtgtgtgtgtgatttcgtttgtgtttgagagggaatggtcttcgcatctccgtgtgcacattccatagtggttctgttggaccaagtgcctgggatttcgtttgcgtgttcctgagactgtttctctccgtttctttgtggagctgtgtcatcctgaggagaggagccatgatgtctctctgctgcattgtgtctttaaggatggtgcatgtccttgcacctgggtggcttggcgattgtaactgcaggagcagctgcggatgtgaacgtgtgcaggtccttgcatgtggctgtggcagtgttgggctgtatatgtgacatctccaggcctgtcagtcctcatgagtgtgtgtgaggctgtgattgctggtgagtgtgataccccggggtgactgaggagtggtgggcgccagcaagggcacttggagaggcatcctcctctagctcttcaatactgtctgcatcaaagatgggaattaaaaaaaactgttaccttatatccgtgtaacaatgtgtttaatatata

SEQ ID NO: 137216 - DNA, 2246 bp, Homo sapiens
tttttttttgtagagacaggggtctcactatgttgaccaggctagtctcacagacgggttttcaccatcttggccaggctggtcttgaactcctgacctcgtgatccacccactttggcctcctaaagtgctgggattacaggcatgagccatcacgcctggccaagatgagtaaattttttgatgaatccctatcaactctgaaaccagatagctttggctaacagtagaactcatcatctgaacccagacacagatttaggtaacctttttttgtaaacctcctaatatagagagttggatttggaatgtgaaagatacttcatattcttcccggcacacacacacacgtgtcttttatgtgtggcttgtgtgaatgtgagtgcgtgtctctaggctctacatgtaggatgaggtcccctggtccttatctgctctcctcatccccaccttgttctaccagaaccagaggaagagatcattgccgaggactatgacgatgatcctgtggactacgaggccaccaggttggagggcctaccaccaagctggtacaaggtgttcgacccttcctggtgagcctgggtgagggggagctaacttctggcttcacccttcctgtgctgaccttggttgtgaggtttagggggacacaagggagggagcctcgggtggagggtgttggcattaggtatctgcaggactcaagttgctgcctgctggggcctggctcctctggggttggaagactgtcttttctctcttttttgaaacggagtttcactcttgtagcccgggctggagtgcaatggtgtgatctcggcttatggcaacctccgcctcgtgggttcaagcgattctcctgtctcagcctcccaggtagctgggattacaggtgcacaccaccacacccagctaatttttgtattttttgtagagatggggtttcatcatattggtcaggctggtcccgaactcctgacctcaggtgatccgcctgcctcggcctcccaaagtgctgggattacaggcatgagccaccacgcccagctgacagtgttttctcttcaggagaagagattctggggatcctgcctgtggggtcctgacatggggcaggtataggcagagactggggagacaagagttgaggatccaaggcaaggacatctgtgctgacacttctttcctgcggccccacagcgggctcccttactactggaatgcagacacagaccttgtatcctggctctccccacatgaccccaactccgtggttaccaaatcggccaagaagctcagaagcagtaatgcaggtgagttggcaggtacaagcgtgccttgagtgatcttagcagttctcacggagaggccaagtagaatgatagtggatcagaggggcaggtgagaccaggcgggcccagcctcaggcaagggaggttgttgaaggcagaggctgctgggtcctggggtggcaagaggtcacttcaagacttgtgtccccagatgctgaagaaaagttggaccggagccatgacaagtcggacaggggccatgacaagtcggaccgcagccatgagaaactagacaggggccacgacaagtcagaccggggccacgacaagtctgacagggatcgagagcgtggctatgacaaggtagacagagagagagagcgagacagggaacgggatcgggaccgcgggtatgacaaggcagaccgggaagagggcaaagaacggcgccaccatcgccgggaggagctggctccctatcccaagagcaagaagggtaagctgggcagaatggggctcggtgagaccaacaaggtgcagggtgcactgcgtgaggaagccttccctcaaaaagatgcctggacctggggctagaggagggtgctgtggtacatggcagccaggggcttcatttcttcttgtggggtggggctcagtgatcaggggctcctggtgcctctattgaagactttgccctgccacttccacagcagtaagccgaaaggatgaagagttagaccccatggaccctagctcatactcagacgccccccggtaagtgacaacccctcttgactcagtacgtggacaccatcctccggcctccttcctccattcctcattgggaccaggtgggctgtgtccgccacatcacccatccccatcccctgactctttcaccggcaggggcacgtggtcaacaggactccccaagcggaatgaggccaagac

SEQ ID NO: 137217 - DNA, 1497 bp, Homo sapiens
ccactcgcaggtgacataccagctgaagatcctgaccacagcgctgttctccgtgctcatgctgaatcgcagcctttcccggctgcagtgggcctccctgctgctcctcttcactggcgtcgccattgtccaggcacagcaagccggtgggggaggcccacggccactggatcagaaccctggggcaggcctggcagccgtcgtggcctcctgtctctcctccggcttcgcaggtgtctactttgagaagatcctcaaaggcagctcaggctccgtgtggctgcgcaacctgcaactgggcctcttcggcacagcactgggcctggtggggctctggtgggctgagggtaccgccgtggccacccgtggtttcttttttgggtacacacctgctgtctggggcgtggtgctcaaccaggccttcggcgggctactggtggctgtggttgtcaagtacgctgacaatatcctcaagggctttgccacctccctgtccattgtgctgtccactgttgcctccattcgcctctttggcttccacgtggacccattatttgcccttggcgctggactcgtcattggtgctgtctacctctacagccttccccgaggtgcagccaaagccatagcctctgcctctgcctccgcctccgggccctgcgttcaccagcagcctcccgggcagccaccaccaccgcagctgtcttcccaccgtggagacctcatcacggagccctttctgccaaagtcagtgctggtgaagtgagggctggcagcaatggggggacacaagggagggggactggggtggagggtgttgggcatctgcaggacccaagtcgccaccctccggggcctggctcctctgggtttgggagatggtcttttctcccaggtcactgagacttctggaggggtgtgggactagagctgggtgtcacgtgaacccttcctggtagggtgacccccttcccctggagggggttttagagctgccgcctctgctccctctaacctctttggaggcagggttgggggtattgtcattcaaggccttttttttgtctgctccctccccgaccctgtgccctcttctggaggtttctcgtctgggagagtccctcccagcagtccctccacctccataaggacacactggacaaaactcccgcagctcttcaggaatgaccgatgcctacctgtggggttcagttgcccatagtttgaggccttctctcctcccttaccaccgctctggatcatgttactagttccgtcttttgtgtggccttgggccagcttccttgataccttgaagatgggcttcttgtgagtccccagggagaaagggacaagagctaagatttttgcatcagcccttctggcagaaggtgtggtaggggccatttgttttttttagtggacttgggatttgtggtgtaatcatatcattaatgatccagggtgtgggaaaaatggaggtccttgaagtggctg

SEQ ID NO: 137218 - DNA, 1089 bp, Homo sapiens
tgagttagggtggggcgagtccttctttatgtgactagagagggtccattttgaggatgggggtgtctttcattatgtgcggaggagaccgttctgggggctccctcctaatggaggtagagttcattgtacattcgggtgggagggctcatcgttatatggtggagaaagaacgttctgagagtgccgggtccttccttatagcagagagagctcattgtgagtgtgggtagagcaaggaaaaattcattagctagagggtccgtgtgcggtggtgggagggcagaccatgtggagtgcagggaagtatttcctcatctggttgagggagccagacctttcttggtgggataaccattcctgatacaggattcagtccctgggagcatgtgggaatcatttcttgtatttagtagactattctggttcgagaggaaccagttgtcacaggagtgaggggttggagagaccattctgggtatgaggaggatcattccatatgggatgtaggccattctcagtgtgagggaatcgaatcatttcttagataggagaaagaccgttcttagggggtgaacatacctcatacagtggcctcattccctgcattgatgtgttattctttacatgagacagtccctcattaaacaggagcatcatttcatataaattctcagtttgctaatccataaatgggaatcctcgcagttcttttggagatgacagtgatatgagtctattgaggtaatccatagaaatcccttaacccagtgataggcatacagtaaacactcaataaacgtggagaatgtagttgtcggtattctttctggggaagagttgcttctcacttgggaggaagccgaggcgcgtggccagggtttgcctcagccattacctgacacctcagtaaggattccaggtatggactgggacagggtggggcccatttctcccttctggctcttcctgctcatggctgaggcagtaagccggtaggagtcagacccttattgggtgagggcaggcaggctgagggagcaagtagccatggctaggagggtcctgggtgagaaagaaagggggtgg

SEQ ID NO: 137219 - DNA, 1155 bp, Homo sapiens
atggccatgtcacagggatagatggacatttgttgacttggttttacaggtcattaccagtcattaaagtccagtattactaaggtaagggattgaggatcaggggttagaagacataaaccaagtctgcccagttcccttcccaatcctacaaaggagccttcctcccagaacctgtggtccctgattctggagggggaacttcttgcttctcattttgctaaggaagtttattttggtgaagttgttcccattctgagccccgggactcttattctgatgatgtgtcaccccacattggcacctcctactaccaccacacaaacttagttcatatgctcttacttgggcaagggtgctttccttccaataccccagtagcttttattttagtaaagggaccctttcccctagcctagggtcccatattgggtcaagctgcttacctgcctcagcccaggattctttattctgggggaggtaatgccctgttgttaccccaaggcttcttttttttttttttttttttgggtgaggggaccctactctgttatcccaagtgctcttattctggtgagaagaaccttacttccataatttgggaaggaatggaagatggacaccaccggacaccaccagacactaggatgggatggatggttttttgggggatgggctaggggaaataaggcttgctgtttgttctcctggggcgctccctccaacttttgcagattcttgcaacctcctcctgagccgggattgtccaattactaaaatgtaaataatcacgtattgtggggaggggagttccaagtgtgccctcctctcttctcctgcctggattatttaaaaagccatgtgtggaaacccactatttaataaaagtaatagaatcagaagcggctggccatttgtaggtgtgaggcttttatggagcatctactgtgcactgagacagactgtccctctgctttgtcctcaggaagccacagtcttatgttgccatcctaaagagctttaaggattcttgaagctgcaccacacacacacaaaaaaatcttgattcccctgcccctgatcttatgcagtgcccagtatgtgcagaagggttctctgttggagatactgtgcatattgaaggtgtttagggca

SEQ ID NO: 137220 - DNA, 1076 bp, Homo sapiens
tgggagagataaacttggttccgaggacctggagggcaggggagacgccctggtacgcgttctgtggggtgctgtggttggggaccagaaagactagagtgctggtagatggaggaatactggaggtaggcagaaggtctagactgggaggggtctggggatcacctgctggcctccttatcacggccttcttctccaggtggccatcaaagtgattccccggaatcgtgtgctgggctggtcccccttggtgagtaccttcggagcccttcctaacctacctactccatcactgatgtattcacctccttgcttttccaggggatgtatgactccctgggccctgtaacagtgagaatactgccagtccatttatactcccttggggtgacatacagttctgattcaccccaattcccctagagccctggattctcccctccaacaaacctttaccatccttcctccaaacactgctgggggactgcccgcagggcgtgctggtggggaacaaggggcagaggtcactggttgccatggtgatggtggctgcttctctcttgccgttataacgctaacggacatcagggcgggtctgggcaagttgtagagttgggagcgccccctggcgggctctaggggaaactgcgcctgcgcagtccatgggacccaaagggagagggtgcgcctgcgcaatatcggtatttttgcatctcggtgagaaaacgtctgctgccgtgcaagtcagcagcctggccaggagagggctctacctcatcccagaaggttgctgctcgaagtgtacctgcgcagggcttggggaggcagtggggggcggattttgtggcccccagcgtttatacttttttttttttggagacacagtctccctctgttgcccaggctggagtgaggtgacgcgatctcggctcactgcaacctccgtctcctgggttcaagtgattctcctgcctcagcctcccaagtagctgggactacaggagcgcacaaccatgcccggctaatttttgtatttttagtagagacagggtttcaccatgttggccaggcgggtt

SEQ ID NO: 137221 - DNA, 3329 bp, Homo sapiens
tggagtgttgctctttgggagtacctgctttcctgtctccttttttttctggggcctgtgggcctacctcgctgagcctgttctggctcttgggcaggttcagtgtgttattgcacatccctgttcctctccctccttgcagtttgcagagcagtctctgatgaagaatgccataaaaacatcggaggagtcatggattgaacagcagatgctagaagacaagaaacgggccacagactgggaggccacaaatgaagccatcgaggagcaggtggctcgggaatcctacctgcagtggttgcgggatcaggagaaacaggctcgccaggtccgaggccccagccaggtgggtcatggactctgtcacaggcttggccaaaaactcattacttctcatgctttgccctcaagcgagcagaaaaaaattaagcagttttgacatctgggagggaaggaagcatccagcaccatctgtaactcatcttggtcttagttttggcattgtaccttggaactttaaatacttgtgcagaacaggcacttaaggagtgagaggagggcagccatgctgctggtgacacgagaataatggatagcttcagagacacaagcttttgttgactgcccttgtgtgccaggtctctactgagaatgtaacatcagatctggactactctgccctcaacgatctcgtctgttggcagagacaactcaatggtggggtccttgaccctgactgggagatcagtggaggtgggggctccggttagtcttcacagaggaaggttgaattgttaggggagcggggaggggcggggcagacaagcatctgaggaattgtaaaatcgcaaggagtttggagtgattgtagatgttggctggcaggagctgagttttttttttttttttttttggagacagagtcttgctctgtcgcccaggctggagtgcagtggcgcagtctcggctcactgcaagctccgcctcccaggttgatgccattctcctgcctcagcctgcggagtaactaggactacaggcgcccaccaccacgcctggctaattttttgtatttttagtagagacggggtttcaccgtgttagccaggatggtctccatctcctgacctcgtgatccgaccacctcggcctcccaaagtgctgggattacaggcgtgagccaccgcacccggctgaaggagctgagttttattccacaaatacctactaccagtctgtggcaggccctgttttcagtatatggggatacataggtgagcccagcagaccaagatccccgtccttgtgatgttcacagttttgcagagtgaaataaaataataaatataatgaataaattagttgggaagtgctatggatggaaagtgtagagccaggataaaggggctgagcaggaatgtgcgttcacggtatgaaatagcgcagtcagggtaggcctcagagcaggtgagatttgagccttgcagaaggtgagagttagctgagcgcacatggaggggaggacagcaggcccacacacctggtacaactcaggcacagcccagagggaggccggtgtatccgaacagaatgtagtagtagatgaagtcagagaggttgtgggtccaattgggtaggggcttgtgggctgtggcgaggactttggcatttactctcagagaggcagaaaccatgggaggattgtgagcagaggacggacaggatgtggttggggatttaataagatcgccttgcctgctagtcatccagtggagtctggtgagtgagggcagaagcaggggccagtgaggaggaggctactgcagtaggccaggtgactggtggccagtgctggcagtggagttggtgagaaggggttggatttgagatctattttcaagatagaggtaacagggtttcctgtcagattggctgtaggggtgtgagagaaagggtaaggagctccacctctgtcctgtgaggagtcttgtggtccaccgtgtgagtggggatgatgttgacctacatagaagctgtatcatagccaaggtcctgggaagggagccagcattcagggatgggtcacaagaaggtcatggctgctggtggtccttaacgcatttaccttccccgctgcagccccggaaagccagcgccacatgcagttcggccacagcagcagcctccagtggcctggaggagtggactagccggtccccgcggcagcggagttcagcctcgtcacctgagcaccctgagctgcatgctgaattgggcatgaagcccccttccccaggcactgttttagctcttgccaaacctccttcgccctgtgcgccaggtcagtgacttgcccacagggaatgtgctgggagttaggaggcacgtcctgggtcctgggtcctggatcctgggtccctacctttgactgtccgtctgcttcaggtacaagcagtcagttctcggcaggggccgaccgggcaacttccccccttgtgtccctctaccctgctttggagtgccgggccctcattcagcagatgtccccctctgcctttggtaagcctcctttgtctggggggatggaggctgctaggagctgggagagactggaagaagtggcaagtcctgagaggggctttctggagcctctggccatctccccaagaaaagaagggagaggcactggaggggatttttcagatccaaggaatttgccccagaagggtctggggtctaagtggggtttcacaggcctagcagatccttctgttttgagaaaggagtgagaagggccctatgggatttctccagagccccagatgtcggcacagggtgaggagaaggcaggctgagagcgctccatcatccttttcctcttcctctcgcccagcaggtctgaatgactgggatgatgatgagatcctagcttcggtgctggcagtgtcccaacaggaatacctagacagtatgaagaaaaacaaagtgcacagagacccgcccccagacaagagttgatggagacccagggattggacaccatctcccaaccccagtactcctgctctccggtgccacctcaccttctttggcttcttccctcttgcctccttctgttctttctgctctcccctcttttccctcctcctcacttccctctggctagcccacccctgcactctctctcattgccgctgccactatcacctgtctctctgccagctgatgtgccctgttgccccccaccccatcccgcacagaaccatccctgcattccacaggggactcgggcaagggtgccgaagatagacaagaggcacacagagaca

SEQ ID NO: 137222 - DNA, 1034 bp, Homo sapiens
cctccccccagcccgcacacttggtcacagaagtctcctgtgttgattgttgttgagtgagagtagaaaaaacacttggagtgtgtttaacactgccagagtggttagattttttgactatttttttaattggcttgttctaacatagttttacgaattgtttttaactattcacagtaaaaaattacattttatctgaatgcaaggtctgcaggaaaaagaaaagaatacattttacatgattacttagcatatatgcatttgtgtgtgatgtgtatatgtgcattaaaataatgttaactaaagcttcatgaaacaacatttgcacttattccctgggatatattctgatattttctattttttaaaaatgctgttggatctcagcctgaaaaacagtactctgatgtagtgtcctgtaactcatagcaccccacaccatgttgatactgcccccttattccctcacacacccactacttcccccaacccctcacatgcttgaatactccctccacccggtgcacacatagctaatttttgtatgtgtctcatctgctcatgtgtgtgaaagtcctcaacattatgaaacagtcatcactggatggggcttctttaaattaaggcccagggccaggtgcagtggctcacacctataatcccagcactttgggaggccgagtcgggtggatcacctgaggtcaggagttcaaggccagcctggccaacatggtgaaaccccatttctactaaaaatacaaaaaagttagccgggggtggtggcactcacctgtaatcccagctacttgggaggctgaggctggagaatcccttgaacctgggaggcggaggttgcagtgagccgagattaccccactgcactccagcctgggcgacagagcgatacttcgtctcagaaaaaaaaaaaaaataagtcccaggttggaaggcacctgactgctccagtctcagtgcctcagttgaggtggtttgggggttagagtcaggtcttacaagcataggagtttggaatg

SEQ ID NO: 137223 - DNA, 1034 bp, Homo sapiens
cccaagtagctgggaccacaggcacacaccaccatgcctggctaactttaaaaatatttttattttgtagagacaggatctcactgtgttgctcaggccaatctcaaattcctggggacaagtgatcctcccgccttggcctctcaaagtgctggtattgcaggggtgagccacctgcagccaatttgcttttttcccccctgaaattaaaatggtcaatgtgacagactgcttcttttcacttagcagtatgcattaaggtttctccatgttctttcatggcttgttagctggtttctttcttatcacttaatgttccttttatggaggtaccagtttaattattcacctattaaaagacattcttggttgcttccagtttttgatgattatgaataaagcttctgtaatgtgcatgcaggtttttttgtggacgtaattttttagatcagttgtatacatacctgggagcaagattgctggattgcgttgtaagattatgttttgatttatgaggaactgagaaactgtcttcccaagtggctgtattatttgcatgcccaccataatgatttggaagttcctgttgtcagcattaccagcaattgatactgtcattgtgttggattttagccattctcttaggtgtgtagtggtatctcattattttaacttgcagttgcctattggcaaatgctgttgagcatcttttcatatgcttatttgccatctgtatagcttctttggtgaattgtgtttgtgacttcctgacatacaattcctaaaatccttagaatctgcaaagtgttgcctttttgtatgctaatgaggtgactgatggctggcagcctctaggtagcttcaggatgggggctggtgacctgaaagaccaaggcaggattagaggtttgcaactttaagcccatcccccagcctttggggaggggagagaggctgaagattaggttgatcactagtgtccaatggcataatcaataatgcctgcataatgaagcttccaaagaatcccaaaa

SEQ ID NO: 137224 - DNA, 1805 bp, Homo sapiens
cttgtaggagtcaggaaaactgaattcagagttgactctgtcacagactgactctttgtgaccttggacaaaccacaaactccccctgaacctcagtttcctcatgtggaaagcaaagggggtgtgggaatcaatagcatttgaggccaacctgtggaacttagaatgttgttgatttctctgagtggccacgtgtaccctagacaaagtcatctgcccaagaggcctgtggatgtgttcctctcacctgcactctcttgttcttcaagtctggccctgcctgccatatttttccatgaccccgttctagcctacaagggcaagaactctccaggccttggggtagaaaagggaatttccctggtcccccagttcctcctccccaaaggatgttctatgattcagagctcttctctggcatctctgaccctagctgctgctttcttctgcccccacagctgaccaggtgtatggagaccaggacatgcatgaggttgtgcgaaagcattgcatggactatctggtgagaaaatggaggcctttggggaaggggcagggtgggaggatttcttctccacacagaccttaaccttccaatctattctgcagatgaagaatgccgactacttctccaactatgtcacagaggactttaccacctacattaacaggaagcggaaaaacaattgccatggcaaccacattgagatgcaggccatggcagagatgtacaaccgtcctgtggaggtgtaccagtacagcacaggtacttctgcagtgggtaggtgagggaaagatggtgcctcattcgagcctgcccaacctggcctgctgtggatgctccctccttctctttctctgcagaacccatcaacacattccatgggatacatcaaaacgaggacgaacccattcgtgttagctaccatcggaatatccactataattcagtggtgaatcctaacaaggccaccattggtgtggggctgggcctgccatcattcaaaccaggggtgagtgggtccctgtgcccagaatggctgctggatatagaggtcagaaacctctgttggagtctgttttgcccctaactcacaaaaatatcctgtctcctctctcccctgaggtctcacccttacaaaaaaaaaaaaaaaaaatagggagttacttaaggtgatctctcagggcttgttctttggtcttggtttgcctgtctgagttggcttacctatcttttgtgcccgttgagggctggcattttaggatgtggagtcctattttggagcagtgagccagggcttgctctgggcatcttggcatggatctttctcctgggatcatagtggttacagacagccatggtcacagagacatggggtacaggcctggccccaccactcactggctgtgtgatctaggcagattctgtaagtattccaggctggcagcttggctgatacagaaagcacctcccactgggcctggggcctagtaggtgttcagaaggtggcagtgcattttcccagcacataccgatagattctcattcatttctctctctctctcttacagtcatttgctgaggattttggtatcttctattcaggtttcacttctacaaacacaaagtactcctgcttcattttcggaaacacatagcctaacaccaacacaccctccaacatagggttcttttttgttttgtttttaaataaacttaattttagagcaggtttagatttacagaattactgcaaagaggctgggcacggtggcccacacctgtaatcccagcattttgggaa

SEQ ID NO: 137225 - DNA, 1163 bp, Homo sapiens
ggagaggacatgcatcctaggtctgcatttggggctttcctctggctgaggaattgcaacagaaatgaggaagggcttcataagtggttatggcaacattctggctgactcgtgggtaactagcatatgaaggaatcattgtcgtcatgacaaattgtgttcctgtttcttgaccacctactgtgccttaggtgcttggcaaacctcctgtgtagttttgacaacacccagcagatggaagaggagttactgtctccaccttatgcatgaggacatttcagcttagagaggttaaaggccttatccattgctacacagctaggaggcagcagagcctttctgccaggcaaaggggtcagtggcagagaaatgggaccctcagggggttttcccccagatcccttccctgttccacagtctcctctctttccccattttcctgcatctggcatctagctcttgaagatagaactcccaggcctggaaatgaccgttgacctttccataggagatgggctttctccagcacctcagcctatctctctgagcctggccagccaacccctatttaaccccttcattctcatctttgttcctgtttactgcagctgccaacagcactgcctcccagtaccccaagctcagtctacagaaatagctccccaagtagctcactgtgcgggctctgtggtcctggcttctaagaaaggcagcagcagggggcccccagcctgtgcgcaggacatgtgacttgctggaaatgccgctggggagggcgggggagagtgtggccgcagaacccacatccttgtttacattggtgaaggggctaccccccttcccgccttcacaacctccacacccccttacccttcaggtctcttcacctccaagaggactggagacaaacatgggccctattttctatctcagagtagcctttctcacagaacactccagggtaggaaggggaaggcagggaaggtgttcttctgacagttcttcagagaggtagactgacagggaagaactcaggagtgttcctgtgtgacctgaccctagccccatgccccagggagatcccatcagagcagtggtcctctggggaaacaaagggaaattcccaaaaccagtggaaatcagacttgcatgatcttcaggcc

SEQ ID NO: 137226 - DNA, 1055 bp, Homo sapiens
caagggcatctactcattgaatgtgatagttctctgttgtgggatttgttgggtgagcatttggcctcagggagcatctttggcagtctctgctgtatgtgtatacacatgtgcatttctatactggtgtctctgtgtgtccagaaaaaggaaagaagtggggtgtgtatggggagggtaaggttcatattggcctctgtggccctagggagagatgcagcccctgatatctataatctctgccctctcccatgcctttcctgggttctagctgattcctgcttgtgctggtgtggaaactgaggcacacaagatcaggtcctgccccagggagtaaggtgactaagatggtggctggattggggtgaaggtggtaatatcagctggggccagcagttaccctttgagagcctggcctccccttcactccccctaaatctgtgatcccaggcaagctttgccacatttctgtgtctcctgggtaaagtaagagtgttttggtaaggatagaatgagttggagtgtgaaaagtctttggtgtgggaccaattgtagtattgtactgaggatttctgagccctgtttgagatgggaacagaggtagaatggtgggggacccccttccagctggcctctgggaggggagaacaggtgcagattgcccacaagtgcagcgtcagcaagaggaggagtttcagtttctatcaaaacaagttctctgaattcccctacctctgcaggtcatccccccaacctcagacccctccacagggaagtcaagcctggcccccagccctgtgtgccagccttctgggaagaggagggctttctggaggacagaggtggagctaggaaagtcagaaaaacgaattcttttttttttttttgagacagagtttcgctcttgttgcctaggctgtagtgcagtggtgtgatcttggctcattgcaacctccacctcccgggttcaagcgatttttctgcctcagcctcccaaatagctgggattacaggcatccaccaccccgcctggctaattttttgtatttttagta

SEQ ID NO: 137227 - DNA, 1504 bp, Homo sapiens
tgtgagccaccatgcccggcctacagcatatcttggaatcctctagccctttgtcaggttcaggatctaggctcttgctagttaccccctcttcaccacctttcctagatgaaactccttgaggtagagccacattctccacccaggcacttgctgggtctgagtctctggctgcctgaggcagtgtggctccctgggccaggccctgcaaggtcaacagaagccataaggcatatggggccactgttctcagggcacctaggacccttttggaagtaagtcttagtttcactcagcaactaattccctaaaagagtctcctacttcacatgcatggagtggtcaaacagggctgagaactttaccttggccagcgtcctctctgtcaatgatctaggcctctcgggagcttgaggtcggggccctggggagggagtacaggttttccctgttgctgacccccacctcttccctccagcaggagcattggtttgaaaaggccctacgagacaagaagggcttcatcatcaagcagatgaaggaggatggcgcctgtctcttccgggctgtaggtgagtctctgccttagtccttaagggcctagggctgcccctaagctgtgtcccagttatcaggaatagcccctgagacagggttgaggcagagctagctaatcttttagggactctaggctccagcctcaagttggtatctgacctctagccgtgggtcttgagacattgtagtggtgcaagattaatatgcataataacagcaagaagaatgataaagaaaataatatcctttgggacacattgtcaggtgctacaggaaacctctttgattcccctctaagctaggtgagtgtagggactactgttgcttccatttgtcagatgagaaaagtggctcagagatggtgggtgacttgtctggagtgaaataataagtggtagagttgggattcagtgtctgggttagattagtctgaggcccatgctcttaaccatagcacactgctgccaccctgggctgtatgacccctaggtttatacccagatcccatctctggtgtgttgcgggtctctgttcctcaatctgtgtgtatgggggctatcagactagatctttacaaatttcttatatcatagaattttttttcaacttatataaaagtagagagaatgatgaaccctcatgtacccatcatccagcttcaaaatagtcaatacgtggccagccttgtttcatcactatcccgcccactctttctcactcccctgaaagaagagtatttttaaagcaaaaccccgacattggatcatttcattcataaatatttctgtatgtttctctgacagatacagacttactctcttctttttaacataatcaaaatgccattactgcacctaacagaattaataatgccttaataccatctgttatccagtctgagttagatctttgaggccattttggctctgaatctgtgacccaacaa

SEQ ID NO: 137228 - DNA, 1021 bp, Homo sapiens
ttaggggatgggttccaccccttgcttgagctggggaaaaatggccttacggataggtgggcccctatgtctggtctctaataccccagatcctataaatccctgggcaggcctgtgtccacaaggagcaggcttgggatcctgtagtttgcagccttgttgctaggtcaggctggctgcttctggtagccagcagagggcgtgaggggcccaggaaaggtctgctgcttctggttggttttgttttgaaatgaaaattatgttttaagaggttatatggtcattatttttttaataaaaaaatatgcatttgtacaggttcatttaagttgaaccttcgtggtgccaggtgtgctttggaatttaggaaaaaaacaatttataaaacttacctggtgtgtatactttgtgttacataacacctccagcagggtctgaggcagcacctcataatcaaacacctgaatgttttctgcattgaaatatttgaatatttaccccaagtgggataaatagattcttgtcagttctggtcaggttatgatgccaaatgaattagataaagacttttgggccgggcacagtggctcatgtctgtaatcccagcactttgggaggccgaggcgggtggatcacgagatcaggagatcgagaccatcctggctaacatggtgaaaccccgtctctactaaaaatacaaaaaattagccaggcatggtggcaggcgcctgtagtcccagctagtcgggaggctgaggcaggagaatggcatgaacccgggaggcagagcttgcagtgagccgagatagtgccactgcactccggcctgggcaaaagagtgagactgcatctcaaaaaaaaaaaaaaaaaaaaagacttgattttcaaagctttttgggtttagtgtaactttataaaagggaaagtgcaataaaatcgctgataacaccaggacttagggatattttgctgtctagccttcccaattttgtgtacgtgtgtttgtatacatacatatgta

SEQ ID NO: 137229 - DNA, 1097 bp, Homo sapiens
ggggaagggaagggaactcattaagtggtctcttactgggcaaagccctgtaatatttgagtctgcccagcatccctattattgggaggcttggtatccccattcacagattggaaaactgtggctcagagcagttcatcatcacatggctaataattggtggagctagattggaacctaagtcagttgggttccacagcctgctccaacttcacttgggcccttagaccactaggttacagaatcttgcctcagctcctgggatcctctggtgttagggagctttactcagcctttttgtggaggctcaaagatatggagggattttcccataggctcagcgatgagtttgcaaggttcacaatctcctcaggccagggcattgttggagcttaaacttatctatggctgagctatcccctaccccccacccctactagcccttcctgagcaacattttctccccaaaaggagaaagagaagggccagagcccaaactcctcaggctgctgatgacaaagccagtgggtggctagcagtccagcctctagatccaagcctggatgccagtttgactgccccaggacccaaaccctgcagtgcgaggggcctattcaggtctctttcatgtttagagacaaaccaggatattctgtggatgggctgcaaggtatgtcctccatgctgtggctcgtgggggccttccctgttgcctctacactaggctttgctggtatccaaactccagctcctttctctttctgcctttgtttttttgttttttgttttgtttttgtttttgtttttgagacatagtcttgctctgttgcccaggctggctggggtgcaatggtgccatctcggctcactgcaacctccacctcccgagttcaagcgattctcctgtctcagcctcccaagtaactgggattacaggcacacgccaccacgccctgctaattttttgtattttcagtagagacaaggcttcgccatgtcggccaggctggtcttaaactcctaacctcagatgatccttccgccttggcctcccaaagtgctgggattacaggcgtgagccaccgtgtctggcctcc

SEQ ID NO: 137230 - DNA, 1068 bp, Homo sapiens
gggtactcggcagtgcagccatgactatactccccaaaaagaagccgccgcctcccgacgccgaccccgccaacgagccgccgccgcccgggccgatgcccccggcgccgcggcgcggcggaggtgtgggcgtgggcggcggcggcacgggcgtgggcggcggcgatcgcgaccgtgactccggcgtcgtgggggcccgtccgcgagcttcgccaccgcctcaaggcccgctaccaggaccgccgggcgctcttcatcgctgggcgctggccgtgccgcctggtgcagtggcgggtccccggccacaacaggcttctccacctccttgcgggggcccaggtggtcccggcggcggtcccggcgacgcgctgggcgcagcggcggcgggtgtgggtgccgcgggcgtggtggtgggtgtgggtggtgccgtaggcgtgggcggctgctgctccgggcctgggcacagcaagcggcgacgtcaagctcccggggttggcgcggttggcgggggcagtcccgagcgtgaggaggtcggcgcaggctacaacagtgaggacgagtatgaggcggctgcagcacgcatcgaggctatggaccctgccactgtcgagcaggtaagagctgtggggtgaggggtgagcggccacggcagatgggacccccagactgtgaagggactcaaggaaggctgtttgagatcgccccaagggatctaggcgttttcactgggcctgacagtcttctctggcggtagggatgtgagacaccttctttcctcccctccaggattttggggctagaggcctacggtaaggtgtcagacttaaagatccgaggtctcttttaaggtctatagtcgtcattccagtccctgggacctcatcatatagggccaataggtgggaattctccaagagatacaggtaggatcgcgcccctcttgagtaggagtctcaggtctcccaagagacttaggtatgtgttcagtggcttaagagctcttttcctctgggatagaagtttgagattccccttccaggaaagtcaaataaggtggagacctcggag

SEQ ID NO: 137231 - DNA, 1043 bp, Homo sapiens
atgaaggcaaagctttgatccgacatctgagctctagcctaagaaggagagttgagatttcctcctccctctggctgggatatggagctttggaggttcagagaagagaaccctcacctctgatctggcctctacgagaggtcctcatctccatctggcccaacaattcccagattctgaagcttggaatgcaaacacaggcttcatgggctgtggcctctgcagcgacctgccatccccaggccttgcctgaggggtcaggctgcctctcccaacacacactcagatagcacaaattctaccatccccttccctggctgctggaaatggaccccgcaaccctgtcctctgctgggcccccagcaaactctagcaatagcagctgctgccgtgtcattatgcaaagcctctgaccagtttgctgcagcatttacatctgccctaatcagaggggccacctctaactcctcctcctcctctcttctcctctggtttgcgtccttcctgggttgggctggagtctggactggctgagataagagcctggcaaccagcaagagctgggctgtatttggagatcatgggctgattccatgttcttgggcaacagtccagaagcatcaggggctccggcctgggatgtttctgaactttgggagttataggagacaggaggaacttctcctcctcctcctcccctacaattccttttcacatattcctttcttctccctcttgggtgaccttccaaaactctgctctcaggctgaaatctggcatcatctcaggttccctgtccccagcactgtccccatggagctggtggctgacaaagatgtagtttccatcagtcaataaaacctgagaggagagatgaggactgagagtatctcctggctctgtgggtttgggggctgggttgggcttgggggttgaaaacactctgatttcaatcccttttggctaggagaagggctggtatgggtcaaggtatgggagatggatggttggtgatgtattctggaagatggggatccaggaga

SEQ ID NO: 137232 - DNA, 1056 bp, Homo sapiens
tagatgggatggagtgggggactgaaaggtaggtgggcacttttcctgaccttggcctacctcccctcgctccagctacggagacatggtgcccagcaccattgctggcaagattttcgggtccatctgctcactcagtggcgtcttggtcattgccctgcctgtgccagtcattgtgtccaactttagccgcatctaccaccagaaccagcgggctgacaagcgccgagcacagcaggtaaccgcactttccatccgagcacctcctactccccacaccccaagccagtctactttggggcttacccacctgaccttttatctcctctctctgcagaaggtgcgcttggcaaggatccgattggcaaagagtggtaccaccaatgccttcctgcagtacaagcagaatgggggccttgaggtgggtcggggcctggatagggttggggtgagccataacggggaggaaggtgctgcccttatcgctctgctccatctactccaggacagcggcagtggcgaggaacaggctctttgtgtcaggaaccgttctgcctttgaacagcaacatcaccacttgctgcactgtctagagaagacaacggtgaggcctaatgtgaggtgatatagcagaatagagggggtccctctgcggccatgccagctctctcccttggatgggaggctcactacaaattgtggaaatcacacagagcttcctggaagaggctacaggagagccaagccttgaagaatgggcaagggaagggaagagggaacaatgtccagaaaggagaaaacagcctgagcaaaggcttgagggtgggatcagctcccatgggatgccccgtgaccctgcctcccttctgcccatagtgccatgagttcacagatgagctcaccttcagtgaagccctgggagccgtctcgccgggtggccgcaccagccgtagcacctctgtgtcttcccagccagtgggacccggaagcctgctgtcttcttgctgccctcgcagggccaagcgccgcgccatccgccttgccaactccactgcc

SEQ ID NO: 137233 - DNA, 1034 bp, Homo sapiens
accttctctcctatgcctggctgtggttgcttctcttcctcctgctgccgctgctgctactgccactgcccagtacacaccgccagcccctcggggtgtggtttccccagacctgcccccaacggtgggacccagccttctcccggcgtctcctgccagcttcctgcaaagcccaggagcccccctccctggagacacacccaactccctttcaacaccccacccccctcttaatcccattttggggttaacccccttcctcttatttagtcttcatagatcccctgggtgctctgggattgtgcccaacttcctaacatttgagtcccggcccttggaattccccaggcccctttttcctccctgtagaactcctgagagtgtcgaccaggctttgttggcccgtctagatacccacctcccccagataactctcagcctctcaaaaaataacccagccccctgtctacccctttagataaccccttcccctctccagccctactaggaggctctggcctctcctttcttccccagaactcctgtagagtatagacacccccccgggctattcttggcaactctaggcagtcccaagacacctttcagcctctttacaacctcctggatccacagccacccctcaagatgcaccagctccctttccagatccatgaggggggtctaaccctcttatgcttcccctagaagtcttgagggtgtggacaaccctcctcacctgtctcagcccctctagaacccccacttccaggcactctcagtctctttcaagcacctctggtcccatttctacccctctggatgccccagtctcctctccaccactgcaaaggaattccaggctcttctgccttccctgagactcttgagagtgcagagaattccccacgtgtttcttggcccctctagacgcccccagacacctctcaggcacaggctgactcctttagaatcatctcagtctctctaaaccctccctcagctccttcttggccccatccccacaccccttt

SEQ ID NO: 137234 - DNA, 1049 bp, Homo sapiens
acccacccagttacctgcctgcccacctgttgatctccatctgtcctctggacaattcattcgtccaccaatttgtctaccatagatcccccatgcccatgggtccacacacacatctttctgcccaaactgccacccaaggactttccccatctctgagagttagaaaggggtcagacccagctcctgcctttgagaagcaagctcacacttagaagagcaggtggccagagtggtggtgtatcctgcagcagcaccatgccacaggaggcatcccactcccattatctgtagctccccacccatcctcatgacttttctgagccctgcccactgttgggggtgctgtgagcttctccaagtaccttctcatcccaggccagacacagctgagcattgattaatgaaagggtgtgagggaaatcacagatgataccctacgtttggcaagggagcagcctgtccccttctctggcccctgatggttcatttgtttcttaggatatggaagttctgtcccaggaaattgtgcggctcagcaaggagtgcgtggggcctcctgacccagacctagagccaggagaaaccagctaaagacctgcaggctgcacccacctcctccccttcctaccccctaggatgctattcccttgggctgtggtggaaaaatgagggctggagccaaaatcaaatagcttgggagactggacattaaaggggctagaggcctgatggttagtgttaatgatcctgtcttagggcagaggccaccagggagtggggatcctgagggaaggggcagggatttctccttcttcttggtcctggctcccaagggcttctgtcttcatctctgcatgagctctccttcccagagaccaactcttttttattttattttattttattttttaatttatgtctggagcctggctactctgcatttgggattggggatgctgggtgggtgtgtggtccatgttcagcgttctagcaacacgtgtgtgtgtgtgtgtgtaaaggctatgcagccaaaataccatctggcc

SEQ ID NO: 137235 - DNA, 1050 bp, Homo sapiens
ggtggtgctgagcccggggctggcctctccccttctctttcctgcagtccttatccagcagccctcaagcccagccccctcggccagcagagctgtcagatgaggaagtggctgagctctttcagcggctggcagagacacagcaggagaaatggatgctggaggagaaggtgctgcctgcctgcctgcctgcccatccccacttgaagtgcccttgtgggtgtggggtctgcccgggcccgcctcatgtgtgaacatgtacagtagaggggtctcaggtgggctgggccatcttgcaggtgaagcacctggaagtgagcagtgcttccatggcagaggacctctgccggaagagcgccatcattgagacctacgtcatggacagccggatcggtcagtgtcccctccccggccctcagccctggtccagccttcacctggccctccctctccattctgtgctgcggcttctctcctctcctctcggaactcagcgaagctactgacaagaccatggcctgtggaggggagaacaggaaagcactgtctcttgatctcgcctcctccctcttctctctttctctgtcatctctccactctccattctccattgtgtctctctgtccactttctcctttcctctccctgtgcctcatcttcctctcctctctctctcccttctctcttctccgtttctctttttcaccccactccttcatcttgtctcgctgtctatattgttttccttctctgtatcttcattgcttttgctttctttcaaactttctccttcacagatttttctttattaatcagaatcatactgaccaacatgtgctgaggactttctgtgtgctctgtgcttcacatacagtcatgtgcatctttccagttccacaagttagttatcctcatttctcggggccatagagctagtgagtgacagagctaggttttgtatgtcaaagcctctgtcctacatgacatggcttttcctgctgccttctcccctggtattcgtctccctcttttctcctctggctctgcctg

SEQ ID NO: 137236 - DNA, 1027 bp, Homo sapiens
tccctcatacccctaactgggcatgataccttctggggggctgtggccagacctgggacttgtcttgtaggaatccctgcagcagcagcagcaggaacaagaggaagccctcaagcagtgtcgggagcagcacgctgccgagctgaaggtgcctctcgcatgatggtgttcctctctccagacagtgacgggccctcctgggaggacagaggcttcccaagccaatgcctaagctgctttctgctttgcagggcaaggaggaggagctacaggatgtacgggatcagctcgagcaggcccaggaggagcgggactgccacctgaagaccattagcagcctgaagcaggtcagtggtcactgcacagccccagacacacccctgatcctcagcgtacaggaggggcagggagggagcatgcttcaggcagcccttccggcatctaccagccatgcctgctttctcccacaggaggtgaaggacacagtggatgggcagaggatcctggagaagaagggcagtgctgcggtaagacagagcggtgcccaagcacggctccctcctacctgtagcctccctcctatgggcccactgggcctcagtcctcatgttacccctgtcccccacagctcaaggacctcaagcggcagctgcatttggagcggaaacgggcagataagctgcaggagcgactgcaggacatcctcactaacagcaagagccgctcaggtgagggactaggacagggagaggaggctgaggcatgggggaggtagggcctgggcctgcaggctgcaggttagtcctgcctcttcctcagctgtgctttcctgcttctgtcgctctggaactccatcttttaccttttctctgtctctcctctgattctttctctgcattctctctttatttctatctttctctcgtttttgccctgtctcttctctgtttctgtctctgcctctgtctcagtttgttctctctctttcctctatgtttgcctttatctccttgctttctttctctag

SEQ ID NO: 137237 - DNA, 1350 bp, Homo sapiens
acttcaagaaatagggcaggagaaggagcagttgacccaggaattacaggaggctcggaaggtaggggaacatgagggttgaagggagaggatggggggtaggaattggctcagtccatggggatgggaggaggtgatataaccaaacatgtggggataggagggaaaggaaaattgactggtttctggttgaccagtttcttggccaaatccatgagagtgggaggggaaagaaagaaagtgaccagttctataaggatgggtgagtgccttagccagttcagtggggatgggagggagtggagtttggctagttccttgggcatgggaagagggttggaggccttttttcgatgttgtggaaggaagttgactgccatcgtcctggcccccagagtgcggagaagcggaaggccatgctggatgagctagcaatggaaacgctgcaagagaagtcccagcacaaggaagagctgggagcagttcgtctacggcatgagaaggaggtgctgggggtgcgtgcccgctatgagcgtgagctccgagagctgcatgaagacaagaagcgtcaggaggaggagctccgtgggcagatccgggaggagaaggtgggtgggtagatgatgatgcccttcttcctctaaaacctgggaaccacagcgttgctgataggccagtgggtggcatgcatcaggtgcccgctcctctgccttcctggcccatgacagtctgccccatcccaggcccggacacgggagctggagactctccagcagacagtggaagaacttcaagctcaggtacattccatggatggagccaagggctggtttgaacggcgcttgaaggaagccgaggtgagttggtgatgcctggtgaggaacagaggctgattggggccctcatgtcaaaccacagaagcaggagtggtcaggccctggaacttcccgagattttctggacttagggatatccccacagtcccctggctcaatagcagccctctggagtggatcaggggatggccatcagataggacagactgtcacgtgttaaggctgccctgcctttgtgcaaatttggaaaggcacctctttctcctgaaactgtacttctgtcaggaaattaatgcaatacactgatgttattgaacaagaacctgctgggtgcggtggctcacgcctgtaatctcagcactttggaaggccgaggtgggcggatcacttgaggtcaggagttcaagaccagcctggccaacatggtgaaaccctgtctctactaaaaatacaaaaattagccgggcatggtggctggcgcctgtaattccagctactcaggaggctgaggcag

SEQ ID NO: 137238 - DNA, 1064 bp, Homo sapiens
agacggagtttcggtcttgttgtccaggctggagtgctatggcacgatctcggctcactgcaacctccgcctcccaggttcaagcgattctcctgcctcagccctcccaaatagctgggactacagccgtgtgccaccatgcccagctaatttttgtatttttagtagagacggggtttcaccatcttggccaggctggtctcgaactcctgacctcatgatccacccgcctcggcctcccagagtgctgggattacaggcatgagccaccgcgcccggcttctgcttttctttgtttctagtttctctctagtaaagtgcatgaaatgtactaatcttaagtgtacactcagtgaatcctctcttcgtctctctcttttttttctctctctctccccgccaccatagccaccacccagatcaaagtataaagcacttttagtaccccagaaggtcccctttaccccttcaaagtcagtactcccccagaagtaaccattattctgatctctagcaacataagattcatttcgcttgttctttaacttcatataaatggaatcagctgctctttgtctctgacttctttctggcagcactatgtaagtttatccacgtggcagcacagatctgttctcttactgttgtgtggtattccattgtatgaacataccacatttacccattctcttcattgtttttctgtttgaaatttcctctctcttcctggttctcttcccacctccctccctgtttccctggaactagggggctcataccctgtccctggcccctggggtccctttcactctacttctcatcaccactactttctccagatccaaacagcaaagacccaagaactgaatatgctccgggaacagaccactgggctggcagctgagttgcagcagcagcaggctgagtacgaggaccttatgggacagaaagatgacctcaactcccagctccaggtaacacctttggctctggcctgtctcttcctagttccctagtaatggcccagtgaagtccccagtaaggtggagtgggaagactggagt

SEQ ID NO: 137239 - DNA, 1034 bp, Homo sapiens
aatcctagggcagaaggggcattgtaccccatcaaagcctaggtttcatcatctgtgaaatggagagactcacacctatgtctcagagttactttcagtatggaatgagttaatgtggtcccactatatcttgtgcatgataagtttcatcccatccatctctcagctttgcccattcactcattcattcattcatgcaagcatttacagactcctggctcttatcttaggacctggagacccaggggtgcggcacccagtcatgatatcctgctttccaggcctcccagcctagccaatctataacatggccattggccactatgttgggagcataaataccgggctttggaacctgaaggatctgggtggagataatattgttgttgctgacccgctgagcaaccaaattacttaacctttccaagactctgtttccccatttgtaaaactggtactactcacttgtcagggctattttgaggattccacaagacaacataagtaaatcctggcttccaaaaatgacttaataagaagtgtctatatttattaattttaggtttgtctttatattattctcaatgttatcacttgtctgtacctctctccccagctctccgagaaactgaaaaagaaacaagaaaggtaaatttctttttcccaagggtactgggggccgaggggggaattaacttacggaactgacccatctacatctgtccttctgtgcccagtttttgccgtctgcagacagaaaaggagactctgtttaatgacagcaggtaactgccagatttgcgggtattggtggacaattgggacagtgcccagtgaagattacaggggcagagctaggagactgggcctcaagccatgtccaacacaccccctccccatcactcctaggaacaagattgaggaattacaacaacggaaggaagctgatcacaaagcccagttggctcgaacccagaagctgcagcaggaacttgaggctgccaatcaggtgatggggactgggttctgagatc

SEQ ID NO: 137240 - DNA, 1094 bp, Homo sapiens
tgctgtgacagagagtactggaattttctgtgttgagggatactactttaaaggcaacatctgagcagagcactgagggatgcaaagaagccagttaggtgaagaactggatgagaggattggtgttctgggtagaaaatattgcaagcaggccgggtgcggtggctcatgcctgtaatcccagcactttgggaggccgaggcaggtggatcacctgaggtcaggagttcaagaccagcctggccaacatggcgaaaccccgtctctaataagaatacaaaaattagccgggcacggtggcgcatgcctgtagtcccagctactcaggaggctgaggcaggagaatcacttgaacccgggtggcggaggttgcagtgggctgaaatcgtgccactgtactccaggctgggtgacagagcgagactccatctcaaaaaaaaaaaaaaaaaagaaagaaagaaaatattgcaggcaataaaataaaaattctctgtaggcctcgatattctcatctgaaaatggggacaaggaattttctcaggactgctttgagaagtgtacttcagccaggagttgggcagggggctggcttagttgtattggcattgtatacctctccaagactaacggctggcaatgcaggagctgtcatcagtgttggccctggaaatgccctgcgagctctttgtggtgcttaggatgagagggagctatctctgggcccaggatccagccctccacagaagaggggttgcagtgaggctgtctgtagcactaacaacttccagaggagcctgaggtcttggattgcatctctgaggttgggagtaggaagaggaaaatggtttttggtgtcctcatacttggtatgctcttggtattctctgactctgccacttaaaagatgtgtgaatttgaacttgtttaacatctctgtgcctcaatgtccttatttgtaaagtgggagggcacctatatcatagggtcattatgggaattaagtgaattgtaaagtacatggacaaatgctatgtaggtttcagcaaatactgctctgattctctgcttctctgccccttctcttcctctgttca

SEQ ID NO: 137241 - DNA, 1360 bp, Homo sapiens
tggacagatgtagcaatgaagccacagtttctgagtctggagatccagcccataaatggttaaataccagggcatctccctacctcccctgtccccccaccagcctcaagagcttccaagaaaggatgatttatgtgtgctggggccccagggcaagacttgcattcattcactcactcacacactcattccatcattcctttgggctccaaattgtcacacatgttctgtggttgaagatgctcccatcctgcaacccctgtcatccttgtcctcccaaaacgcttggcacaattgtctccatatcctagtaaggcagtccatctctgttcactttagctctcttcccacccacccccactttaggcactgagcaagagcaagaaagctcaggtaaggggatcccttgtgggtgagtgtgactgggagatgtcttggtgggctatttctgtatgctgatatttccttgtactggcctttctttctttgtgtgcctttacatctgctactacctcactgccatgtgttgctgtatctgtccttgtttccctgtatttgtcctaactctgtgtctctttccttctctctctttccattcttttctctgagtctctttctgtctctgtctgttttcctgttcctgtctctctgactcatttctcttcccaatcttctctttgtctctccccctcctgttcctgtctcggtgatttctcttttttctgctttctctctctaactccttgtttcttccaccccattcctctctcttcctaactcatttcttttcctgacccctcctcttctccctgttctgttctctccctgttgatttctgtttgttcttctctccgtctttttcactctctccctcccaatccctctccccttttctatctctccccctttccccatctctacttcctctctccccaatcattatcttcctgtcttttcctccgctctcttcctccctgtattcccttctctctaccttcccatgtctttatcttcctttccctgtctctcattttatccctccccatgtctctttctcctatatcacctcattctctgtaccctatgtcctctcccacccatgtcattttctccctctctctgtttctttgccctacctccctatcctttttgcccttgctggagtcctggcccttgtctgccactgcaggaagtcgaggtattgctgagtgaaaatgagatgctgcaggcaaagctgcacagccaggaggaggacttccgtttgcagaacagcacactaatggccgagttcagcaaggtgctggtgcctgggatagtcaaaggggaaatgaggggtaggggtcatctgggctgaaaccta

SEQ ID NO: 137242 - DNA, 1034 bp, Homo sapiens
ctcgtcggtttcgttctcttctctgcgtctccaaaatgctgcccttcggaattaggttctaccccctccattcctggccagtggtttggtccgaccttaatactgccaggaggcgcgagctgcgtctgcgcagaaagctggcgggggggtggggggaggaacatggcgcaagctctgtctgaggaggagtttcagcggatgcaggtgccgctcgcggtgggaaagaccacccggctaggcgaccgggggcggggtagcgagaggtcgtgctatcagctctgagaaggggttggttgggatggaccctgagtttatggggtgggtctggagaagggaaactgaggctcggagtggtgagactattggattccgagatactctgcggctttgaaggttggactctgttagcattgtgggctgggagagcgccattaagtaggcggtaccttactcagacctggaggggacgagacttttgggcccgtgcaggggacaccgtcggcgggtgatgataatgggctttgagggaaggagatcctgagaaggcgaaaccattttgtctggagaggaaggaagcgggtgttgggtcgtttgcgtcatggtggtgggagcccttgagagggcagaaccattagcgggtgggaggtggtaagttttgggggagataccactgtgcccggggattggggaaagaccccagatgttgtcattgttcctgggaggtggagatcctgtgccattggtggttggtagtgcatcctaagagggggcggcaccattggatgattaagggtgatcccattaggcctggggtgaagaaggccatgaatgggtaataccattaatcccattaactggggggaggaccagaggggtaaaagattgataccttggactacaaggagggaagatcactgggctttggggaggtacccccacttgattcttttggggggactctgagatgcaatgaaaggccatagcattgcactatgaatgggcccttgttgagagggttcctcactggggggggg

SEQ ID NO: 137243 - DNA, 3716 bp, Homo sapiens
ttttcctctggatactccatacctttgaaagaccccagcctcaagttctaagcatgtggtgggaggctcccacctggtgcaatccccgcctcagctcctgagaaactcctcatgtggcatttcctgcttgcctcccacttgggccccacagggagatgcgctggaacaagggcaccatcctgaaggcctctgtggattatatccgcaagctgcagaaggagcagcagcgctccaaagacctggagagccggcagcgatccctggagcaggccaaccgcagcctgcagctccgaattcaggtttgaaaagaggagatggtggtgggggaagagggggagagcttcctgcaggtggaggcagagagagagcaggccagggtttcccttcctggcatacttgggggatccctgggcttcccagatcacacgatgatgatagtgataatgataaataataatcataatattaacaaggataataatattgctaatgtacatagcatttatcttgtgctctgtactgtgacaagagctttatatccactaacttattcaatcctcagaattctatgagataggggccattattttatttatttatttatttatttatttttgagatggagtttcgctcgttgcccaggctggagtgcaatggcgcaatctcggctcaccgcaacctccgcctcccgggttcaagcaattctcctgtctcagcctcctgagtagctaggattataggcatgcaccaccacacccagctaatttttgtatttttagtagagatggggtttctccatgttggtcaagctggtctcgaactcctgacctcaggtgatccacctgcctcggcctcccaaagtgattacaggcgtgagccaccgcgcccagcctaggggccattattatatacccactttacagtttgcgactctgaagcttcagagatgttaagcaccttgcctaaagttttggaactagtgagtagcagaagctgaattccaacccagggaacctacccttttcaacctttatactcctctgcctctgagggactctgaaccctacttatcctgcacccaacccctattttttacaggaactagaactgcaggcccagatccatggcctgccagtacctcccactccagggctgctttccttggccacgacttcggcttctgacagcctcaagccagagcagctggacattgaggaggagggcaggccaggcgcagcaacgttccatgtaggggggggacctgcccagaatgctccccatcagcagccccctgcaccgccctcagatgcccttctggacctgcactttcccagcgaccacctgggggacctgggagaccccttccacctggggctggaggacattctgatggaggaggaggagggggtggtgggaggactgtcggggggtgccctgtccccactgcgggctgcctccgatcccctgctctcttcagtgtcccctgctgtctccaaggccagcagccgccgcagcagcttcagcatggaagaggagtcctgatcaggcctcacccctcccctgggactttcccacccaggaaaggaggaccagtcaggatgaggccccgccttttcccccaccctcccatgagactgccctgcccaggtatcctgggggaagaggagatgtgatcaggccccacccctgtaatcaggcaaggaggaggagtcagatgaggccctgcaccttccccaaaggaaccgcccagtgcaggtatttcagaaggagaaggctggagaaggacatgagatcagggcctgccccctggggatcacagcctcacccctgcccctgtgggactcatccttgcccaggtgagggaaggagacaggatgaggtctcgaccctgtcccctagggactgtcctagccaggtctcctgggaaagggagatgtcaggatgttgctccatcctttgtcttggaaccaccagtctagtccgtcctggcacagaagaggagtcaagtaatggaggtcccagccctgggggtttaagctctgccccttccccatgaaccctgccctgctctgcccaggcaaggaacagaagtgaggatgagacccagccccttcccctgggaactctcctggccttctaggaatggaggagccaggccccaccccttccctataggaacagcccagcacaggtatttcaggtgtgaaagaatcagtaggaccaggccaccgctagtgcttgtggagatcacagccccacccttgtccctcagcaacatcccatctaagcattccacactgcagggaggagtggtacttaagctcccctgccttaacctgggaccaacctgacctaacctaggagggctctgagccaaccttgctcttggggaaggggacagattatgaaatttcatggatgaattttccagacctatatctggagtgagaggcccccacccttgggcagagtcctgccttcttccttgaggggcagtttgggaaggtgatgggtattagtgggggactgagttcaggttaccagaaccagtacctcagtattctttttcaacatgtagggcaagaggatgaaggaaggggctatcctgggacctccccagcccaggaaaaactggaagccttcccccagcaaggcagaagcttggaggagggttgtaaaagcatattgtaccccctcatttgtttatctgatttttttattgctccgcatactgagaatctaggccaccccaacctctgttccccacccagttcttcatttggaggaatcaccccatttcagagttatcaagagacactcccccctccattcccacccctcatacctacacccaaggttgtcagctttggattgctggggccaggccccatggagggtatactgaggggtctataggtttgtgattaaaataataaaagctaggcgtgtttgatgcgcttttaactttggcaaagagtctcctgtccttgttttacactgtgcagtgaacatagcccatgcaggccaagagggataaaagtccttgggagaaacagattccagaaggatggataaaagaatttagaaaggaagagggcatggaggaagacaatatgcaaacaaaagacagtatttttaaagaccaatcaccaggcacaattttaactgctgcaagtgtttcatctaatttatttctctaaagggatgttagtcagaacatgctgcttcttacttccatttggtctttgaagaagctgaggaatagaattgaactgttctgaagatatgcaagcctgtaaatgggtgaggcggtaaaacagtaaagtcaggtgagtgagggctcgattgaaaaatgccactgagggcagagggggaaagaagcttttcttgcaaatccacttttgaaactgataaagaagtctatgaggatatttcctggcagacaacagaggtatttaagatggtggaaaggacaaagacaaatatctgaaaggcagaggaacaagcaaccaactgaattttggaacagatgttgagattttgggagaatttaaatgaacacaagtatcttcttgaaggctgggaaaaagtattttcccgcaatttctcaaccagacactgactcctagaacaagcatcaggcctggtccctccatttcccccaccagactgtgacctctgagggctggaactgggcttggtcaccgtgactaccc

SEQ ID NO: 137244 - DNA, 1271 bp, Homo sapiens
tttgtcccctttccccctatggcttgtggtcttgctttcaccccacttcagttcctctcgtcttggatttaacaaccagcctatcaccatggcttaaaatagtaaaaagaaggcactttttaaaaaaggcatttcccctgcttttggctaccaaaccctaccttagtatctgcatgtgtttcttgccttcctgtgctcagaggccctgatcactccactcttttccagagaccgaggcaaaggcccttttgaaggaacggcagaagaaagacaatcacaacctaagtaagccagagagcgtgtgcattgcccgggtgctgtgcaggcctgcctcaccccgagtcctggccccccatggggaactccttccctgcaacagcctcccaactccctactttctgtctcttccatttttggctaattgacaactctttctcccactctttcttcctctcctcccctctccaaagttgagcgtcgcaggcgattcaacattaacgacaggatcaaggaactgggcactctcatccctaagtccagtgacccgtgagtctgggctgggaccctcaggccagcgggaggtggggcaggcgtcccatgctactaaaattgtgccttggtgggctcaccaggcagtctcggcccaggcatttctcctctgtctggttctttctcagcctgagcagggttgcagaccctcactatgtcagcacctaaaattttaggcacataatgttatggtctgtgtgccccatctggtccccgtaggatatatgcacctacttttctgttcacttagtacttcctttttttttttcttttttttgagatggagtctcacgctgtcacccaggctggagtgcagtggtgcaatggtacttcctttatttattcaagatttatttattggccgggtgtggtggctcatgcctgtaatcccagcactttgggaggccaaggcggggtcgatcacctaaggtcaggagtttcagactagcctggccaacatgatgaaaccccgtctctactaaaaaatacaaaaattagccaggtgcagtggctcacacttgtaatcctggcactttgggaggccaaggcaggcggatcacgaggtcaggaggtgaaggccaacatggtgaaaccctgtctccactaaaaataaaaaaaatttagctgggcgtggtggcacgcacctgtaatccccgctactcgggatgctgaggcaggagaatcacttgaacccgggaggtggaggttgcagtgagccaata

SEQ ID NO: 137245 - DNA, 1024 bp, Homo sapiens
ccgggaggcagagcttgcagtgagccgagattgcgccactgccctccagcctgggtgacagaacgatactccgtctcaaaaaaaaaaaaaaaaaaaaaaagagattaaaactcatgaagaagtgggatttggatatactttattttatttgtatttatttatttatttatttatttatttatttattttgagatagagtcttgctctgttgcccaggctggagtgcagtggtgtgatcttggctcactgcaacctctacctcctgggttcaagcaactctcctgtttcagcctctcaagtagctgggactacaagtgcaggccaccatgcttggctaattttttttgttgttttgtatttttagtagagacggagtttcaccatgttggccaggctggtcacgaactcctgacctcaagtgatccgcccgcctcggcctcccaaagtgctgggattacaggcgtgagccactgcacctggccctgggtatacttaagattgacgtgctcctctggagtatatccaggaaagtgtgaaggagaggaaaaaaaaaaaaactaggctgacataaagcagtgctaattgaatagttggataagaatctcctgagagaacagaatgtgcaggaagatactggagtcaggaccttggtccacagcagcaggagaccctgatgtggaagatggtacaacttgatcagagtggaagatggtacaacttgatcagagtgaaagactggagattaggttggaattctccagaaggccagattttggatagaatgttgtcatgacaatttaccaaggtcggagaagattgggttggagtgttccaagaatgctggattggaatgttgtgctgggaggagctaacggactggaatgtcccatcagagccgacaaagacctgagaagggtggttttccagcatttcttctcagagccagccccggggtttgggaaaggggctttagaggtcactgagggatatgagggactggaggaagtgataagcaggccaggca

SEQ ID NO: 137246 - DNA, 1393 bp, Homo sapiens
cccaggcaggggaagaagaggaacctggggcttctcctatcacctgacgcccacccccaggagctcagagagcttctctagcctcacattgggcttaggagccctctgtatccacattctgctgccaaagcctcaattctgcttcttctgctctcctgtaaataggacaaacccccccttgcagagctgaacaatagcatctccacttaatatgtgaacaggctcaaatctaggcttcaccataaggaccaaaggctaaaactcccccaccagactgacctccagtgtgtcccccatcagactgtgacccctgagagccatcaccaagcctggttcctgtgtctctgcttctacattgtggcctcggaaggcagagaacaggcctggttcctgtgtctgctccgtcacgctaagaccctttaggcttgggatgagacttttagcttacctaaaatatggccccatatttcccattccacagcctcccaatatcactgcaggccacaccagccaccccagctacactctctgcatcgtcttctgcagggggctccaggacccctgccatgtcgtcatcttcttcatcgagggtcttgctgcggcagcagctaatgcgggcccaggcgcaggagcaggagaggcgtgagcgtcgggaacaggccgccgcggctcccttccccagtcctgcacctgcctctcctgccatctctgtggttggcgtctctgctgggggccacacattgagccgtccaccccctgctcaggtgcccagggaggtgctcaaggtaaggtgagatccagaggccctgggagggggctcctggtgactgaggagtgatcctaggagctagggatggcctcgatgcactggtgatttgggggcaaggtcttaggggctctaaggaaggtccctggtactgtttaaattatctgtgttcatgtctcatgtgttttgggtttctgagatgatcttgtgaaattgcgaggagttcgtgggggccatgaggatgtcttggtggaccatggaggctcatgagtgccccaagtgggccctggctttgtaggaagagcttcatgtgtgtgggatacattagttctttggccattagggggtcttgggaagcattgtatggttcccaggtctattaggtggtgtcagagactaggtggggaatcttggggactgtgacagggttttccagaaactacgagggatcctgtcagtcatgggtggatcttggcagctgtgaaggatttctgagaaagagagtttgggtcctgggggagactcgctaatatttttggggtgttctcagattctgggcccagcttgtctgcgtgagtctaggcaccaatgagttaggagggtcaggctggggctcagaattcaccc

SEQ ID NO: 137247 - DNA, 1021 bp, Homo sapiens
cgtgagaatcacttgaacccaggaggcagagcttgcagtgagctgagatcgcaccactgtactccagcctggtgacagagcgatactctgtctcaaaaaaaaaaaaaaagtagggggtatgggggctgggagaactctgaataggaagtcaggaatccttctataaagtgaattgttattcctaaattctgttttcctcaaacccaggttgttacagtgtgggggttgggatgcaggcgttcttattattctgactcctaagggactatgagtaacacagtggggaagggaaagggggatgggggaaggaggtgggaattcatggtggtgtggtacccagcaaggtggccaaatatgaggggcttgtaccctcctcttcgttctcccccgctctctgtctctttctctgtctcaggggagggctggggaataaggtccttcattcaatcactgaccaccactccacctccccctcagcctgaactctttgcttccggaatccgggattgttgctgacatagaattagaaaacgtccttgatcctgacagcttctacgagctcaaaagccaacccttaccccttcgctcaaggtatgtatgacttgtctatctgattcccctcccaattcctcagccctcctctcccctcttgatgggcagaggccctcagtaccagcccaacccattctttcaccagcctgcgttttctagtggtggtaaaattagggaccagaaagagcatgtcacacaggaaagtaggtggccaagctaggattccagtatctctgtcaagacctcccctgcctgcccccagcccacctgcacacccattcatatgcaagtgtttcagcctcaggtgttccagccggcctggagtgctcagagatagggcgtggcctgcttaaactcatgtccccgggtgggcggggacatgcctctagccccaactcagtcccttcccacactaccaactcacccaccctcagcccttgaggagcccctgctggtctcttctttcccc

SEQ ID NO: 137248 - DNA, 1059 bp, Homo sapiens
ctgtcctttctctgcaccctatgtgatatcctctcctatatactcgtgatctgcatcctggctcaccaccttcgtctcctgccttgtccctgcccctgactctgccccgtttttccctcttttcttgtcccatcaccatactcattcctatcctcattgtgtcctggtcttttcctgttcctgacctccatcctgaacctgcccttttccctgtcccctcctttgaccactggcttagcctttcctagtcatgtcttctgactgctgttctatgttaatcctgacccctgccctgctgttttgtctctttcttgtactttttctctgacccttgtcctgaaccccaccttatcccatcccctggccagtgttctggctcattccccatcctgcctcttgacctccatcctgtgataactctggctctatcttgtcccctacactccttcctgttctgtcccttcccatcccagccccagggtgttcttccccttaccatgcccctccaccctgttcagatcttcttccttcctaatatccacttgccatcccttctgagccgaggacaggggtcccattatactgtgcccggaacttgaagattctgctgttcccaggacctccgaagtacatcccaaatgcttctcttagcaagagcaagcagccctatgtgccctgcgtggctgatgggggtttttgtgtgtgatctcccctatccccaccctagtgatcttacatagagcttacatttctcttcctgccccaggagggcatgcaactgttcctacgcccctgccctctgcaagtgtgaaagaataccctaaattattcagtgactctctgggagtctgagaggtctgggtcatgtttccagtcttgctgtgttggggactgcctcatgttggggggaagagttaagaaaatatgaagagatgggggacccaggggtatgtatgaatcttctaggccatgtttgattctgggtgcatgatccctgctttcctggactgaaaaagaagaagtctattctaggccaaggctttgggacttggtatagag

SEQ ID NO: 137249 - DNA, 1023 bp, Homo sapiens
caggatgtgtgctgtgtgccgggactggcccagagctcaggtggtagtggtgatggtggtggtggtgatggtggtggtggtgggcggggtgaggggaggcagggacagtacgtcgtaaggactcaaagctctcatttccttctctggcatgaagcctgactctctgaagaagagagacccagcatggatgtgaagaagcatgagcccccttccctacttctccttcccacttgcaggagtagcctctgtctgcctcccagccaggacccagcccccggaaattctgatttcacctgctcttctgccactgtgatctgaatcaggcctcttcacctttccaggcctcagcttctgcatctataaaatggctgtgaggaggctgggtctgtgccatcctgctacatttgtaggaaccaagagggatcaaaacccataagtgttttgtagggtgtaagttgtgcttgatttattgagattatttcttctggagccacagaaggatcttgagacctgacctctccttagaaaggttgacttcctctgtccccaacttgggaaactattattccccagtgagggtgggaattgccccaaggccttctaccactgccttgccctgggaggaaagggtaggggcctcagaatgtgatgcttagtgccaagacacaaaaactcagtttacacccgaagcctcccatgtactttacagctccccacacctctatggcccagatccaagttgccccttgggtgggcagcgtctaatcctctgggaatttgggcagtaggagaggcagctgctactcccaccactctcagcccttcttcccagttttctgctaagtgtacggggtgaggaggcacaggcctccatgcctggccagttttaaaaaaaatttttgtagagatgggggtctcattatgttgcacagtctggccttgaactcttggcttcaagcaatcctcccacctcagcctcccaaagtgctgagattacaggcaccagctaccctgcctggccca

SEQ ID NO: 137250 - DNA, 1050 bp, Homo sapiens
cagctccccacttgctgtgctctcactcaatgcgaagggaaccaaggtaccagggccaagtgggtccagacatccacacggattctgaaagggcaggtcaagcaggcacgtggggcccaggttaccccttattccccgctgtggcatgggaagctgggaagggctgggggttggggtatcatgggatgtgcttccttaacggttcctttgtgtcactgccagactttgtccagccatcagccacggcctctcgacagcaccaagatggaagtcaaaggtcagctgatcagctctcctaccttcaatgccccaggtcggtggctgcttcccctcctgctgcctcctcccctgctctgaatcaccacctgcttgctcgggaagagttggtcccttgccccacagctgctccagaatgccctggctgtcccactgatctttgctccctctgtgtccagctgccctgttcggagaggctgccccccaggtgaagtcagagcgtctgcgggggctgcttgaccggcagcggaccctgcaggaggccctgagcctgaaacttcaggagctccgcaaagtgtgtctccaggaggcggtgagggcctggccctaggggtatcaggcggggaggttgggaggaggtgaggagctggggcccctaggtagacagacttgggtggcaattcctcaaccacttgtcttggctgtagattccctgtcacctactttctcctcaaagctcagcttagatgtgttagaatgaatgaaataggctgggcgctatggctcacgcctgtaatcccagcactttgggaggccgaggcaggtggatcacctgaggtcgggagttccagaccagcctgaccaacatggagaaatcccgtctctactaaaaatgcaaaattaggctgggcgcggtggctcacgcctgtaatcccagcactttgggaggccgaggtgggcggaacacgatgtcaggagatcgagaccatcctggctaacacggtgtaaccccgtctctactaaaaatacaaaaaattagtcaggcgtggtggc

SEQ ID NO: 137251 - DNA, 1052 bp, Homo sapiens
cgccggcgccaggtccaggcagatgcactgaggaggctgcatgagctagaggagcagctcagggatgtccgggcccgccttggcctcccagtgctcccgctgccccagccactgccactgtccacggggtcagtgatcaccacccagggagtctgcctgggcatgcgtcttgctcagctcagccaaggtgagcatcccctggtgagggtgggagagtggacactggcaaatggacgtggtagggctgggatgggtgactggccggtgaaaaccgggaggtaggcacaactcaagtggcccaacccgtgagaagagttgcgacaaactggcttaccggaaaggacaaactgtgggggactgatgaatatctgccaggacagtcaggaaccaaactggggtggtcttgggctctggtaaaagcagattcttgggacaggaacaggatgaggcggaaactggccagaaggtggcccaagtagaggtgcccacccagtggtgtaagggggcagcacccaggcctgggagtgagaggcccacttctccccctctcacctgtagaggacgtagttctgcactcagagagcagctccctctcagagtctggggccagccatgacaacggtgaggactcctatcccccaaacctgcccccgactcctacgtccctttagcccatcccctttattcatccgaccacatcctgcatgatcagcccatcctttgatgcccagcccctcctgtgctgcttcagcttctccttagccatgctccatcttcctatgggtcccccatcttcttagcctcaccccaccccagccccacagccccagaacctacttgtcagccttagttcctcctcagcctgcttaacctgtcccagcactttgcccctccccatggccttgccccccagcctgtcctgccccctctgggcccccctcattgaattctatcccacttgctctcttccactcagaggagccccatggctgcttctctctggccgagcgcccctcaccacccaaggcttgggaccagctgcgggcagtatc

SEQ ID NO: 137252 - DNA, 1061 bp, Homo sapiens
ggttgcagtgagctgagatcaacatcgtgccattgcactccagcctgggcgacaagagcgaaactccgtctcaaaacaaacaaaaaaacaaaaggtgtgggacatgggaggctgggcattaaaggtgagcaggcatctcggtggataatggggtaggagtcagtctcctcatttgtgaaatggaaataataatatctgcctttgaaagacatggacataataagttctggttagcatatactgagtgcctgccatctgctaggaattagtgttttacgtggcatcaactcatttaatcataatcagatccctgtgaggtgggtgctattgttattcccattttatagatgaggcaagtgaggcacagaaaggttaagtaacttgttagtaaactgaagtcctggagtttgagcccaggcaagttttactctagagtccatgcttttaaccactgtcctcttctgcttcttaaacagagtgcctactttccccaggctctgaacaaaaccaagtccccttccttgtggggcttgcattctgtgaacggtggctgttgggatggtagctttgggtggttcatacgtatggtgggatagagaattcaggcagggttttacatgtgagccctaaggcctaggacttaatcctggaggccgtgcgagccgagccatgagaacggccttagcagggggaggggtcagctggattaggaacagccccctgcccggcatctactctgctagcctttcctctgagtccctacacagatttacacctcccttggagctaacagtgccaggcctcccccacgcatttctacccctgaccgcctagcctaggatagaacctcagctgccctttacatgtcactacctgccacctttatacacacagcttccaaccttgggcccatttggagatgtgaaagtgaaggcttagaaagggctggggtagggagggcactgcacgccttctgcctgatttttctgaccctattcccatgaccctcgcctctcaccccagacctgaaggccttcattctcgtcagtggtccggcagcc

SEQ ID NO: 137253 - DNA, 1038 bp, Homo sapiens
agatggcgaagatatccaggccagggagtggctagtcatgatagctaatgaattggaccatgaggaaactagctgctgtgatggcacagggtcactctactgcacatgacctgcattagtccatggggtcctggtggaggggatcttgggcactggtagcagcaattctttatcaagttataggctgaagatgagccttgaagccagggtgccgggaggaagggacatctcatgccccttgctgttttcttccttttttctccatgccccagagcctgaaagtgctgtcctgtgcctgcctccacctctttaacgagcctcttttcctttctttttctgtgtcttgtctgtcttttcttcttcttgtcttccccgccctgtcctccggattcctgctaccccttctaaagatactacgcggacttcctgtatcccccggagctgagcgctcgtttaagtgacctgacgctagagggggagcagtcctccagttctgacacccagaccccggggacactggtctgaccccttctgatatgtcccttgttggcctgggcacgattccaatctggggagcacacagctgacctcgctgggccctggggtgtggttgctctcagtcctgagcagagtgcgccaacctaatcttccaaggcccctggctccccgtaggcccaggaaggtgtctgacaccctgcttcttctctcacactgtgctggggactgggggccctcagctagcttaaaagaggggggatgatgtcatggggaccccaagccccttcctccatttatgtttacagttgtgacttaggtattcactgtcttcctccaacactaggcgttttacaaaagggaaactgtgatctcatctggttgggttcattcctgttcccatgcccaaccaggttccattcaggaaccccctccataaaatggaccatatcgggtctcagggccatttagggcagccaggagactccggtgtgaacagaaatccctgccacgcatcgccagggcagttggggcagtgggctc

SEQ ID NO: 137254 - DNA, 1435 bp, Homo sapiens
gcctcctggtgctctgggtcgcgggcggcgcttgcaccttcctgttcagcatcgccgggccggtgcttcgtgagtctccactaccccgagatagccaggaaagcagccagagcatgcttaaggcaccaggccagccctgccggtccccgggttgagagggggctgggaaacccgagggcctcgccacgcccccgctaaaagcgccttcccgggcttcgttcccccttctgggaacaccccttttattatcgcctttcctatctcactcttggtgttaagtgccttccactggccacgtccccgttaccgggcgtcttccctggccatgcccacgttgccaagccaattactcggccacgctttcagtatctgaggcgtcctggctgctcaccactccattggcctgcctgcgcgccaattcccttcggtgggccccggttggctgcaggctgaggtctattccactgaccacccctctcggtgccgcccacagtgatcctggtgcacgcctcgttgcgcctgcgcaaccttaagaacaagattgagaacaagatcgagagcattggtctcaagcggacgccaatgggcctgctactagaggcactgggacaagagcaggaggctggatcctaggcccctgggatctgtacccaggacctggagaataccaccccacccccagcccataattgggacccagagccctttcccagcacttaaaacaggagcctagagccccctgcccaaacaaaacaggacatctgtgaccgccctacccccacgccagccccaaactaagatatccctcacacccagcccccattacctagggacaagagtcttccccagccttgaacctaggaccaagagccacctacatccagccccaaaactggggcttcaggccagagcatccatggccaatttcaaattgtgaacccagagacactcccatccacccttctccatgctcatccccaaactggggcctggagcaaggcactctcaaatcttgaaccctggaccaaagcttttccagaccccaccctaccttccaacccaggtcaagacattgccaaatcttgaactcagaacccaagtgttccatgcccctgtgtggatggagtcgggtatcctgactgttggacccctggtccaggtgatcccgaccctcaccagtcccatttgcctccctccagctctgcttaggcattttgcccctcaccccaatgttccacaccatcgacaaccaaggggtgaggtggggacaggcctcagcagggaatggggcgtatatgttagtgttgctgcaacaataaagcctgttgcatctctcatgccaatttgagcctcctgggtaaagtccttgtacatttcaaaggacagaagtggcctacttttcaattctgctagactcttcctgaatatgtgggct

SEQ ID NO: 137255 - DNA, 2879 bp, Homo sapiens
tctcggattcctggcctcccacaggcaccccaaggtactggcagatgaagacgtcagagtacttcagagtcacacagagaggaggcctacagcttggaagtcatggatcttatagcttgagaagcttggtgctttgttttcattttaaaaattctgattgagtgcctcctgtgtgccatgccctagagcacttactgtgagcctggaactgccctaagcactttacgtttattaactcatttaatcctcacagtaactctatggggtaggaaggatcattatccccatctttaccgatgaggaaactgaggcccagtgcagttaagtgactcatccaaggtcacacaagcaataggttttaaaatcttggagccgtcttcccaatacccccttggcttgagcctcaagtgccatcttactttaagggtttttcttgatgatcccatctggacaaggcaggagttgccctaggtgagtcacagagccctaggattcctcacggaaatctccagggtgcatggactaggaccctggaggcagaaatagttaccgaggggaagttacaggcctgagtgtgagtccctgtttggttgctgatgagctttgaggtccttggccagacactcaaccactttgaacctcagtttcctcatctgtagatgagtgtaacagtctagaacactcctctcagggatcatatccacaagtgctcgtgctgtgcgaggatctcactggttgtttattgaaaggctaagcaagtaggttgaggtccctgggaagcaggggtggatcctgtgtcaccagggctgccccttaccctaaaccttggccccgacaacccacccacctgcccagcagtgctgatctgggacgatgcccgggagggcaaggactccaaggagaagctggtgctggagttcaccttcaccaagccagtgctttctgtgcgcatgcgccatgacaagtgagcctgaggaggaccggggtgggaggtaggaggtccccacagtaagtgagagggatagtcctccctgggcatcccgccaccccctcacggccatcctgtgttgtgtgatacccacaggatcgtgatcgtgctgaagaaccgcatctatgtgtactccttccccgacaatccccgaaagctgtttgagtttgatacccgggacaaccccaagggtgagagggctcagatacacaggtgtaagggcatgaaacagtggatggggcagaggggcagagatgaggaaagaaaggaaggggcactcacacacagagaaatggggaaagaggcagggagatgctcacactcatagcctctccatctttccagccctcagccagttctccccacctccggacctgccccacccctgggtaccccagtggcagagcaaaaacacctcgtgaggacatgggtgggtgtgtcagggatccctgagcttctggggctgtgatagcagcttactagattccacagctgcagagcaaggaatggaatctgcctagctggcggggcgtgcagctgagctgagccccctcagggttcttcgggttaagcttatcgtggagggttgaagtctggtcctcatccagctctgtccattctgagatgctgcctcctcttcagccgcccaccccaccccccatcttcacaccctagggctctgtgacctctgccccagcctggagaagcaactgctagtgttcccgggacacaagtgtgggagtctgcaacttgtggtgagccgtccagtggacaagggtgggtaggttggtggactggcttccttgtggactcttggccccttccctccataccaccccaacctcagactcctccctcctaccccaggacctggcgagcacaaagcctggcacctcgtctgctccattcacgatcaatgcacatcagagtgacatagcctgtgtgtctctaaaccagccaggcactgtagtggcctcagcctcccagaagggtacccttattcgcctctttgacacacaatccaaggagaaactggtggagctgcgccgaggcactgaccctgccaccctctactggtgagcacagggtatgcatggtgggctggtgaccccataccacatgacatgtgggcatcactgctgatctgtcttctagcattaacttcagccacgactcctccttcctctgcgcttccagtgataagggtactgtccatatctttgctctcaaggatacccgcctcaaccgccgctccgcgtgagtaccccctccccaccctaccgtgtccctgtccccctgcccatttaccatacctgggcttagccagtgctgcctgcaggctggctcgcgtgggcaaggtggggcctatgattgggcagtacgtggactctcagtggagcctggcgagcttcactgtgcctgctgagtcagcttgcatctgcgccttcggtcgcaatacttccaagaacgtcaactctgtcattggtgagtgggaacagccccttggttgggggtactgcatggggcaaaggcctgcaggttggacctgaaaggattttagggccatgtgaggctcagcttcatcatcagtaagggggacagcactgggcaaaggcctggaggcagaccctaggtcctgagatgcctgagaggactggagcctgtggctgtggcagcctctgaccttttaccaccccccctcccccagccatctgcgtagatgggaccttccacaaatatgtcttcactcctgatggaaactgcaacagagaggctttcgacgtgtaccttgacatctgtgatgatgatgacttttaaggaccctgggggctgtgctagggacctgcagtggcagaactgcagagctgagccttggcagtggggcgtgctt

SEQ ID NO: 137256 - DNA, 2266 bp, Homo sapiens
actgcactccagcctgggagacagagcgagactctgtctcagaaaacaaaactaaacaaaacacaaaagacaaaactcagagctggcggggttggggggacagggtggggagaaagaaagcgaaatctgttccttggcttctcggagccaaggaggtttctccactttcaaggtctccaggtccgcccccgcctgtaacccccagcgccgcccctctggaagcctgggaggactgtgtgttgcgaaccggtgcggctactctcggccgccgcggaggtccgcgtcttgttagcagggaaggtttactcccccattgtgggtgaccaaggggctgagggcttggccggtttcgctttgctgggggcaaggcacgctctctctccccacccttccgggttccctcagacagtctcggccttgaggaacccccttcgcctccggtcccccagccaaccttcctccgctccccgcgccctccccggagaaccccactgtcactcgcgatgctccgaagacccgggaactaggcgaggaaggcggtggccgcctttttccagctggggtgagtcatttcctgcgacaggctccctcccccggaagtagggcctgatgtaaacacccgagccgggctccaaggcccgggaggtcagaaaaccgggccgcgggcggcaccgacagctggggcccgggtcagggacacgcggaggtcaggccggtgaaggcggcaggaagctggagcacgatcccagggttggttgggtctgggggaggctggaagtctttcgagtaggggtctaaggcagaggtcttgagtgggtgctggcgttggaaggagcatgcggctggtcttgggagaggggcgaggcatcccggacagagtcttggaatggaggtgcaaaaaaggggtgttgaaagttggagctgtccagagaataactctaaggcagagctgtccaaagaaagagcatgaggcattccagtggagggtgtaactgaaagaaaggaaggagatttggactcttggaggatgggggagggagtatgtctggccagagttattggggagttgaggatttgaagggaagttgggggctctatggcagtaatcttagtaggggactgcgcaggcatcttaggggttgaggttctcctaggtaggagttttgggtggtttgttttgggcaagggtcttagaaggcaagggtgccctggggcggggtcttggataggggtctagagggggaatcttaggaggatggggggggttcctggggttgggtccaggccaggttatgttgtagtcaaggacagcagaacacaaggaaggagatgtcccaggggtggaaaatttagagtgctagggggaatcctagggtagagtccccagggcataagccaatctaagggaatgtctaggctggccctgaagggtagttaccaaggcatgagaaggggtcatcccaaggtaggcatcctgaaggagtttggggaagccggttgagggggaaaggtgtgagaggactctggggtggtcaaataggttggggtacagttagaagggtatgagcagaggagttcctggggatggcagaccaagcatagcagtcccagggccaagtcagggaggtacaagaagtgcatctcctagcccacttttgtctatttattgagagagtccggtgctaggtcaggtttgaagatgagaaatgggttgggagtggttccaggccatgtctggcattgggatcaagattggctggcggtggggaggagatatcacgggggcaccccctatcacattacttcctgacaagtcagtgagggccagcatgtaaagaggaggtgtggggtccacgtcagtgtgggcctggagcttgccaaacctgaaagaaggagggttcctggccatgttgtttgggatcttgggagcttagagcagagaccctgggactctctgtttttatctttttcttccccccgagacggagtctcgctctgtcacccaggctggaatgcaatggctcgatttcggctcactgccatctcagcctctcgggttcaagcaattctcctgcctcagcctcctgagtagctgggattataggtgccccccaccacacccggctaacttttgtatttttattagagacgggatttcaccatgttagccaggctgatctcaaactcctgacctcaggtgatccacccgccttggcctcccaaagtgctgggattacaggcataagccaccacgcctggcctgttt

SEQ ID NO: 137257 - DNA, 2253 bp, Homo sapiens
gaggaagcggaaacaccttccagaccggtgggactctgagcatgcgggaggggtcaagaaggcagggctgtgggtaggctcgagcagccagggaaggcttccaaggcaaggcgggctcatagaaggaacggggaactgcattgtgggtgggtttcatagcataggcaaagggagggcaactggaaagtgcatctgatgaagagctaagcctggtgctggcaccttctccacagacaggatgggcctgcagccaagagtgagaaagcagcccccagaagtcagcactggttgcacagggacctgcgtgtgcggtttgtggacaacatgtacaaaggaggccaatattacaacaccaaggtgggaaccctgcagcctgagtccccctccctctcctagggactgggcccccctacctctctaaaatctcacatccccctgacctgtatccccagatgataattgaagatgtcctaagcccagatacctgtgtatgtcggacagatgaaggccgagtcctggaaggtgagtttgagcgatggcagctggaggttgatcaagaagagtgttttaggcccagagcctggcccaggcaaagctgggaggtttggcagagttcaggtattttgcaaggcctagcatcctcttacagaacattagacacttccatgatggtggttggttatcttgagccccactctcccagtctgtcaagttttctttttttttttttttttttttttgaaacagagtcactctgtcacccaggctggagtgcagtgactcaatcttggctcactgcaacctccgcctcccgggttcaagctattcttctgcctcagcctcctgagtagctggaactacaggtgcccgctaccacacccagctaattttggtatttttaatagagacaggttttcaccatattggccaagctggtcttgaaccccttacctcgtgatcctcctgcctcagcctcccaaagtgctgggattacaggcgtgagccaccgcacctgaccaggagttctttcaggttggcttctgtatcttatgacatgctgagattgggtctcattttatcacctatgctggagtgcagtggcaccatcatggatcactgccacctcaaattcctggtttcaagccatcctctcacctcagcctcctgagtagctgggactgcaggcactgaccaccatgcctggctaattttaaaattttttgtaggctgggcgcggtggctcatgcctgtaatcccagcactttgggagaccgaggagggtggatcacctgaggtcaggagtttgagaccagcctgaccaacatgtcaaaaccccatctctactaaacatacaaaattagccaaacgcagtagtgggtgcctgtaatcccagctactcaggaggctgaggcaggagaatcgtttgaacccaggaggcggaggttgcagtgagccaagaccacaccattgcactccagcctgggcaacaagagccaaactcagtctcaaaaaacaaaacaaaaaaatctgtagagatgaggtctgaccatcttgcccaggttggtctcgaactcctgggctcaagcgatcctcccaacttagcctcccaaagtgctgggactacaggtgtgagccaccacgcctggccaggaaaggcccttctgacaggacgctggttgggctggtccttgctgtgggcctcactcccctctcccttatccataggcctgagggaagacatgctggagaccctggttcccaaggcagagggtgaccgtgtgatggtggtgctgggcccacagactggaagggtgagtctcagacctggcagtagaggtttgtgggtcgttcagggcctgtcccaggatctaggcttgccttgctgattccacttcacctctgttccaggtgggacatttgctgagccgggacagagcacggagccgggctttggtgcaactgccaagagaaaatcaggtggtggagcttcactacgatgccatctgccagtacatgggccctagtgacacagatgatgactgacccatgggactcctcccatcccccaggctggtaccagttctgtaccatatgagaaagttgccttcagaaggtgggaagatcattgttccatcctctacttctggtgcagtcctgggacaaggacaagggaaagggatgggtgaaccagtagggaagctagaaacaaacccaatatttaccaaaatttagggtataataaaaaccatttca

SEQ ID NO: 137258 - DNA, 3803 bp, Homo sapiens
ccgcgcctggcccttttttttttttgtaacgcggcagctccaaaccccgctgagagtatatgcatgggaaaactttctgaaatcaaaaatattccgaattctggcaacatactgggccccaagtctttcggatttaactctgcctcggccgttttattcagttaaggaaactgagtcactccatcccaaagccagattcccgcggttctaagctgaagctgtctcgggtgcatttgcattccaaaaaggcgaagggtcccgctattactgctcctggtacctggagctgccaagcacccctgcgatggggcgccccgggggctgtgcgccaggctgggagtatccttggggggcggggcgagggggcttccggggcggcagcacctggcccggctccggccccgcccgcgtcagctctgcgcggtgattcactccctccttcgccccggggcccccttcccggccagacggcgggcaagacagctgggtgtacagcgtcctcgaaaccacgagcaagtgagcagatcctccgaggcaccagggactccagcccatgccatggcggattctgagcgcctctcggctcctggctgctgggccgcctgcaccaacttctcgcgcactcgaaagggaatcctcctgtttgctgagattgtgagcgttctggggcaggcgcgtgggcaaaagcgggatggggtggctggaccatgcggaactggatggtccgggtgaggcaggcacttggccggggcgctcggcagtggggtgcaggtgggtgggttcacggtggaggcccgaaacccggggcgcagggcgagtcggtggggtttgacgaaggttgttgagatctggtggtccccggggtgaagcaaggagcctataacgcatacggagggctacgtggggacagcctgcgtgaactcatcagtggacgcatcgaaggggtcccagggtgctgggaagtgggggcctcctgtggcagggcgtggcgcggcctgggcacaggagggcgggctggcagcgcgcccaggggcagggcctgttggggtggggcccccccgccccgcgctagtcccgcggtgtagagcgccccgcccttcgccagttcttcctcgcccttcagaggccgggcgggatgtccttagcttttcggggtttccacccttctcaaagtgggcgccgcctttgagtcacttgtaaaaggggtgcggcgcctttaacggagtcctgcctctctggtgtcactctcaccgcttcccaaaggggttgctgggggaaccgcgtgttccgccccggtcaaggccacaaagctggcgtcagcggggctcacaaaacacctggcagcgccactcccctcaggctgcccgtaacctagaagggaaaagaggaaactgaggcacccaactctactccttacttgttgggtgaccctggccaagccattaaacctctctgtgcctcagttttctcgtctataaattagaaagagtaataatagtacccagagcattagattgtcgtgatgattgaatttggaacacagtgagcacataaaaagtgtttagctattattgtatgtcatttccccagccctcgtaggcatcttagtatgggacccccaatttaaaccaatcttctcagccctggttgctgattgaggtcccctttcccatgtcacccttccagatattatgcctggtgatcctgatctgcttcagtgcctccacaccaggctactcctccctgtcggtgattgagatgatccttgctgctattttctttgttgtctacatgtgtgacctgcacaccaagataccattcatcaactggccctggagtgtgagaaggggtccacaatggcaagaccagggaggggtctgggcagttaggattgtcggggaactgtggttgctgacttccctcttctcctccctacacctcacaggatttcttccgaaccctcatagcggcaatcctctacctgatcacctccattgttgtccttgttgagagaggaaaccactccaaaatcgtcgcaggggtaaaggccatgggagcagctctgaagcacagagcgaagggtttgaggagccagggaccatttctgcctttgcttctggcagaaatcgtgtgacccacagcaagtcacacttgtcctcagacatggaggaaagtctggcccaggacttggttttgcctcccaaggtcttcatttgctgtgaagggaagtcccttgtcagacacaaggaccttggtgagaggtacaaacaggcggcccctttgtcaacgcactagactaccatctgcaagaactttgtcccaaatgtagtagaaattggggccgggcgcagtggctcatgcctgtattcccagcactttgggaggctgaggccgaggcaggcagatcacttgaggtcaggagttcaagaccagcctggccaacatggcgaaaccccatctccactaaaaatacaaaaatcagccgggcatggtggtgggcgcctatagtcccagctactcaggaggctgaggcaggagaatcacttgaacccagaagacaaaggttgcagtgagccaagatcatgccactcactccagccccagtgacagatgggtgacagagtgatactgtgtctcaaaaaaaaaaaaagtatgacttgaattgtgccccctacgggtagggccacagtgtggcctccctgtgttgagaggtataggaggagggagagtggggtaggatgcactctcttggcctttccctggcttaccaacccggtgcttgagtcccatcctgcgtggggcaggtgctggaggtggtggatacaagaagataagagactgagtaacctgaccagctaatctaaaccccctcactcctatcctgtcccccaggtactgggcctaatcgctacgtgcctctttggctatgatgcctatgtcaccttccccgttcggcagccaagacatacagcagcccccactggtaagtgtgtgtgtgtgtgttggttgggggtaagggggttgctgagagggcagagggaaaaaggaaagggatctcttaaaggcacgaatgccaactctggtctcgtattggtacttagggcttttgtaccaataggtaccataagcttcggtattcttgtgtgtaaaatgttcatggactttggatcttgttttaaaaaatgggcatatagattcagccaatgctttctctcttttcctcacctgcagaccccgcagatggcccggtgtaggcgaacttccctcatttctctctgcaatctgcaaataactcctccattgaaataactcctccccaccccaacaacaacattcccagcagaccaactcccaccccctctttgaggtaaaagtgcctttattgggagacttttgtcttccagcctgccaatcaaccctcctgggtgtggccaccatatgtgtgtgcctaggtcctccttctgcacgatccaataggagacaccagttctgactgaaccatgcccccacctaagtcacaaaatgagggaagtggggagttagatttcagagtccaggccctaggttgggacccactccaaataatctcctcggtgtgggtggtggttctatagagggataaatgaataataaacattgttaaaatatacgataatgaataaagtaatcctttcatcaaatgtgggtaaatttcaagcatcaggagggggaaatggagtggaaacagctggggcaaggaggcaaagaagccaggcctgttttacaacaaatattaaattacttcaataatacaaacgagaggc

SEQ ID NO: 137259 - DNA, 1082 bp, Homo sapiens
tcttgagcaaggcaagaagtgggattcaggaatgggccaagccagggttccagacagggtggggcttagaatggggcttccatggtggtttcagaaagggcagcccctccccatggtgcagtgaagaaaatgttttacaatggctgggtttgggcagtggagaggggacttggataggagcttccagatgggttttgttaggggtgggggagaatggctctggctacgacttgggacggaagtggcctgagaagagtcgagtgatatggcttgtagggtgaggcgtgggatccagagagaagcaccccaccacacacacccttccccactcccgtgatgaaacagctaggttaataggaggacagaaccaacgggtctgtgggactggcccacccctcttcccccttcccctgcgccctccctccctccacacctccacccgtcctggggtggttggaggcctggtctggagcccctatcctgcaccctctgctatgtctgtgatgtcagtagtgcctgtgatcgtgtgttgccattttgtctggctgtggcccctccttctcccctccagacccctaccctttcccaaacccttcggtattgttcaaagaacccccctccccaaggaagaacaaatatgattctcctctcccaaataaactccttaaccacctagtctacccggctctgatttctcagtgtgtctttttcgggcgccggggaggaggttggccgggggagaaaggagggagaggtggtgagaacaagctccacccggacccaccgaccgcagttcagcttgctgcaccatttcaggccccttcaaaagtgttaggcagagcagcatcctctgggaagcctctcctgccaatcactctgtcactctctgagtagccctgctcaccctcccactactggccaccaaatgcccggtctttctaggagttggttctaattctggtcccttagccaagcctcttccgagcccctgtggaaccctctcctcaaatccccaaggggtccgaataggaggaaacctcacattgcctgaccccatccctaatcttcagaccctactgtct

SEQ ID NO: 137260 - DNA, 1055 bp, Homo sapiens
aaaacagatgcaaagagaaacagacgcagggagagaggcaggaaaacagggtgagggagagagagacacagagagaaagagacactcagaaaaaagagaaaccaacacacagaggcaagagggagacagagagagaaccatccggagaccgagtgagagacaggacagagagacagagacaaacagaccaagaaacagaaagacacagacatacaggcatacacttacacagacagagaaaaaagagacaaaaagagacatcgacagatcagataggcagaggcagagaggatcagagacacagagagacaaagagacatctgagaaagacaaagacacatagagaaacagagataccgagagaaacagagacacagtgagatacacagagaacaacagagacaaacagagaagagggaggtcagcatggaaaggcagagacagagagagacacagagagagaaacaggaagagacagccatacccttgtaatcagcttgtccttggtcccgatgagccctgattagggggtgggggtggggactgctccatctgctgctgcctgtgctgggcccccgatctgtccagaggagggcacctccctcccacatgcacacaggttcactgtggccatccccatccctgctgcccaaggtcttcgccatcttcgcctttgccacatgcggcagctacagtggggagctccagctgagcgtggattgtgccaacaagaccgagagtgacctcagcatcgaggtcgagttcgagtaccccttcaggtgtgctcccaccctgggataccaacagacctgggagaggaaggggcagggtggaaccggccaatacctccccccgcaagtagctcctgcccagctcccacctcgaggctacatccactgggatcactgagcacctgccttgtacctggcactgctctggactctaggactatgtggtgagcaaggcagacataggctgtggccctctggctctgttccagcgaaggggtaagggacaggcaataaacaagatacaaaagtaagacaggtgtatat

SEQ ID NO: 137261 - DNA, 1046 bp, Homo sapiens
ctctggagtggggctgactcccactttggatgagacctgtcccgtgtttcaaccagttcagtttgccccgagagaaacccagagccggtgcctggcacatagtaaatgcctgataagccttcagtgagcgaatgtaaccccaaaggctgggtgaagagtaaagctggggcaagaagcagagaggacctctgggatctgtgtgggataagagtaggttactgttaggtggtctcaggaaagccaggtgggccctgagtgggttccccagggctgggagccctgacctttgctgtcacctatgttgtctactgatggatttaggttttcttttctttctcaggcagaaagtgggagatgggagacagagcgatctcaatttagccaccctaaaattcctgttgccgtcagaggacccctctgcctaagatgcatcacataccaggccgattccaacctccaggcctctcccctggcaggattcttctctgggtttccttgtcctttccttctcatccgtctacccttcctagtttgacctggctgagccctggtgaaatctctgcctctcttcctctctgggtccaagcacccctcacacccgctctctcccctttcctccatctctgtccagtgccctccccctcccccctcctccactctgcctccagctttttttggctgctgtctcttcctcctcctcctcctcctccctccttccctgacgctgaataatcaggcctggctgtcctggtttctggaaatacccgtgtgtgggcagtggctcagggctagaacaggggatggatggatgggggcccctgggcagccccagacccccagtgcaaagacaacaaaatccagggatgtggtccatgcctgcctcctgctggggaggggagggcaggaggtttattgagcagttggggaggggtgggaattcagagggcgtggacgcaggccatctcgtctcccaagtcctcctcatcgaagcgggagaggatggactcctcgtcgctatagagagagctggttccctgtgccagcag

SEQ ID NO: 137262 - DNA, 1050 bp, Homo sapiens
gcccaaatgaacaaggtgagatatgatggagcagatatagggggtgatggtggggtcattacacaggggacaatgggaaagtttatatggtagtggattaggattaggaaaaagtgggtaatgggaatggaagggagaggagagagtaaaggaggtgatggatcagagacattggagccaatagaggaaatgatggaaccagtggtgtcatagagatgatggagatgagagaaccgatggagaagccaatggagaagccagtgatggagatagggaaccagcagcgttgtcagttgaggtgacagaaccatgtagtacccaatggaggtgatggagccaatgatatagtcaatggtgatgacagagccatgaaagagccagtgtcagagatgatgaagttggtggagaaatgaagccaatgaagtcatcagaaaagatggagccaaagcaggagccagtgaacatgacggagccaatggatgggggatgtagaggcaatgaaagagataacagaaataacaggagaggcatttcaggagatggtggagccagtagataggttacaaaatggaatgagaaagccagtagagggggacttttgctgaacccaacagggactcagaagagatagagctagaatgaggactgagtctccaggagtagggaggatgtgcgtgggagccacccacccacgtgaaagggaaccccgggatagaggtgagggaaggtgtatagggcgagagtggattagtggaaaggccagttctcacattgacttcagtgacggcaatatccactatgctgcccaccacaataagagcgtcaaacgtgttccaggcatcagtgaagtaatgctgcaagtaggagaaaagcagtgccctgtcttctcaaagctcgcaagccagggtagggggccagtagtagtagggggcgccggaggggggcagggcttcgcttggatcacacgatgggcctgcacctgagtccctctcactccctagactcacactccctggctgctgcccgcatcgccaaccccagagctctgca

SEQ ID NO: 137263 - DNA, 1059 bp, Homo sapiens
tgaggtcaggagttcgagaccagcctggccaacatggtgaaaccctgtctctttcaaaaataacaaaaattagccgagtgtggtggcgcatgcctgtaaatcccagctacttgggaggctgaggcaggagaatctcttggacccaggaggcagaggttgcagtgagccgagatggcacaactgcactccagcctgggcgacagagtgagactctatctcaaaataaaacaacaacaacaaaaaaacagatatgcacacatagacaggtagtggtgggagtgggaggtgtagacagtgcccaggcatctaactcaccaggccttcattctcctgtgggagatccttctcattgctcttctccctgtgcgaggaaataggggtgattgctgcagatgggctaagggggatcactacagtcagaacagacctttcttgggtcccatagaactttcttgcttccgctcttccccactgcccctcccaacagtccgttctcaaagcagccagagggagcctgttaaaccctgtctgggatatcccaactctgcccacaaccctcccatgtctccttaattcaggaaaaactacagtcctcaccctggcccagaatgccctcaatctggccctccatttcctccactgaccttcactccataccactctcctccttcctcactccattccagcctcactgtttttatttttttgagacggagtctcactctattgctcaggctagagggcagtggtgcgatattggctcactgcaacctccgcctcctgggttcaagcgagcttgtccagctaattttcttttgtatttttagtagagacagggtttcaccatattggccaggctggcctcgaactcctaagctcaggtgatccaccctcctcggcctcccaaagtgctgggattacaggcgtgagccactgctcccgggcatcgctggtattttttgaaagtgctaagaatgtggtcaggtgcggtggctcacgcctgtaatctcagcactttgggaggctgaggcgggtggatcacctgaggttaggagttca

SEQ ID NO: 137264 - DNA, 3755 bp, Homo sapiens
gtctcgctctgtcacccaggctggagtacagtggtacgatctcagctcactgcaacctctgcctcctgggttcaagtgattctcctgcctcagcctcccacatagctaggactacaggcatgcaccaccacgcccagctaatttttgtatttttagtagagacagggtttcaccatgttggccaggatggtctcgatctcttgacctcatgatccatctgcctcggcctcccaaagtgttgtgattacaggcgtgagccaccacgcctggctgtctgtttttgtttttatatctgtagtaattttcaaacataaatgtagagagaatattctagtgaatcctatgtaccattttgccaacttttcttcatcttttctctcccaactttttctttgttgctgtattattttaaagcaaatctcagacatcatgtcatttcagctctaaatacttaggactacatctcttaactcataaggacattcagttttcaaggtaaccactggaccattttcatggctaatgaagttaacaataatatcttgtgggtttttttttgttttgttttgttttgttttttgtttttttttgttttgtttttgagacggagtctctctctgttgcccaggctggagtgcaatggcgtgatgtcgcttcactgcaacctccacttcctgggttcaagccattctcctgcctcagcccccaagtagctggaattacaggagcacactaagttttgtatttttagtagagtcggggttttaccatgttggccaggctggtcttgatctcctgacctcaggtgatctacctaccttggcctttcaaagggctaggattataggcatgagccactgtacccggccaacaatgatatcttaataccatccaatacttgagttcataatcagattttcccattatcttgaaactctgttgtccctctcttgcctctctctctctgcctctttctgtgcttggtacctttgattccctgtctctgccctgtcccccgatatcctgtctatgcttctcttggatttgggggctctaggcccacccccctctcttcccacatccttctccagcatggggatctagtgggtggagagaagtatgtctgtgagcaagaggagacccctgtcctcgaggagatcccaggctggtggagcaggagagtagagcagggcctgccttagtgggaaggctggagggtgggggtgacttgtctgtatactcttgtcagggggtccttggaggaggcagggccttgggtgctaggtgggcccctacaccttcctgcttcccccgccttttctccccaggaggacacacgggctcagcggcagcggctgcagaagcaactgactgagcatctgcgccaaagctggggcctgcttggggcccccatacaagcccgggacctgggagaactgctgcaggcctggggtgctggggccaagactggtgctcctaagggctcccgcttcacgcactcagagaagttcaccttccatctggtgggtgcgcctgaggacatgagatgtgtggatgggcgtggcaggcttggagggtggctttttgtgtcagcaccacacctttatccacacaggttcctgtgttcccactggacaggccctcgccccactgtgggatgggtacccagaggggtcccctagcttattagggacttgactggagaaaatgtggataggtgggaaccatgcaaaggtgtgggggtgttcttggggcaacaccccctttcctcaggcagtttcctttgagcatatcttctgtcctaagatgttcactctgagggccccccatccttctcatgggcatttgaggcttgagagatggggcaggtgggtaggagctgtgacagggtcagggagatttctccacgagcaagcactctggcccgaggttgcagatggtgcctttacccacatagtcacagtctggccaccatcggtgcttcagtgggcatgcatgccgcactgggggcagttctcaggggaggctgaggctgggccacgtgaggaagggccttccctggcagccaggatgcccctcgtcactccccttaggagccccaggcccaggccactcaggtgtcagatgtgccagccacctcccggcggcctgaacaggtgagcagagtggtttggaggggggtgtcccaggcccttgcttgtctactgggcctgacaccccaaccctgactggcctgggcctcccaggtcacgtgggcagctcaggaacaggagctcgagtcccttcgggagcagctggaaggagtgaaccgcagcattgaggaggttgaggccgacatgaagaccctgggcgtcagctttgtgcaggtaaggggcggaggaggggctgcgcgttgggctaggtcagaaggagggcctcggggtgtgagggactagatggggcaagaggtgctctgtagaggtctgcacatggcagaagggttcctgggagccattagggatctgtgggcctcttgagggtggctatgagaatcaggccagggtgagggtctgtgggcatctatggggcaccgcgggtctgcatgggcaggggattgaggggtcctcggagggtctgtgggcatctgtggggtacccacgggtctgcatggacaggggattagggggtcctcggggtccttggcaccagcgtggagctgttagagaggcctgtgggggccacaggggtgtacagtcatctgtggagctccatgggggctgtggcatgtgactgggtatccaccggccaggcagagtctgagtgccggcacagcaagctcagtacagcagagcgtgagcaggccctgcgcctgaagagccgcgcggtggagctgctgcccgatgggactgccaaccttgccaagctgcaggtggggttggggctgtagctgggcggagaggggcagggtggggtggggtggggttggagggcccagcctgtgtgacatgtacccatcccccaccagcttgtggtggagaatagtgcccagcgggtcatccacttggcgggtcagtgggagaagcaccgggtcccactcctcgctgagtaccgccacctccgaaagctgcaggattgcagagaggtaagcagtggggccctgggctgtgggcgggccagggcaggctcggtccctctctagggggccatccctatgctctgctcactgtcttctgcctgtgggctcatggcagctggaatcttctcgacggctggcagagatccaagaactgcaccagagtgtccgggcggctgctgaagaggcccgcaggaaggaggaggtctataagcagctggtaaggcctgtgtgagggacctgggtagcttaggagggtggggggatggtcctggggcagtgcctgctatatccctgcctagatgtcagagctggagactctgcccagagatgtgtcccggctggcctacacccagcgcatcctggagatcgtgggcaacatccggaagcagaaggaagagatcaccaaggtacactgccagggccatggagggtgggtcatgtgggctgtcaggcatagtgtggccgcacagggacctcacaccctcaggcagagctgtccagtcacactctaacacagaatagtcacacacaatccatcccagtcacccctgacacagtgacacagtccctgtctggtacacatgaggaccctccactgctagccagcctgccccaggcaggggctcatggctgccatggt

SEQ ID NO: 137265 - DNA, 1080 bp, Homo sapiens
actgcagccagctcatccagaccatcgaggacacaggcaccatcatgcgggaggttcgagacctcgaggagcaggtgaggcctgggggcaggatggggagccaaggcgggccggggggacagttcctcaggttatgctgacagaggctgtggagccacacacagccgatggctggacacccagccctgccccttagtgcctgtgacctgggacaggcaagtggcctactgtgagccccagcttccaccccaagggccctcctgtctgcctcccagggccatgggcagaggcttcagcttaaagatgtagggggaatcctgccacatggcgaaggatgctttgggtagagggaacaccacacgaggcctggccatgggacagagcaggctgttggagttggtgggaggggcccagagtggctgtgatgggggctggtgagcaggagctgggaaaggggctgtgtgtgctgagggggcatgtgttcacattgcctcagatcgagacagagctgggcaagaagaccctcagcaacctggagaagatccgggaggactaccgagccctccgccaggagaacgctggcctcctaggccgggtccgggaggcctgaggagccgccggcagaggtctctccccagcctcaggcagggatttggggtgctggaggcagtggccaagcacatgccctagctacttcctccgctgtccagttcctcctgctgcggccttggacccagacccctgcccactgaccgcaacccttatatggggtgatagtccagcatgtggggagctcggctgcagtttattggggacggtactgtgggttgggggccttggatcccaaataaatgagtagttcctctgcagtctaagctgaggcatggatcagggctcagggaatgggagtgaggtgagtggcaggggagacacggggtatttttggcaaggcagtgtgtgtggctgtgtgtgtctgcacgggactcaagagacccactggggggctgtgcgtgtgcatatgcgtgagatacacaggtgaattctaacaggccgtgtgtgtgagcgagcacgtgttgggac

SEQ ID NO: 137266 - DNA, 1031 bp, Homo sapiens
caggtctgggcatgtttggagctggggacaggggcccctagctctcaggacctgaatgtgaggttaggttccctgcaccgtgcagacctcctccctgccccccagcagtctgagtctgccaccaccagtcctggggtcgctcaccacagatgaagccttggtcagtgccattttcccagccaggtgggcctgcatggcactcagcttctccttctccagcaccagctgtgaaatggcacaaacatgaggcctcagcctggcccttctctgccacatctttgcccaggctacggtcttccctgggagtgcccgctcctcttccttcctttataccagccctcgtcccaggtgaacttggtttctggcacatggtggacagaaggttttgcgcactatccctatcccttaccctccaccgccctggcattacctgctgctccagagactgtaccatctctctctggaggagacattgtgccctgcccttctcatccagaagatggtccgcctggcagtgcctaagtagggagaagattccatgcaggtgaccacgacaggcctggtctggctcaatgctctgaatggggagggcccagaccctctgggagttctctcctctgagccccagctcccctcccctctctacctcagtctccctctcacacccctcgttcccttaacacatgcccctcagcacctactgcatgtcaggcctgaactcaccacttgagcctggccagagtgctggagataatgttggaagtgtggtgagttgagaatgggccagggaggtgagagtgggcaaagcattctgggtggagggacggcctgtgcaaaggcctggctgcaaggaggacaggacatgtggggttgctgctaagggttgtgtgtagtgtggtgtgtatttgtgtgtgtgtgtgtgtgagagagagagaaagagagagagagagagagagagagagagagagagagagagagagagagagacatatggggggactgaggggaggcagcagcagccatctagagga

SEQ ID NO: 137267 - DNA, 1082 bp, Homo sapiens
caggggtccgggcgtgggcatccaccgttgagagctggggggcacatgtgggctgtggttcagcctgactcggggcccctccccacagttctcccacctgctccctcctccctgcccattcaccgtccatacctggtgcatgaaatgtggcctgtcctggaggagtgcctgtaagtggggcaaggggcccagccgtgccccggagggtgccaccatgactaggggcagtgtgggcagctgggcagaaaggcaggtgggtgagaggccatcctgatcctcactgttctgtgtctaattcaaatactctgcactgcaagcccacatggtagatgctatgatcatcccccttttacacgtatggaaactgaggctcatggagatcgagtaactttttaaagatcaaacagctaataagttgcagagctggcctcagccctgtcacctcacctacttggccccagtcctcttctcttgtcacatggggatggggacacatagctatgctcatgggactacaatacggcctcctcctctcctgagacagggattgggaggtcggggagagcctccaatctctgaggcctggcaggtggggattttcttggccctgcaacatctgcataagtcacagacttgcctgggacccagaaaccacttcctgtgccccagccagcccccctcccgcccagtgccacagtaaaggtcggcacctgtaggtccaggtaccccaccctgcctgccccatcctgggcccagggcctcacctgcagctgcgatggtggcatggggttcaaggaagaagaggaggcatgggccccgcctcgaagatctcggccctggaaggttccccctgggccccgggcccccagcaggtctgaggctttgggtgcagccctccagctgggcgaggctcctggggatgggccaagggccaaggaaggggccgagggcttgccaggcctggggttgggcatcgggtccttgtccaagggcaggctgcgtagacaataggggaaaggagtcacacgtgtgctagggcggtatgagatactcgaccacctgagccacgtggacactcctct

SEQ ID NO: 137268 - DNA, 2326 bp, Homo sapiens
tgctggcacagaatgggctggtggcagtggagaaggcgagaagtgggtagattctgagacttaatctgaagctggatcaggagcagtgctagcagcttggatgtagtgggcaagagggagagtcaaagtgacatgggttttagcttgagcagctggaaggaccgagctgacattacctgagatgggggacatggcggggagttggattgggtgcaaaagtgcaggtgtagatagacatgaagagtctggcattaaatatgtgagtggaggagctgagggggcagctgaatacgggggtctggatctcagggcaaggaggcgagtccaggagtgtgatcatgcacggatccagcatggcaagtgacagagaggaggagagatggggtctcttgagctggggcctgtagaagcttctctacccagcccccatcagagttcaccccaatttctggccctcaagcctggctcatgctacaccccctgcctcaaatgcccactccttctcctctttccctgtccaagccacgcaagacctgctcttctattgtcctcaccttgaaagccctccacaatggctccgggccccctgctgagccccagaaccttccactccctgagggaagcactggcttttcaggatcctataatcctggtctgagaggaagccagagctggaagggactgcccagccaaccccattatacagaaggggatgctcagatgccgagttccgtagtcccatagtgacttgagaactccacttctttctttaggaagtgtttccgtgtgcacattttataaactctctggtgtgtgtgtgtgtgtgtctccatctccccgttccacctcacagcactgagttgggcacacagctgctgagagcagcccgggggagtatagaagggttctgggggagcagttgctccttcctttctttgctgtcacctcctgggggtggttgtcagagctgtggtgctgagggagatgagtgtgagaatccaggtattaagttcttagtctcctgggggcttagaacattactgcgtgagaaacaggagtgtgggtctgtggaggctccgaacaagggcctgggagagcactggtgagatgagaaggtgagtgaatgaatgaagccagagatggggtgatgctccttcaagccaagaaataacaaagattgccagcaaccaccagaagctgggggagaggcctggagcagcttctcccttatggcccccagaaggaaccaaccctggcaacaccttgatcttggactctggcctccagaactgtgagatgatcaatttctgttgctgaagccactcagttgtggtactttgttatagcagccagaacaaactaataccgatttcggtgcaaatggatgttttccaccactctggcctggcccatgtggctggcctgtggtcacttctgaagctgcctggacacttggccagagctaagaattctccccaaacacatgtgggatggcctgactcagcaaagcatagatacattctcagacagggacatggagatgatctgtctgggggtagaggacctagagggccgggctgggcagccggcttcctgcactgtctgttgggacgtccctttctgactgggtttctcagaagctgaatgggggatgtttctgggacacagattatgttttcatatcggggtctgcatctgggccctgttgtcacagcccccgacttgcccagatttttccgccattgacgtcatggcggccggatgcgccgggcttcatcgacaccacggaggaagagaagagggcagataccccaccccacaggtttcgttccgagaactggctgccctgtcctgcagcaggcttggcccaggtggggtgacatgggtgctggtggatgtggtaggtgatgtccatctggccactatgacaagcccctagctctgaagacctggcccttcttgggttgtggagaggacccaggtttgaagctctgagagtgccaggcaggctccacagatactgggacccctggggtcttcaaatagtataacaccaggacctcagaatcatagaacagcatttcttagatttaaaggatcctagaatctcaaaaccacagactgtggggtctacggtcccaaagtctcagtatgtgtaggccagtgtccctggtgtccaaactccttggaaccatctgaaagtcaggcagcttgctgcttcatagggcctcttgcctaccaggcctggaaacagagccagcctccctagggcctcagtctccctgtccactctggaacaacgttcccaaatacatggccactccgc

SEQ ID NO: 137269 - DNA, 1178 bp, Homo sapiens
tgctgaggggtaaactgaggccttcagttggggagagagccagaaccagggtcccacctagagtcctgagatctaggcttggatttcaactctgccgctgcatttcggtgaggccctgagatctctggtcttcaatttgcccttctacactgagcacggagaggcgtggagtagacaagggccagggcccttctacgctgtctggttaagtcattaggtgtctgcagggcttcaagttgacaattgcccctctatccaggggactggctgagagatagggatacatagagacaaagagacacacacaaagagcgagcaagagagaacaagagatagtgagagacattgagagaaatggacacatgcatggagagccagagtgcatgtgtgcgagaggaggattgcctcaaataagaacatttgctggtctctggctggttcaactgatgctgcctgaaataatcaagaataaagaagggcaaggtgccagggacacccatggctgggtattgaattgtattgcaaagcaacaatcagcaaaacagtgtggccctggtataagaacagatactggggaagagaacagaatagaaagcttggacatggacccacatatggagagaactgaatttgtgatgaatgtggcatttcaaactggaggaccatggagtatggtttaacaaatgtgtctgagataattagggagaagataaagttattgagtgaatagtcagtccattatcccaacaacccctccctgcccagtttgaaatgtcaccatcatcatataccctaaaatgcccagatccattcaagatataagttttaacacctaatgctgatcttgggtttattgtgtgtcaggccttgtgctaagtatttactgtggttaaaaattttaatctaaacaaagactcctgaggaaggtactattataaccattgcagtacatatgaggaaatggaggtatggagaggttaagtgcctggctaaaaatcacacatagggcttggggtgacgctgggtttgtcccagacagtctggctccagtacccacactcttaacctctatagtaaatggaaaaaatgaagccataaaagagactagaagccaacataggtgaacatttatctcattttcaagtaggaaaggactttctaagcacaaaaccagagac

SEQ ID NO: 137270 - DNA, 1036 bp, Homo sapiens
ccccacctgccttcccagccagcatccagcctagagctttgtacacagctggcgtttaataatagtaatgtcgccgaggacctttacattttatgagagtgagcatcagttctgttcaccctagtagcaggaggattgcaaggtgccggggcaagctgagcacttaactgaactttgcttgtatcgctttagaggagacccttggggcgggggggcagggagcacttcacaccattgtcaaccgtagtttagctgtgtggacctaccccaggactgcatgtgtgtgaccagagtccatattcaggaagcaaacaggttgttcagggctggggtgagctcgattctgcaggcttagcacagcgtttggcacaaagtaagtgctcacgaagtgttagctattagtatttctgtaaccaaattagaatcatgctatatattggttttgttcctgctttattcaattaacagtagtgtttttgaagcttactaaaaattgtttgaacacatgatctttcatgatggacaagactgtcctcacatcagcatgaactttgattgatttgaccaagtgccgattgttggacattccggttgtttctcgtttttttctataaacatccctgactgcttccttggattcctgaaaagggagttgctggggcaaagggggcgtgcatttttaaagtttatgaccctctctgctaattctccttccaaaaggttgtcctattttatgctccctctacttaagctaaccctaggtgagtattattatgttttaattatttcccaacatgacaggtaagaaaaacacattatcacattgttgaaatttgcatcttgtgattacttttactattcattggccattcatgcttttttttttttttttttttggttgtctggtcatgtccttactcctaatagggtgttcatcttatttttcccttattgatttgccacagctctttatttggaatggttattaacctttcatcagccattacatatatagcaaatattttccccaattcat

SEQ ID NO: 137271 - DNA, 1899 bp, Homo sapiens
ccccagccctgaacaacctgtttgcttcctgaatatggactctggtcacacacatgcagtcctggggtaggtccacacagctaaactacggttgacaatggtgtgaagtgctccctgcccccccgccccaagggtctcctctaaagcgatacaagcaaagttcagttaagtgctcagcttgccccggcaccttgcaatcctcctgctactagggtgaacagaactgatgctcactctcataaaatgtaaaggtcctcggcgacattactattattaaacgccagctgtgtacaaagctctaggctggatgctggctgggaaggcaggtgggggaaggcaagaaaagagagcgggagagatggaggaaaggagatcgatggagtgtggtcaagatggaggagacagagataggggagatggtcagaggccaggagagatgcggggaaagagagtctgagtgtagcgacagacagatggcgggagaaagagaggcagagaaacatgtaaaagagcaagacagggtgagcagagagacagagaaggatgagaggcatcaagagctaagagacaaagagatgagagagatgcagttgaaattttcagttgcacctggacagcatttcaagttgttcaaagctctgaaatccataaagactggcagctgacatattttaaaaatcctatccatctacgtatcaattgatgaattcatttatttttgcccctgcccatgcattaagtacttcacctttaagtcttctgccatttattctattattatttttttaaagaccttacctggctggaatcacggtagctgggtacatcccactgtaccagagggcccctgacccccccgccgtgcctacctccctgccatctcctccaatggggcccacatctggtaggggagagcagggacactcaccttggtgaagtggactgacagaaaaggatcagcctggcttgtgggaaactgtcacgtatcaaaaacaactttgcttttataccgagaagaaaaaccacgctgtacggtgtggaagccgcagacctctctcttctaataatccaaatttttttcgatgagtgtgtgcgctgataatcacggggtgggggggggttctcatagttttttttttctctctctctgtgtttctccttttcttgattatgagacttaaacggaaattttgaaattttgggtttttttctttgccctttacgagtcatctgaaaatatgatttcttcccctcaccacagaggtgagaggtatcaatgagataatagggctcatgagaaaccacagtttttaaaacaaaagtgtatagagtttgaaaaaaaaaaaacaagggaaaagaactaaaataaatcacagggccaacccgaggcaggcagagacaccattctgtgagtgagaggatatttgagggtctctggggaaagaaagagaatctgaagctctatgtgtggatgggaaatgccagggaaagagacagaatagggctgggttcccagaggcctcgccctactccaggcctcagtttccctatagatggaattgatatggtccccattgcttgaactacccggcgaggggagttctgcaccccctgcaacacccctcccacagagggtgaggggcatgtaagttacttcatggaggagaaagcggagagcccactgtcatcccctaaaattcatggacttgaagagtcggagaatccctggctcccagaatctactgacagttactgaatgaggaaagagagaaaagtctcgcctcatcacgttttagggcttgagtgccctgacccagccactgtcccactgggaaggtccctagcaggtccccaatattaatgcatccatcctcacgatgaaccccagaggcccattgg

SEQ ID NO: 137272 - DNA, 1104 bp, Homo sapiens
ggggcctctgacaaagacttgaaggagatgagggagggagccagctagatatctgaggaactccaaaggaaacagccagggcaaaggtcctgaggtgggaatgtacctgatttgttcaaggtctacaagggggctggtgtggttagtgtggagagagcaagaagagaagctggaggtgaggtcagaaaggggactcggaggttagaccacgcaggaccttgtaggccatggtaaggactttggcttcaacgctgagtgaggaggaaggcatgacagggttgcaagcagaggagaaacacaaaccgtgttaggatttaacaggaagcccctgaatgctgagtgtacaatggggtctagggcctgaatgtggaagcaggggaccagcaaggagctggctactgcagtagtctaggtgactggtgatagtgctggcagtggaggtggtgagaagaggatggatttggtaaatatttttaatagacagccaaaaggatttgttgaagactgagagtcttggagccagatcgggacagacaatgcccaaaccaggtgggcaggaaggagtccctggactatttgccagcttgaacttttaggtgagaaaaaaataaagttctgtcttgcttaagcccccattattttatgatttttctgttacttgcagctgaacatattcatttctaactcatggacatcctgaacatggagacctggggagaggggctgctggaaggatcacctccctcctaggatgctgtgaggttctaatgagataacagcatgctcagaacctggcactcagtaggtgttcagtaaatcttcccaggatggagaaggaatgtatgaatggatgtgttcagcggacaaaagctgcagttgagttcccacagaaggtgagaccccaaagggagagcgaaaggagtttactagatggaagcagcagaaggaacagcactcttgggagagggaacagtagaagcagagatggggggacagaaagaagggaggtgaggcccctgtggggtgtggagtgtcaggttgggcaagaaggacagggctttgattgtgattccattagtcagaagctacccatatgcccaatca

SEQ ID NO: 137273 - DNA, 1553 bp, Homo sapiens
ccgggcccgccccacggccggtagcggcgcaactgcgccagcggcagccccaaggcctcgtcggcgaacagcaccctccgcggggccaccgccgcctcgaccgaggtgcggggctcacccgcggccggcgaggggggcgcggaatgccgcagcgggggctccacaggggccgtacgcgccatatcggcggcggcggcggcaccgacggcaccggcggcgggaccggcgggggcagggcctgaaggggcgggcagccaatgggaaggccagcgcggaggggtacggctcacgggggcataggcggtgagatgaagacaagtattgcagagggccaatgggcagccatgcacggatgacgtacagcgaattgagagccggagaagcacgcagccaatggggatgcccgggagtgggcggtgtagggggcgggatgatcgaggaatcaatggagaggccggaatgggggtggtgcgaaatccatgatgaagaaaacagaagcagacagctaatgcggaagtctgagcgagagaggcatgtgggcggtgggaaaagtggaatggctacaggcgatgagggcagccgggaacgaacgcagaggcccaaaaagtgggagatcccgcgggttgcgtaggcggtggaacggtagctagagagagagaacagccaatggagagccacgcgtgggatgacgacaatggctgcagcgagccaatggggaggcttgtgagcgtgcactgcggcttcgaaggggtggtgccaaggtggagctagccaatacgaaggctaaaaggagaccaagaggcgggtgtgtagggagccgagccaatggaggtggaggctgaaggcgggagcgaggacgagagctggcggatagccaatgagggagccagggtgaaggcgtagagacctcaaaggacagtactagtatgggatgagccaatgccgaggctagatagtgcagcgggacggagggaggacttggaggcaagatggggaaaaaagcagagccgacgggggcagtgtaggtggtgtgaagggaggcatgagtagccaataaggaggctggagaggaggacgctgtgtagacagagtctgaggtattgggtggccggacagcagaaccatagaacgcaggcagccattaggaaaaatgtgcttctcagggatggggttaccctctccctaaccctccgtgactccccattgccccaggaatacccagagcccctgaaggcctagaccacaccttggtgtgtgaactaggaaagtgaaaatgactgtcctgttgcagttagttacttactgggtcctccctgcccaactacaaccttttcttgagcagtgccacaagccaagaatgcccctgattgttagccgcaagcactctccaggacttgatactattgttgaatgaatggccgaataggaaatttaactttctgaaggattcacttttttaaatttcagctcagcaaacactgacctgactgtgtgctaccagaagttgattgggcatatgggtagcttctgactaatggaatcacaatcaaagc

SEQ ID NO: 137274 - DNA, 4585 bp, Homo sapiens
gccacagcccgagtgccagggtcccgtggaggctgaggccaggcagctgaagagctgcatgaagccggtgaggcgcaggtaatgtcagccagcgccacctccgccaacgcagggctgtgtctgggatggaggacaagcattccggcccaggaacccctcaggcctgctctccaggacagggaggagggtgcattgagtcagtcagtcaaagagtgatggaggtcaaacacgtgctaggcactgttttaactggggttttattcctccatttattgagttccactgtaaagccctgaacaagacagacatctaccctaccctcaaggattcatacaggctcctatgggagacagtttgaaaaaacaagcaagcaagcagataggataaatagggacaaagttagctgctgaagggagtaaggggatagattgggagggaatgactgtgtcagacatgctgttaaagggagggcctttgaggaggtgagtcccgaatgatgataaagaagagttatgcagatacggtggggaggtgggggagagtttgtaggaaaaggaacagggaggacttttctgaggaggtttcatttaaactaagtcctggatgatgaataacagttatgtgcatatatggaacaagggtgttctaggtagaggaaacagcaagtgcaaagtcctggggtggaaatgagcttggtgtgaatgatcagcagtgtgctggagtggagagaactgcaatgacatagtgtggaccaagggctttgccagtggggggtagagcagattctctttctgacagagcaggaaaccaggattccagaggtggagaaactggttgaggcagtgatggcacctggctcttccagttcacccatgcctgaccttgaagcctgtgcactctactgttaacgctgtaatctacttttgagtcctgtggaggcgaggggctgagcccatgctctcacaagaaagcagtggctctagcagagagacagaaccagatgggtactggacttgaagtttttgtcccttgtttttttgccacaccacctgtgatcatttagggacagggagaaataatcagttataccccagggggccccagaagatttccctaggtttcctctatcaagctatgagttctttaagggcagcagctagtcctgattctttttgcggtcacctaagtctggcccaggatcactagattctccctaaaatgtatacatttccctgttcctgggaggactgggaatggaaatgggaaaatgctttttggaccttgtatgtatacgcttggtcagaagcccctggctgcagtaagacatttgtgggttctgctggttctggtaaggccttaggctgtgagtggttcagaaaggtctagctccggtctggtgggcagatgtgcctgggtaactgagcaggcaggcaggtacccactcacccacctgtgagccccaccataatctgagacttcatttaaagggggcaggcagcatggtttttcttacagcattaagagtgtggattctggcatagattgcctgggttcaaatcctggcgctgccacttactggccttgtgaccttggccaacgcatttaactacaccatgcctcaggaccctcacctgtaaaacagaattatagcatctactttacgggataagagtaaaggtgctcagaaccgagtctggctcaaagtagtatcatacaggtgttagctagtgtcagtatttagggagccacacctacagtttcctggattcctctcctaaattcggctccgcccatcagctgtgtggccttgcctccgtttccttctctgctaagggaaatgacagtcactttgcatggttggattgaatgcagcaaacatgggcaaggtaactgaagcatggtggtaactgcaaaagataactggccagcatttactgatttctgtgctatgaacatcagatccattctctccgtgaggcctgctgtgcatgctgtgttgtgtaggtgctatgattatccccatttagtagaggggagacaggtagctcagagagatgagccagcttgctcaaagcctctcagctagtgagtgacagggccagggaagaaatgctagggacatttatttttttctatttttttttttttaaactggtcctctagaaagcgtggcatgattcagggcaaattctggatttcactcttggtgttcccagcatgtcgtgctttccttttacctttttttttttttttgctttatcgaggtatacctacataaagtgtactgatattctgtgtatagcccagtggatttgtacatatgtatgcacttgtgtagccaccacccagatgaagatactgagcaggtccagtaccccagagctaccttcatttctatcactttcccaagctgtcatccccgccggctgtcatgggaaccctgtctgtaagatgcgacagtttgggtaaaggagtttggtcattttaaagagtgtgaaaggcagagaacagagaaatcaaaaccttgcagggccaaggtgggtggagagggtgtttttcttttaacatacatgggcggttttaaggagaaattgaagcagcctgttcagacaattgttttggtatctggccccaggtctgtggttcctaacatgacttgtgatattattttaagtgggcagatggctttttgatagcttctttatctttcgatctcagctcttgcaaaggggaggttggtgctcattgcaagatcagcgataagggtttctttgtaggtcggtggctttcttggtgagtacatttcaacatattattgttttagaacctgtgtgctgccagtgacttgcagcactgttgaagactagccaccctttgtgacctagccctcttgggaaatggcggaggatctcagggtatatcccttacctgtgggagccctatcagagggcttcctgttgaggaaatgttggctgtaggccctctgtgcactgagcacagccacatcaggtgagggcatgggagaagtccgtggtagccatcaggatagagttcagaaacccaaatggctgctttccctgggttgctggaccaggcatttggtaactctaaagcttagagatgattcatcgacaagcatttattgactgcctactgtgtgctgggcacagtgctaggttccagcagggaaagagatgcagagtggtcctaagatgtcacagggcttgtgggatggagtacagaggatttgttgtatgagacctggctgagcccctgctcttcgccaggcacttcactgagtactatattttcatgcaaggtctggtttaattccgacaacattccctgtgaagtagagggttttaaatttctctttcctggatgagcaaactgaggctcccagagtccaaagtcctagggctggtgtggggaaaagccctcctgatcttccttggcacttgacactaccctttggaagtgtcctattcttcttaaaagtaaagaccaagagagcctcaccatggtcttcaagcaccctcccatcccattccccaatctggcctccactggctcatagtcttaacaccagtggtctttctgagctcctgtcaccatggtctttctgttactccaaagggcctcgctcctttctgctgcagggcctttgcccctgctgtttccttcaccaggaacatttatcccgtaccccttgcagtctcctccagtgttgatccctcagttctaagaggacttccccaggggagcctgtccaccccagtgtcctcgggcccctggctttttcatagcactcatcagcccagcacgtgctaagctttgttagagaatgtcccatggcagagcagatgaacatcgccaccagtcgaggggtcatcggccaccctgcctagcagttctactatatttttttgatccactcgtttctcctctgaagtgactctttcaaatgttctttaccttcagactttctctcctgcttcaaaaaacaaaacagaagccataagaatggaactccctataacttgtggcccccaagtctgcacgctgatttccctcccctgtgttacagatgacgaggagtcccttcttgctcaggccacttctccctcctgtgctctgggtcccagtttctgctacttgctctagaatctgacatcatcagtcaccttttctctcctggcaggttttctgctgccctccttgcttgatcctctattcacctttgcctgtgccagcatcccttctgtctccgctgaccccacgttctctccctcctgcttctggccagcacctcatcaccctccccttcactgctgacccctgcagagttgcctgtacttgccttctgcacttgctcacccccgtaagtgttagcccccggcatctgccagattctgcaggtggttttttagttttcctcttgaagtggttgaccactcctacttaaaacactttgtcttcccttgccttgagaccacactctgctggttttcctcttaactctctggcccttctctttctcctggctcttcccttagcttcatgtatccaaactcggcatctccac

SEQ ID NO: 137275 - DNA, 2075 bp, Homo sapiens
ccacatgcagtaaaggtaagtattgtttcactcgaagaacaaccatttttcagttatttatatgtctgtttacacgtgtgggtgtgctgggttatgatgtagaatggatttcttactatgggtcgtggccaaagaatgaagtcatggctgttgaagaagctcatggcacgagaaactgctctccctctaccccactggatcacccgcaagtcccagagttgaggctgacacacttgttggggaaggcaaagcagtgccccacataacttggtggctttcacagccaccttcaaaccctgttcttttcagaaagcagatggctcagggtaactgcaattctgagtatcgtggggcaggtttctgaagccactcatccccccggaaagtcagcgttatcttcaggttgactacatgggagccggggtctgctgagtttccctttgggtttcagtgcctgacccactttgggctggcaaaattctttgaaaacatgaatgctgggggtgctccagaggactcgggtggtggtggcaatggcagtctgtgactgctctgaaagtctgctttgcttttctccacagggcttgtcagccctcacccgctcgcttactctgtgactggcgaatcacctttcttggctttcttggctggcctaggccggggccaacaccacctctttccaaatcctcaccctctggtctcctcggggcctatcagcttggcagccattgtgtttcctgatggccggaggaatttgcacgcccaggagactggcgtgcaggcctgagatggccccttttagtcgacaccagcttgactagtgctcactagcacccaaatgatgcatgtccaagattttccagatctgtgtgccctggcccctatggctcactgcccttgaggggatgccacgtggtacttgtggggctggtgccaaaagaacaggtttccttcttgaaaacgagcaggcatactgcaggtacagttttgttcttaatcttctccctccccatttttctaagaacccctcttctctgttaccgatcagtgagtcagtatacatttgtacttgatttctcttactatcctcatgttgattgaagtcatagctgcccttgagtttttactgtgaaagacggttcaaagataacttgtttctttttaagcccacaatttcaaactctcttcaaagtggagccctcctggagtgtttgttaccagcgtggttgtgtagtcagtgagtgtagagatgcagttccttgagttttagtttttgcatttgtaaaaaggaagggtgttgttttgaaggatagatgtgaaggttttcaaatgccttggtgtgtcaatgagaggggcccatggtggaggaggtgaacaatacatgcttgtgctttctgctttcatatctgactttggagaacgacttgtttgcttctgtcgatgttgtggatcttgggattggctcaatggcgtgacctgctttttggatgttctcgccctcctcagccatggaaagggtgctctgggggctgaaggattgattgtgtatttgtttttctttctccttcctccaactgaattgtggagtcctttacctgctggctagctgattcctgagtgttctcctttttctgtctcacatctatgactgcagtggcttttagaagcctgtttgtaatatatgtccggactaggccagatggaggagaaggcttgcctgctactgcgcacaggtgggagggctggctttctgtctgtctgtgggccttcttgaagaggcttggtttagaagatcctaggaggaggatgttttctgtcatgaaggactatggtaacaaaaagaagtaagttagtgcagcctggcagaaattgtgttgaaacaaaagtccaaagacctggattttaggaccacggaggggattggtgtgagaccaagctggtttgctctgaatctctctttctcatctgtgatgtgtgggaggtggcagctgggctcccagagtcacccaccctaggccctgtagtattctgattcaagtacctctggtgggatttgtgagtcctagacagtagag

SEQ ID NO: 137276 - DNA, 1517 bp, Homo sapiens
ctgagaccaccaaagtgacaggcagtctggaaaccaagtacagatggactgagtatggcctgacgtttacggagaaatggaacaccgacaatacactaggcaccgagattacagtggaagatcagcttgcatgtggactgaagctgaccttcgattcatccttctcacctaacactgggggggaaaaatgctaaaatcaagacagggtacaagcaggagcacattaacttggactgcgacatagattttgacattgctgggccttccatccggggtgctctggtgctgggttacaagggctggctggccggctaccagatgaattttgagactgcaaagtccagagtgacccagagcaactttgcagttggctacgagactgatgaattctggcttcacactaatgtgaatgacgggacagagtttggcagcctcatttaccagaaagtgaacaagaagttggagaccgctgtcaatcttgcctggacagcaggaaacagtaacacgcgctttggaatagcagccaagtatcagattgaccctgacgcctgcttctcagctaaagtgaacaactccagcctgataggtttaggatacactcagactctaaagccaggtatcaaactgacactgtcagctcttctggatgggaagaacgtcaatgctggtggccacaagcttggtctaggactggaatttcaagcataaatgaatactgtacaattgtttaattttaaactattttgcagcatagctactttcagaatttagtgtatcttttaatgttgtatgtcttggatgcaagtattgctaaatatgttagccctccaggttaaagttgattcagctttaagatgttacccttccggaggtacagaagaaacccatttccaaaaaaagtcctttcagtggtagactcggggggaacttggtggccactttgagatgccaggtttcttttttatctagaaatggctgcaagtggaagctgataatatgtaggcactttgtaaattcatattgagtaaatgaatgaaattttgatttcctgagaattgaaccttggtttcctaaccctaattgaggagaggctcgcttcttgatgttgtgtacaaactcacctgaatgggacttttttagacagatctccatgacctgttcccaccccagttcatcatcacctcttttacaccaaaaggtctgcagggtggggtcactgtttcttttgtgccattttggggtggagaaggtggatgtgatgaagccaataattcaggacttattccttcttgtgttgtgtttgttttttttttttgcccttgcaccagagtatgaaatagattccaggagctccatctataagcatggaagtgtctgtgtgattgtaatcatatggttacaacactcagaatctaaattggacttctgttgtgttctcaccactcgatttgttttttagcagtttaatgggtacattttagagtcttccattttgtgtggaattagatcctcccctt

SEQ ID NO: 137277 - DNA, 1048 bp, Homo sapiens
cagaaaggaccttacctgtcctctcactccttcacagcatcctagagaaacttgatcctatgcagagaacacagcagctgccaaccgacaggcaccaaggtcagggaggcagcaggctgcagatagcctttccaagtgataataggaaacacctgagagctaatgaaagcactttacctgaggagaaacaggaggctgagactagagcccacagtttatactgattgcagagtgtgagatctcagtctctcaataaatctttatttaatctacataaagatctgagtagtaggagcagctcctgcttagatataaaaagtggttatccctgattggtgatatcaaggaagaattatatattcttcacacttggctctgtattgactctacatcttatctgtaggagagagggagagaaggagagggagatctggcaattctacttctgccatgggggatctttctaactctcaaagaatgtgcgcttctttaagggtaacctgcagagtctgagaacggtccaggtccaggcatgcacggacagaaaggatatttttcccccaggggtttagcgggggcaggaggggttggacagggatgtgcagggcaagctcctttctgtcttgcaggcacccatctaacttttgcccaaagcagtaacagtgggcttctgtccccctacccccaaccccccacaccttctctgacagcagaggatcagaccacctaggtgatggtgaagctctttgacgtgcaccaggtgcaggagacctatgacccctagcactgccttttatctgctgggttccccttggagaaccatatatctttggagccccagaacatgctggttgcacaagaacaaagcacacttactgtctgagaggaaggctggtggtgtggtagcactattgaacctctcttttcttttgagatcatattgtacatacacagtgctacataactggatgtttcaagttaataacttaaaatgaacagcaccactattacaggaaatattattcagcactggttttggtagtcaccc

SEQ ID NO: 137278 - DNA, 1054 bp, Homo sapiens
accagggtcagggaccagaatacaccagagctgagggccagccctacctgagaaccatcaacaaacttaccccacatcccattatacctcctcactccctgcagcctgtcagcttccccaatctcccacactcactgtcacctggggctctggtgcaccagatgacactacttgctccctggtacacaggtgagtgcagccagtgtcatacccaaggcctctaaatgaggtccacaggcaagagccatcccagcccacatctgatatccaagatgcaatgctaagtggaaaaagcactgtagaacagtgtgtggaatatggtcttgtttatgtgtgtgtgtaagatataggtataaaatatacttcaatattcatagaaaatttatggaagaatacacaaaaattgttaacaatggttattactagttctacagggatgataaacagggaggggtgaggactgtatctttactaattatcatcatttgaatatttttgccatgaacatgtgttacttttataatgtaaaagcacttaaaatcaaaagatgtagatagtaaattaatatgtagatatagatagatgatagatggacaatagcggtagataaatgatatgaaaatagctaaaagctaaaccagacagatatatctgtgcattggtttcctcacgtgaaatggtacctatttcataggattattgtgaggattaaatgacttcatacgttcgagtccttggaacagtgcctggcacacagtaagtgctcaataaatgttttctttcggataatactggtgtggagatggtggaggaagacaggctggctcgatgtgataatctctttcgccatcttgtggtcagtggggcacaggccacacagcaacattaatgccaattagcagcatgggttcactttgcacgttttcaatcctcttcataggtaagtgtaggagttcaggccttagggatggaggacctaggacttttaaaatcgaaaaagagcttaaagaaataaacaaataactttacaaatgggtagccagaataggactta

SEQ ID NO: 137279 - DNA, 1042 bp, Homo sapiens
taaattacctgtcgttgcctgttttcatttcaaacggtttgaacattcagcgaaacagaggcgcaagatcactacatacatttcctttcctctggagctggatatgacgccgtttatggcctcaagtaaagagagcagaatgaatggacaattgcagctgccaaccaatagtggaaacaacgaaaataagtattccttgtttgctgtggttaatcaccaaggaaccttggagagtggccactataccagcttcatccggcaccacaaggaccagtggttcaagtgtgatgatgccgtcatcactaaggccagtattaaggacgtactggacagtgaagggtatttactgttctatcacaaacaggtgctagaacatgagtcagaaaaagtgaaagaaatgaacacacaagcctactgaagtgacacacagacctacctgcaatggaagatgacgacaccaatactacaactggcatcgagatctaaaggacctacttgaccatggcccatgggcctgacagagtaagaattgaacagtacccagtgtccaaaaggtcctgattggaagagaaatagaaggggagggagaagaggctctagtctaagcagttgatgaaagggaaattaaatggtagaaacactctgggtgaggaaggcaggagcaggaaaatgctgacactggtacatatcctatattcctccaaaagattgtgtgggaaagtgtgggggggaggggggtggtggggggggagtgtgcccttgtaaccgtaaaacatctttctccatgggtgtttcagcttcaattgaccaatcacataacagttatatgtttggggggaaaaagaaaagtttctaaaaaatgtagcccattacatatatgggtatgaaagcagaaaagtggaggaggcagggatatcattgacaaacacctttgccagtttctttgtattcgtgattttttgtgctattaaatgcagtattaaaacaagaaaagcccacctgggctagtgaaaggagaggaaataagggggcttgtaaaagg

SEQ ID NO: 137280 - DNA, 1048 bp, Homo sapiens
cataagaagcagctcaaattatgtgatctaatgttattagtattagatttctactactaattactctgtgggccgaaagctcaggatagacagtttcattctaaggacaaaccttctccccagcaaaaaaaggcactgcaagctggaaatagtgaaacacaatggggcattgcgttttcaaaggcaactgacacgcccagcactgggataggacccgcccgcccagtcctcattaaatatggcagcgagcggggccgacgtactgcggctgcgcaagttgaaactcctcctggcagctcctccccggcgggcctcccctcatctcggctgggtagaggtgccgggtgtgagctcggcgtggcgcgcacgcgcagacgctggctgggctgagccgatactcgcgaggcgccctgtcacatgagccgcgcgcccgcttcgctccccctcctccccggctgggctgtgtgaatgaagctctgccggctacgtggggcgctcactcaacttggtgtcctggacgccagagccgaccgagcgcgctgcccaccggcggcggacacgggctccgccgctccggacctcggcgacaggtaaaggcaaacgggctgtcccttccccaacagtccttggcgggccgctggcccccggcccacccccggagcaccccctaagcgcagcgacacaggggaagcgcaatcccgctggcttggacccccggagatggggcttccccgcgcccggcgttggcagcccggcgcttagaggaggtagacaggctagttccagccagtgctgagcggcgttttcccgggagcccagccctgttctccgagttatggtccctgggttgcccgagcgaagtttccttgcggagcggcgccaagcccgccccgcttttgaatcggagtgtttagccgcctgcgtcccctttcccggactggggtagggtgacttaggctggcaaagctcagccgaggcccggctcttctccctccggctctggacttgccgctggttttgtatgggtcttagcaaagtggagaaactc

SEQ ID NO: 137281 - DNA, 1056 bp, Homo sapiens
attttgagcggagttgcggtttgtgccctttggagggtttaggagtctccacgggtatgtgggatttttattgttatcaaaagtgagtgtgggtttaagaaatgatagacaaacactaccaaaattggcctgtgacccacaaaaagttaaagaccacttaaatggagtggaatgaaatagcttgaatatctagaaatattcagcaggttggttagttggtggtctaatgtatcttttaaaaatgtttcattgtgttggttgtgactttatgtaggcacacaaatgtaacaagtagtttccatgtataaagattatcaatgagaagacatttatggaaacgggatttggcctgtatgcttcctttgactcacacaatgggcatttatcaagagcagtttggatattcttgcttaaatcctgagacattatttcattcaacaaacgaaatacagagatgaataagttgcaggatgctagaagattccttgtcatctaaagacagacatacaaacaaataattttgccatgttgaataagtgttagaatagagaggtacaaaaagcaagggaagccccgagaaaagcttgatgaagtctgagttttgagctggtctaaaaaaatgagtaggagcaaatgagagaattgcattctgggcagacagagcagcactgtttgggaagttccaagttgctctgtttgcctcatgtgagatgtgtaggggcgcgacctcagatgaagcagggaaggtagttggaggccagataataaagagccttgtatgttctaggaaggattttacactttatcctgaagacaaagattctaaacagggaagtaacataatcagattttgttttagaaagattactttggcagcagtgctgagctggaaatgatgaaaactgggagtcagtcaggaggtttctggaatagtttaggggagagatggtaagggtctgagcagaagcaggggcagtaaggttagaatgggattctagaatgttctgtgactggatgtggcaagaaatgggcctggattaactaccagcttgggtg

SEQ ID NO: 137282 - DNA, 1048 bp, Homo sapiens
gatcacgaggtcaggagatcgagaccatcctggctaacacggtgaaaccccgcctctactaaatatacaaaaagttagtcgggcatggtggcgggtgcctgtagtcccagctactcgggaggctgaggcaggagaatggcgtgaacccaggaggcggagcttgcagtgagccgagatcgtgccactgccctccagcctgggcgacagagccagactccatctcaaaaaacaacaacaaacatctagctcaattcctagaggttaagtgatatgcccaacgtcaaacaggtagtagttgatcctagagctagtattaaaatccaggtcacctaattccctattccagtattctttccgtgggctcatggaagaggcaatgtgtgagtctgttctcagctcaaggaagcttctgagtcagtctgtagagcttgttgaggaaccctaagggctacaggagcccaaatctccttaggttcttggctcattgctgtctggttcctccatggagaatttgatctgaattcccatacctcttaaatggggccaacattattttgacttcacttaatggagccctctaatatattttctggccactttaaacagtgtactgagcataatttaatatttttgataactcagggttatcattaataacctccagccagtttgaggttggagacttgtgttgtcaggtgttgtttatttattccattaacatttattgaacactacttgtgcagcaggcactctgctgggccctaaagacgcaatggtcagtggaaacaagtatggtctctactgtaatggaacttaagaaccaggataaaggtagcacttcaaattaatgaaatgatttatttaacacatatgctgaagtaatttggaaaaaatgacagcataaatttagaagggttaatataatgtttcttaataaaggaggggacatcagaattacctgtagtgctttaaaaaatattcctactcaggtccccattcccccaaattgtgattcagtcttaagacctgagcattacaatcctgtttt

SEQ ID NO: 137283 - DNA, 1048 bp, Homo sapiens
ggaagaaactgaggcccagtgagacttattttaggccacacagctgtcacatcgtacccaaagccaggactagaccctggggctcctgataatcagtgctgcccagcccgctctttctctgtcaatctgtctacctatttggtcctactgcattgcactgccttccccaggcttgggtatcttacagttttctgttgaatcttagtcttttcctactatgctttactgctaccgtgaaacgtttagttttttttctcccctcaaaaataggttttccattgaggcttccaggatgttttttttccccttcttctcactatgttagcttatgaaataaactataaattcttattatttaaccagaattatgattcagcttcctgtttcatgtaatgctgttctgtgtgtcaagggttgggggaggcaggactagaaagtttcattattggtggctacgaatgccagattctccttcttcttttccttcctaccttctcttaactacccagtatttatagacccatggtcaggccaaagaagctgttgaggagttaatagtatgaagtgtctcccttagtaatgtcatattttgatgattttcaacccaataccattctggcattaggtggcaatttattatatttatttaggatttctgccctgactacatccaggaggaacatagaacaacacagaaattaaaacatagagcaattagaaataaatgcaggacagggaccatccagtggaaatgaaatcgatattactaggcatgtgagatactagacactgaagttttctctttcttttcttctgtgtccctccttcccaaagacaagcacgataagttacatcgttgacatcttctggccaaaaaacgtgttcagatgcaaaagaaaaccctggctctgtctatgctaaatcttctggcccttccactgccctccctttggtctggccttacctgtggccacctgtgactcagcactgaatattcccaggttgaaatcatgatctttcctgtttagctttgagaatggtgagagac

SEQ ID NO: 137284 - DNA, 1246 bp, Homo sapiens
tcaaggggaacttaccgccagaacatttaaagagcgacagacaaaaatgttgagacttgataaattttatgttgagttattgcatattaatacttagtcctaaatactgtacgtgaatgtatcttaaactgtgatatagctcaggggtgtaaatgagttgccttaggtaatgtagtgatttattcatagacccaaggccagaaatcagattccttgattcccagaccattattccttcaatttggctatggcttctgtataacatcttttctgctttgagtctcctgaagagcagaatcaagtatgtcaaaaattgaatgatcttaggtgctggatgttttgcacatttatgcaagaatattcaatgttaccagtcatcttaaaaaagcaacaaaataacccaaaataatgctgagtaaaacacaagaagttatgttactttttcacttggtgacatggatgaaatattacagcaaatggggacagagcttaaaggaagtggtagggtgaaaggaccgttagtataacacagctggatggcatttctctaagctaccattttgaagaatgttgctctttggactgactcccaaactccatctggctagcactttggaattttaaatgggtaaaaaatatgattttccattgctcccagctgccctgcatggtttaatagacaactatgtaaaagacagggagtagaaccagcatttgatttgctttatgaaattgggaaatacacttggttttttaagctcaagttttttcataggtagatgatatggtggaggattatggtagttaatatttattgaatccttacaatttatcaggtactaagcccttccacatattattaaacctcaatatagttctataaggtaaataccatattaccccccttttaaagttgagaaactgaggcaaagagaaattaagtaactagctttcacagctaataagtagttcctggtatgaattgagatatactgtaagtgtaaaatacacaccagatttcaaagacagcatgataaaaaaatgtagaatatctcaacaatgttctgtattgattacatgttaaaatgataatattttgctttttttaattcttagtttttgtgggtacatagtgtatatatttatatacacttgaaatattttgatacatgaaatattttggtacatgaaatattttgatacaggcatgtaatgcatagtaatcacatcatggagaatggggtat

SEQ ID NO: 137285 - DNA, 1045 bp, Homo sapiens
ccaaagacagttcaacctagcaactattaaactgactttcaacatggcacgattctttctttttttaatatttaatgaaggaaagccctactgctctatttccccagaggtagaaatctcaatttatgttgtttgagctgggagaacttgttaattaaaactgtcgaactgtagtgaattttgctattttaatatatgtttcatcagttgatgggggcaggggttggaatagtaaagagtacacagatacttttgtgatttggttatgatgagactgatcttctaatggatcttcaaattgacaaattctgggaaagccaaaaaccaatcccaatctgtatagaactgtaccactattccaaaggtctgtcttaattctttgagcctgattctcttgccttcactctgctttaggaccagtctgctttaggacattagagctaatattagccttagactggagccatgccacttccagaagggttccacactgggttttgaatccaaacaggcctaatcttccaagattcttaaaatcctattgtcttacctttgatctagtgcagcctctgactaaggctggcatgccactcaccctgcagtggccttagcaggtgattgttccagctaccccacaagcagtgactctggagtgggtctgcctggatttgaattctagctctgacacttgactagctgtggttatagccacattttactcctctgtgcttagttttatcatctgtaagatggggatagtagtatctgcctcacaggagtgttgggatcattaaatcagctaataaatgtatagtactaatgtctactagcctattgttgttgcttttgctgttgttattccgttgtcatggagattgaaatgcttgaaaatccttccttatattcagctgaaacctgtctctgttatctctaaccactgtggctgcacagaggaaagtataaccctttccccacttgctagcctttcagatacgggacaggtaaggacacatgtatgaaagcacattgtaagctgtaaagtgat

SEQ ID NO: 137286 - DNA, 1082 bp, Homo sapiens
tttttagatgaagtcccattaaactgttttaaccattttaaaacttgcatccacttattttttcactagataatttttgagtcttctttgtgccaggcactatgttgcattctggggatacaatggtgagttctacctttatctccattacctttcagttcctagcctcgcctgttggtatttttggattctagctctatttgaaacacattggctgtgtctccatgttttatatcattcatgaattttatgatcatgtttccgctgtcttttctaacttggtggtatttcagtagtgccaagtacagagccctgaagcattcaagttgatcttctgtgaggctgacattgatccattaattggtattctttaaaaactctttttattttaaaaacaattattgattcagataattatggttactgcaaacaaatgtacagggaagtctcatgtacccttcctccagattcctccagtgatagcatgttacaaactatagtacaatattgaaaccaagaaactgacattgatacaatccgcagggcttattgatagagaggtggagagggagagagaaagggaatggggggagggagggagagagaaagaaatgagagaggctccatgcaactttatcacatgcagctttgtgtaaccatccccactatgatcaagagactttactatcactacaagacttccttttgctgtccctttatatagccacatcccttcctcctcctcatttctaatccctggcaaacactaatctgttctccatctctataattatattattttacaaatgtcacataaatggaattgtgcagtatatatccttttgagattagttttttttttcactcagcataatttatttgagattcatcccagttgttgcatttagcaatagtttgttccagtggcattcttgttgagtaaggttatttgatcaatcataaatcatcctacttgttcaggacatacctgtctcatatgaacatattctatagggaaaaaatgtcttcagtgacttactgaaactcaaaaacacttcgttccattacctcagtctatgatt

SEQ ID NO: 137287 - DNA, 1030 bp, Homo sapiens
tagggaaaattgtctcaccatgctgattatatccatgaccaaactgtgatttctaaccacagctggatcctcaacggctgttcactaatccttttttacacattcctggttggtttattttccaaattcccacagcaactgttccattttcttaccacacccctcaggcctcctaacttagtcctctctatccccagcttcccctcagcaggtaatctattatatagattacctgctgaggggagctggagaaaagagagagcccattggtcacaaactttctctttcccatccaaacatttatttccatgggtactttcatcttcattcttttaatatcatcttttccaaggctaacctcattttcctttttacctatcccctgatgcatcttttaagatattctgttccattaatcatctcccttctctctcttgtatcttcagtgtttttcttaaagagctttttattctgcctgcagacatatccaagaatccccctttcatttcctaccccaaaatcttctttttaatcatactatccccataggctaatgggatatctttttctcatactttatttcaaagtatgttaaaagagccatctatacttccttatctttcagtcttcagctcttgaaatctggcttctgtacccttccctctactaaaaactgacctctcacaggtcagcatgacttccagattcagattaggtgggattatgtgtcccaagacacgcaaaacagaggagggaagacgtgtgtgtccacgcacaccaggttgcccatgcctgtttagatgagaaaagaagtatgaagcaggaggaacagagttcgatgctacatctttcttctattccagggtggttcatagtgtgatccagtaacacattacttctttctctgcttttattattgacaaatgtttttaccttctggtttgttaaattccataaggaagtgctacctttttattacagatgagatgatgatgatgatgatagtggccacctactgtgtgacatacac

SEQ ID NO: 137288 - DNA, 1010 bp, Homo sapiens
ataaaaaatttgcccaaaaaagtacaaagaacactcttacaccctttactcagatttcagatttacctgtttttagcattttaccctatttgctttatcatatgcattctctggtgtgtgtgtgtgtgtgtgtgtgtgtgtgtgtgtgtgtgtgtgtgtacatatttctgagacacttggggataaaggtacatacctcatggccctttacccccaaataattgagtatgtatttattgggaatagagacattctcttacacaactatagtacagttatcaatttcagtaaatttaacattgattatcttctctaccatagaaattctaatcttcaaattatttttatccttcctccctctgtttttgtgtaagttttatattgtacgtaatattagtacaatggtacatacatgggagtaaatgttgaaatgtttttctactgacagacatgtgcgataaaaagttatgaagcaaccggtccagaggttgacaaaatgctttcgctgtatcagctcagctgatcctgccatcacctcatgacacaggcaagagttattttccctactcatatcacatatgaagaaacactaaggaatttactaaagatataaagctttgattaacaagtgttggatatgggcctcaaccccaggatttttgaccccagagtctgtactctttccataccaaattaccttgctgagtaagctctcagctgtctacatgtgacttttctactttatgagttttaaggcaatttaagatcatataattctaaaaattgtgccagatgcttccaacatacagaattgaagacatcgtggttcagtgaggttaagtgatcatcatttttaaaccctcccttaagcaaagtaggaaaaaggaaaccttactgtcatttctcttccttcactcaaaatcataacccccatacatcctcagaaatgtttgacttgtctgcttagcaacctttatatggtgctttactgattacagtgcattgtaatt

SEQ ID NO: 137289 - DNA, 1098 bp, Homo sapiens
atcccttttgtctagccaactccttcctatctttattatcatttttcagaaagcttaccatgaccccctgttccatgtccccatagtctcttgggcctacttgatcacacggtctcatctattaattgtgagtattctaagagttgggacgtgttcatcaatccaagtatccccacagtgcctgacacatagtgagatggatgtatgagtgattaaacaaaaaggaccaaataatgagaaagacctgcatcctttgaacaagtggaagaggcttcatcgcttcatggaaagagagcttggtcattagtctaacttggtggttcttaaccagtggtgattttgcttttccaaagaacccttgataatgtctggagatgttgttcattgtcaaaattggctagggtatctactggcatctagtgggtggaggcccaaggatgacactaaccatcctacagtgcacaggacagccccccacaacaaagttagtagtgtcgaggtcctagaaatcctggcctaatcttgcttagctctctcttacctaaagcagttattctcaaagtgtggcccccagccgtggcagcattacctgggaattgttaggaaaattctagggtcctacccccaaatccctgaaggagaaactctgggaatggggcccaacactttattttaacaaaccctccaggggattatgatgcaggttaaagtttgagaactgctcctaaagtgaaaaatctggttggtaacaaggccagcaccagaactctgagaggagccagcacagaaatggttgagggataatgtcagaaaaaatccacaggaggtgatggtttccagggtgaagggatcattggtatcaaatactgctagatatgagaacaggcaaagatgggggagactgccactaatagttaagactcctgaaatggaaggaggtaaggatgatgttgttacaaagtgatgggtttgtgcaaggagggggtgctgaaagcttttaatttgtactcatctatgcaaaagaactgcttttaaaatttctatttaatgtcaggcatgtgggaatagcatgccaggactatcatccctctaaaacag

SEQ ID NO: 137290 - DNA, 1432 bp, Homo sapiens
aaccttgaggaaggaagaagtggcaacaaatattgaaggaaggatcagagaggtagtaggagaaccagaatactgtaccatataatataagctaaaaagggcatttcaggaattagggagtcatcttatgtcagatgccaaaagaagaaattgaggagagtaggaagttaaaaatccttttagctgtattaaagtctagtatatattaagcccatttgccatgcaaagttagaatctcattataacacaacctgcaatagtacagaatttgatacactcctattcagttttgtgctctattccaagaggatagatattcctggaagcatcttatccatgactcttctgctgcataaaccctagggacagcataagatagaagtttatgcatattctcttaacagatatacagcaggtcacagcagttaaacacgattgggtgaattcttccaccaagtttcagcaggctttttacccctccaaacaaatattcatatcaactttggtatgatgcaactaagatgcagaaacattagcctctcgctcttgaggctcaactcaagtcagtgaaatggggttggaactataatccggttccccagattgtctaatttgtttttttcttctctaacccattgagaaaataaagattaaccttcaactcaatatatcttgcctcctggacctaaattcagatcaagacgtattcctaagcttacattttagaattacagagtaaggtgtaggcggcatttgtcattctagtagtcaccacaccttaggtgggtggttgggcagaacagtgactgaaggatggagtgtgtgtccctaaacccgacacgccctgaaatcttcctgaattagtaagtcactttatccatatattcttgcacaataatggcgaaggggaagtaatttggatagctgctgataagacatttttgggcccgtgaaatggcaatacttcaaacagaatgggagtagctgtactaaaccaagcaaacagaattctttcgaaaatagttacggagtttctaccttgtagctgaggcttccgagcaagggtaaagtcagtcccttccctctgggagagataaagcacagtgcaagtaactggaatgcaaggcaggatgtgtctaagtgctatgtgagcgagtcatagcagagacattcttagagtgggttcttggaggaaatgtagagtgtaaaggcttgacagctcctaagaaaagcatcaatgaagagataatgaacctattcattctgccaatctaccaaatggtaagacgtaataagtttatgtagcaaatgaatagtgtaactgtgtctatttttacaggggacttgagctcatgagtaaagtccttccaagttgtcatttttgtttaaatttcccttgagcaataaagtaaaattcattcagctgccagtt

SEQ ID NO: 137291 - DNA, 1005 bp, Homo sapiens
tcctccctctgtgttctccaactcagcaaacagcatttcccaattgcatatgccaaggatatggagaattttaataagctaaaggttttggattcatctttgacactttttcccctccattctccaaatacaaactgctgtcaaatcttgttggctctactttcaaaatacatgtctaatctgaccacacagccacttctcatacttctcacttcctctattatttccacactaatccagcttttccctgggctgacaagtgcaagttctcttgcgtctgtctgtctgtctgtctctctgtctctgtctctgtctctgtctctctctctctctctctgtgtgtgtgtgtgtgtgtgtgtgtgtgtggtgtgtgtgtggacacaaagtggttggtggctgagagcttgagcctccttttttgagtcctctttctaatgacctgcatgccagattctaagctttcttaccatctgttctcgtatgtgtgttatttcatctgtaaaatagggataatgatcacctcatggatattttatgagaaataaatgagctatgtgtgaaaagcacttaaaacagtgctctgcaaatgtaaatactatactggtgttaggaataaaaataaaggaaaagaaagaaggaaggaaaacaaatatgttgtagatagtgaacatttctgaaggtacatatgtgaatgtacacaagcacaccttctcattacagcatgtctggggcacagtcatagaagtccaaggcatctgggatacgcatgcacacagtatacaggagagcagacctcccgacttgctttctctcctccatgccttgagtgtaggaccgttggcatcttaattaccctcccacacccaaggcttgcaaaaaagcgagccttctcttccctctccagtgcataggcatgagcacatggacaggtacaccaaagggaggtaaaccctctcttacgtgctctgtatgtggggtacactgttagcagccatcccatctgga

SEQ ID NO: 137292 - DNA, 1080 bp, Homo sapiens
tgggcttgtctgtgtattagaataaatgtccttattaaataatgtccatgtatgcaggtatccagagtgagacagtgagctttctctgtgttccccacctgctgtccacacacagggtggtgggcgggaaccagagccttctgatttgctccctcacttccttccaacctagatgtgagtgctgtctcaagtattaagccaaggattcaatgagatggagccttgcctacctatatgtatatatatggactgagtgcatatatgtctcttttcttgccttcctatatcttgagtttctagagtgtgacagatactctttttagtgttaaggatgcagtgacaaacgagagtcaaaatcactggatgtgctctctgatgggcagctttagaagaaaaattcagacgggcacaaatgatgggggccaaagagagagtcttcctattccccccactctgtcccctctgaggacagggagatgcacacattcatgaagatttacacttacagaatgtataggagtttgagcttataagctgccctttatcttccaggacatcctgagtagaactgtgagctgcctttagatgtctattacagactcttcttgaattagagggggtgaagagcaagggacccttcttattgctgatcttgtatgcaccccacacaatatggaaatgagaacagcctatatctttatattaccttactttagtcaaatagagatggactatacatgtctctgtttcagtctatcgctctctctgtccgtctctccatctctctctctctctcacctagggagtacaggtgcccatgatctgattcactcccctcctcccatccttagcgcctgagcctgagtgctttctactgtgacctcagcagtattcttcagttgttactctcttcttagctaagctgatctattcattcctccccatcttatcatttttgctcattgcccattgcaaatttatagtgttcaggtcagcgtagcaatacagtattataaatagtggtgacagagacagaaagagacacacactccatttcagtcctcaagttcttaaacattt

SEQ ID NO: 137293 - DNA, 1035 bp, Homo sapiens
tgtggtctatccatacagtgaaataatattcagccataaaaattgatgaagtgctgatacatgctgtaacatggatggatgttgaaaatattacgctaagtgaaagaaaccagacacaaagtgtcacatattgtgtgatttcatttatatgaaatatccagaatcagcaaatctatagagacaaaaagtataatagaggttaccagggcctgggggatggggagttactgtttgttgggtacagaatttctgtttgggatgatgaaatagttctggaaatggatagtcgtgatagttgcacatagtaagtgtactcaatgctactgaattgtatacttcaaaatggttcaaatggcaaatgttacgtgtaagggacttgaagatcattgttataagcctcctatttttctttctgcacaggtgccatggataacagaggctttcagcaggggagttttagtagcttccagaacagctccagtgatgaagacctgatggacattccagcaaccgctatggatttctccatgagagatgatgttcctcccttagaccgagaagtaggaggtatcattattggtgatgataatttatcttaattttttaaaatttatgtacaataaaattttatttttttttaattttattttctagcacacagtcctgtgagtttttaacaaatggctagattattgtaactaccaccactgacaggatacagaacagttcaactccctaaagaattccctcttgccactcctttgcagtcagacctccttcctccctaacccctggtaccagtgatcttttctctgtccttatagtttcttttcttttcaatgatgtcatgtacatggaatcacatagtatgtcactccttgagactgctttcactcagattaatgccttggagatatatctaagttgttcatttcttcttcttgctgagtagtatacccaggagtaggatcacttagtcatatggtaaatgtgtttaactttataagaaactgacaaaccagagtgccggtacca

SEQ ID NO: 137294 - DNA, 1051 bp, Homo sapiens
atcttctttcctaatatatacatttaagcctataaatttccctctaagcactgattttgctgcatccctcaatgttacttctcacatatattatattttcatttatttcaaaatattttaaaatttgtcttgagacattttgacttacaagttatttggaaatatgttgtttaatttccaggtatttgaggattttccagctatttttctgttattggcttctattaatagctcaattccattgtgttaggatttacagcaaactggctaggacttgggctgtatttcatgtttggtgtatctaggtgccagaggcttcaaattcctctagtgtgcttgtttttgtctctcctcttgattgtgagtttccctgaggacaactcctctagagagtctgtgtcttgcagctctttcaactgtgatccactattattatactggagccctgatgaggtggtggtgaagtatgggggaggtggtaattttataatcctctgattaaatgtcactgtttgatggaactgtgttttgtggctgtgaccttcatacatttttctccagtagtatactttttgtcctccctgccctctactctcttctttgactgcagcattcccaatgtgtttacttgaagccctgcaccttgttgagtatgttcccctgctttaggtgagataagaaggctagatgggatgggagtgggaggaatgtccttctcccaactgggataaggctcaggcaaagtattttcccctgaggcctttgttatggagaaatatctggcaagtttcacaatgatttctctttccctccccttgtcagagccaggagggattcttagatcttcactgtgagaacttggtggggttcctggatgtagagctttggtgtgggagctcccctaagaccgtggtccccaagagtttcttgtactcacgccagtccacactcagccttcagcagcttgttcaagttgccatttgtgtttctaccagctccagccatttctactccaggtaagcagatctcagctgtgtctctttgaataagc

SEQ ID NO: 137295 - DNA, 1022 bp, Homo sapiens
tcattagttaatgggtagatcatttctgttgccattcttgacagttaatttttaaaaatttattttctttctattaagttttaaaaatgctaagaaaagaaaccagctagatgtggaatatgaccaatgacttaagctgtttgtcatcaagtcagctatagatatcttgatgaaagtgtgtgaacaagttaaaccttttcactgatgaaacctaaaatagtagcaatggctgtcatcatcatcattgttatacattttaaaatatattgtttttcttattctaaaaatatgatgaatatttttaaattcacagtccacacttgtgtcagttaaccatttagaggtcttcatgtgctaaaagttttcaaaatattgctgtaggggccactggcattgtaaaaattgggaaatgatctggtcagatcagtgtttcagaaagaattctgcttatctcaaaatagtctattattgtgtttttatcataggatgcattaaaagttggtaagaatttctttatcttattttcacaataatatcaattgacctacactgggcagtctgtataatgaacacacactaaagatggtaagtttgccagagaaggaatggagagtagaaaagaataaaagaaataaagcatgtcaaactctgatactggtgcctcatttcttaatctaaattgtcattaaatcttgttttagtatgaggactgaatcatagccaccagccctctagttctcaaaggaagtaactgtacatggaataaaaaaaaaagtcccttccttggaagtgctgataaagcatttgaaaaacacatgaactttcattaaaagtcaataacgtggcaccagctatgcaatccataggaactatatatttttatgtaccaaaaaagatagtatctttgctaaatcgactgctaaatactatagctgctaaagtgtgaaataatcttatagataatgtaaatcatactagataatataagtgaattctttagtggtcttcagatactgttacag

SEQ ID NO: 137296 - DNA, 1939 bp, Homo sapiens
tgatatggaacatctagaggtatttttaaatgttcagtaactactaacatttcttctaaaaatgtgattgagtgattgaggaaagcagcattattctgtcactaattctgagttttggattttaggtcttgtcggctgcagcagcagctggtgtatctgtagcctttggagcacctataggtggagtattattcagccttgaagaggtaacaacttttcattgtacagcatgtgcatgcttttgtgtcaggaattttgtacattgcagcgcaataattttgtacataatgtacaatatctgtgtatatcccagtccctgagtgctctccccaacttggtgctttaccatgtgactagaaatccagtcggcagttttcatccattagttgactctcatgcctgcagcacaacatttcacctgaaatagtttctgcgtattgactgagtttgctttctcaccttctttcttctaggtcagctactattttcccctcaaaacattgtggcgttcattctttgctgccttggtggcagcattcactctacgctccatcaatccatttgggaacagccgcctggtactattttatgtggagtttcacaccccatggcatctctttgagctcgtgccattcattctgctgggcatatttggtggtctgtggggagcactgtttatccgcacaaacattgcctggtgtcggaagcgaaagaccacccagttgggcaagtatcctgttatagaggtactcgtcgtgacagccatcactgccatcctggctttccccaatgaatacactcggatgagcacaagtgagctcatttctgagctgtttaatgactgtggccttctggactcctccaagctctgtgattatgagaaccgtttcaacacaagcaaagggggtgaactgcctgacagaccggctggcgtgggagtctacagtgcaatgtggcagctggctttaacactcatactgaaaattgtcattactatattcacctttggcatgaaggtgaggaattcttttgggactcagtggctgcatgcgtagctgtgggttttggagggcagagcccaggtatcatacaatcctgatagctcatatggtgctttcaaatccccctcacattattcccccacccccaaagcctcttttaccccacacgttctcataatttgctagacacttgtacctctatctcaaattgtccaagccttgagttgtccaaatgccagcctcagtgatgaaattttaggaagaatgtttgctccttttctgtggaaaacatattttgcccctcaaaaatgatggtgaagtatttattccagtacatttcatattaaaatgatatctgaccaccacagtgttactccttatagggtggctttagagtttaccaataaagcacaatattgattgaaccaaagaagttgctgggattcgaccattttgactgctaaaatggcaatttcctgtggttcaacccaatatatagctaaatatagttttttacagtggtatcaatgttcagttgtcaagaagtgggatccacttcacaggtgatccttagttaatatttaagctatcaaaagtggacatcaggctggcacgttttactttaggtacctgttaccatttccacgtttcagaagaagccagaaaagaaaatttgttaaggtattttcctcctcctttctaggtttttgtttgtttctttcttttctttagcaccctaactaccaagttattttcctctattctctagagaaatggagattcaagccagaagagatagcaactcagtttaggcattattgtaatctctaagatgacgccatccatcccctcaatacagggaagggatggagaccctgagaaattttgcagtgcttcttgagttaattttcacctcatgcctgcattctttcacttaa

SEQ ID NO: 137297 - DNA, 1031 bp, Homo sapiens
tttttgtgtgagcaatgggctaagattcaatatatgagcatggttatgagcattccatttaaatcccagcaccagtctttactaaatcttgaccttgggtgggttacttaacctctctgaaccttaggttctttggcatttgggaataataatgcctgcctcctggggttataaagaacccatgaatcttgcatgtagagcgtccagcatagaacatggtaggtactcaataaagggtagtcattgttgataagaattcaaaattggtggaaatgtctgcatatatgagaaactccatctattttcctttttctttgggaaaggcccaatttctgcctccagttctgtgttggtctggagagttcaggctcttgcctgatggaccccgaatcagggtaagcttctttgcagtcgtccttgcctgcacgtcccagagaacctctagtccctgtagtgttacacacacctttacagccacttgctagcatagtgcatagttaaattgtcatcggcctgtttgctttgcagagggtcagtcctccagcccttaccatgtgccaagcaatcacatcatttctcactaaccatctattggtttctctttgcagatcccttctggcctctttatccctagcatggctgttggtgctatagcaggtcgacttctaggagtaggaatggaacagctggcttattaccaccaggaatggaccgtcttcaatagctggtgtagtcagggagctgattgcatcacccccggcctttatgcaatggttggggctgcagcctgcttaggtgagtagtgtttgcattaatttcaagttgctacccaggtgacatacaacagaagagtttattaaacacagttgactgtaggagaatttaaatgcccatccctttccagttaggtttgccattttccaagcacattaagaaagcatctggtatacagatgaggaaactaaaaaaaataaaaataaaaatcataataaaaaagaaaaggaattctactctcatactggggaaataat

SEQ ID NO: 137298 - DNA, 1042 bp, Homo sapiens
cctgtaatcctagctacttaggaggcagaggtgggaggatcacttgaggttaggagtttgagaccagcctgggcaacatagtgaaaccccaattcgacaaaaaataaaaagttagttaggtgtggtggcacatgcctgtagtctcagctactcaggaggttgaggtgggaggatcacttaagcctggaagatggcagttgcagttagtagtgataatgccagtgcactctagcctgggtgacagagcacaaaacccgtctcaaaaaaagaaagagagagaaaaaagaaaaacagaaggcttcttgtagatgttattttgagaactctgaatcgtctccattgtgaccttgctttcttgcaatctctggggtctgcacagttgtaggtgagacctcattgtttttggtaggtcagcttttcctggaaaggcccataattgtaagaatcctgtattttgcctacctgagtagactgtgtctatttctttgcaggtggggtgactcggatgactgtttctcttgttgtcataatgtttgaactgactggtggcttagaatacatcgtgcctctgatggctgcagccatgacaagcaagtgggtggcagatgctcttgggcgggagggcatctatgatgcccacatccgtctcaatggatacccctttcttgaagccaaagaagagtttgctcataagaccctggcaatggatgtgatgaaaccccggagaaatgatcctttgttgactgtccttactcaggacagtatgactgtggaagatgtagagaccataatcagtgaaaccacttacagtggcttcccagtggtggtatcccgggagtcccaaagacttgtgggctttgtcctccgaagagatctcattatttcaattggtaaggatttcagaaaggggatagtggaatccactgtggaactcaataaatatgcctgaaatgggggaagacagggaaggggggactggttaggagccagaaggatagagctagcacgtccatcttcaatttgttttttccttctgtttgaa

SEQ ID NO: 137299 - DNA, 1667 bp, Homo sapiens
gatttctctttcttttattataggcatgttgttttgaatgtggactttgtgggagggagaggattgttctgagaacagaaactggaagatacgtctgagttgatgggaccaacagggctttgctcctctgtgagggccaaagccattgatacttgtcgggggtgatgagggctttagcatctcaaggcagacatatgaagtatttactgctaaactatattacttactagtacaaatctgttggaattcaggggcagtctaagatttggtgagtgaaatgccatctggcaaaatcgagaagagagtgtggcctgagaggggaatgttcagcctcactgtcacattaagggtacctcaaaatacatggtccttccagtgtgttccttttccttcctccatttcactttgtcccctcttcttcctttctctcccattttcctggctttttagcactcagcttttttttataagtatgtatttactttttattatatatttggtcctttgggactttgtgatgattaagaatttattccattcaggattttaaaatgatgtgtttaatattttgttctcttaaactcttttgaagctatgctgctaaccaggtataggccagaaaggaggtggcccagtcagtaccttgctcacgtcagctaagggggacagtgatgtcatgtgggtgactcttcttcatttgaccaaggccagcctcctgttcttacctctgcccattcatttctggctatgggaaaactaccacctgttgagtgagccaatgaggccaggaagatcagaggggctgggttccggcccatgggccactatttgaatttctctgtagtaagctctttgtagggctggctccaactgcagtagccaaagaaaacctgtctgactcgacattttaatgcctgagagttggtgaaagttcagctgaagctaatgtctagacatcagcagtaactaggcatccagaaagtagcttcaaccaaagctaatagagcccaagtttccgcaggaagtttggtgctgagctgtccagagcagttgtttatctgagtgttgctagcccttagccatgctttcttagctttattctcgcctgttcctaggcatagcctgaaccagagctatggctcactgctcgctttattctactccctagtcatgcggaacaacatagtctaaaaaggaagatgtggactggggagttaggagacctgatttctattccctatgcttctactaactagcctcgagatcttaaccgctctgtgcctcagtgttcccatctgcaaaatggggatagtgttaattgccctacctacctcacagggttgttgtgaggataaactgagacaatgaattcaaagcaagttgacaagtaagtgctatgcaaattgtaagaaatggaaacaatcatgttaaaagcaatggaatggacattggcagaagggttaatggattgtccagccctttctctgtgtggcttaaacccaggtcgccattgctttatacattttcacttagcacagatttgtaattatgcatgtaataaagcacagccttatccaccctggtgtctggtgtgtttctaaagaccctaaacttggtagctattgatttctgatcagaaaaccacaggggcagagtggaaggttcag

SEQ ID NO: 137300 - DNA, 1069 bp, Homo sapiens
tttccttcccctctctcctgacctggtatcttctcactataagaactgaggtatcctgggcagagaaaggactagttgtgtgctggtcttcctcctgggttctcaatcctctccttcctcagtttcctcacagttttactaatcctttgttgtggcaccaatttctttattccttatgttccaacatactgttgtgtatgagtctctctcctgagcttgaaggcagggactatacccctagcagtatctggcatgatgcttggcatgtggtagtggctcagcaaatgtcatttgtctgacaacagctagacaaatacaacaaatacttttaagcccctctgggtggtatcttgacttttcctctgctcctcattttcaaaagactgagactcatactcaaaaagttattgcaaaatgtgatgttaagtcatgtctcgtttccatctcaacgggtccgttcttttttttcttctttttcttttcgttgtgtcaggccaattagtagtatcttcagacttctggaatcttgattggtcatcagcctgttcatgtcccttgctcatcttcatcaactccaaaagtggcgatcatcaggggatcgtcttcctccgaaaattcaagcaataccttaacccatctcaagtgttcgacttattgaagggtggacctgaagcagggtaagcctgtatcccatggatatgattgggtatgtaagggagtcttccttctatacattctaaactaaaacaggcttcttggaatcagttcttgtatttgggcaggaaaggtctattttctcaagtcaggacacaagcacataactccagagccttttgggttggctggtaggagggctcttagccctctcccagaaatcccttcaagcccatgtccaagcccctgtcagatttgctttatcttttttggttggaaaacgtaaaactatgcctcctaacctgagagaaagagacaaatggatactgctgtctacttttcctgccactctctttcccgggaccaaatagatatatctcctctatagacctgttttattttgggaccatctggc

SEQ ID NO: 137301 - DNA, 1047 bp, Homo sapiens
cttcaaggttaggttcaggttctgttttccatttaacctcatgtgccataaagctgcccaggcacaccagagccacatcctgaacccgaccctccctgacagtgctgctctgccagtagcaagccccagatggaggaagctgggcccatttctggccacttccacccatttggagctttgccagaggagtcgtctatgccaataatatttctgcaacagcatattatattatttgaagattagtagatctttttgggggggtggggcaggggacagtttctatagatgaagaaccagtgttggttgtacagctgttgggggtcatctatcccatgtgaagctattctttttccaaatcttgttgtttctgcatttgtgtcctccaccactcccttcttggctgacatagatatgcctgccagattgtcatcaagggtcatatttcaataaaaggtgctaaggacaaaaaaaaatctcatgtgttttaactcaggtgatggaagtctaaagattctgctgaaaagtactggaaaggaatttggtcacctatccatagtccttcacagataaacatatgaccagacccttacccacatccctaaacccttaccctggcctctgagggatggtattgatgctataccattcatcatccccagttaaatagcaggatctgccatagcctttttaggggaacagcttttagacatctatttcaagaccatcctgagtagggggtacagagtttaagccattggttatttctgttgttatcacagtattgaagcatggtatttttctactcagaaggatctcaggatcacagccctgccctttagctcactgatatatttcttcctctctggttactcagtggcaacatcacatccagtctaaccccatgtttagaatgcagaaaaagtcaacaataggtgtaatctcaggtatagacctaagcagtatacagagtctagttctggagtctagcctgatcgaaggtaagccattctttctagacttcttccaatcttgaattctgtctagtat

SEQ ID NO: 137302 - DNA, 1038 bp, Homo sapiens
cttcatgccttgataattccttacaatagataaggacattctttttctcttccactttctccccctccttgtttacctgcctctttgcattcatgtgggtgtgtaataggtggtagttgacagggtgagctgcctgggcagggaggccaaagcaagagtgtgttctggcagcaggactgccagtgtttgttcactccactgagccagttgtcatctgcatgccctatagtgcatggttgggtttttttttttaatttcttttgctccaaagcaaaagccccaggaccatcattgctattattgctcagtgctctggctgtcagcagctccacctgctctcctgtggagagctcagcccactctctgctggggctgaggttcgggaggcaggtggcttataagtgctttccttaactctctttatagcaggaatttgcctgagacttgttgcggttagaagtaccttgttatcatgtcttttattgtcagacaaatctgtgacttgtctatgtggagctagttgatcagttttccagcccaagatgccataagcacagcatttacagggcctggctcccaggcactgttaagaatccttcatgagggggggaggggggagggatagcattgggagacatacctaatgctagatgatgagttagtgggtgcagcgcaccagcatggcacatgtatacatatgtaactaacctgcacaatgtgcacatgtaccctaaaatttaaagtataattaaaaaaaaaaaaaagaatccttcattagatcccatgtggctgcttctcaagctgttcttctacctggggagcattctcattgtaattagaaaacattttgtgaaaaatacctgtgattgttatctatcatagcagggaaaagggaaaatgacctcccaatagtaggcacttaacaaatatttaagaagaaagaacaaataaatgaatggatgaacatttattaagtatttcttatataccagacactgccagacattatgtatctatttcatttaatcctcccaatag

SEQ ID NO: 137303 - DNA, 1001 bp, Homo sapiens
ctgcatcatgcaaggcccagggccaactaaggcccccagtggccggcctaatgtggctgagacctcaggaggtagtcggcgcaccaatgggggccacctgacccccagctctcagatgtcatcccgtccacaggagggataccagtcagggcccgccaaagcagtcaggggcccaccacaacctccagtgaggcgggacagccttcaggcctccagagcccaactcctcaatggagagcagcgcagggcatctgagcctgtggtccccttgccacagaaggagaaactgagcttagagcctgtgctacccgcaaggaaccctaataggttctgttgcctcagtgggcatgaccaagtgacaagtgagggccatcagaactgtgagttcagtcagcctcctgaatccagccaacagggctctgagcatctactgatgcaggcctcaaccaaagctgttggatccccaaaagcctgtgacagagcttccagcgtggattccaacccactcaatgaggcttctgcagagctagctaaggcttcttttggcagacctccacatctcataggacccacagggcatcgccatagtgcccctgaacagctgctggcatcccacctgcagcatgtgcaccttgataccaggggcagcaaagggatggagctcccacccgtacaggatgggcaccagtggactctgtcccctttgcacagcagccacaaagggaagaaaagtccatgcccccctacaggaggaacccatgaccagtccagcaaagaaagaaagaccagacaagtggatgacaggtctttagttttgggacaccagagccaaagcagtcccccacatggagaggctgatggacacccctcagaaaaaggtttcctggacccaaacagaacaagcagagcagccagtgaattggccaaccagcaaccctctgcctctggctcccttgttcaacaagccacggactgttcttcaaccactaaagcagctagtg

SEQ ID NO: 137304 - DNA, 1162 bp, Homo sapiens
acttgcccattcctttctcagagaaaaatgggaagattgaccagattgattttctttctcaaagagaagtgaggatgtgctcactgttcattaggcagcagcactcatttattccacaaatatttattgaacatctactatgtgtccagcactgtgatacgtgctcaggatactcttgtgaacaaagcagccctatgaagctgacattccatatctccagaatgaaggagacttgagaactaggagctcaggagggccactaagattcccacaccagttccttgcaagatgttctactttactgaaggaaaagagggggtggggcggaagctgcctgggaagtgatttcagctctggttccttcagcccacttcctgtccctttcttgctgtaggaggaacgcccctgtcagtaggccgcactcatggcatgtggccaagctgctggagggatgccctgaagcagccaccaccatgcatttcccttctgaagccttcagcttgtcctggcattctggctgcaacacaaggtgagtctagagccctcccctcaagacaggctggagggtagacaccttggacactcctcctcctctgctctagtccctgttggatgttagagcctcaagtactataatggaaaagcaagtgggagtccagagtacctgagttcaagtgctagtctcttgctaattctctgtgattttgggctagtccctttccttctggatgatgtttccttgaaatacctcattgggcttacaagacaccacactgtcctgcttttcattctatttcactagctgttctttctccgtatctcttttcctaattccttttgttctcctgtctcttaatgtaggaggaccccagggctcagttctggcctgcttctctgtcaatggcgactcactggtgcccttatctggtctttattacctctgtcacatagccaaagccttcaaaatagggaccttcctgaataaccattgttgaaacagttgcccaagaggcagacaacgttttcttcaggctgagagccagcaaaggtgctgcccttcactgccttttcccttccacaagagcttccctccaagaagggatttctgttgcaggttcagagaaactaagggttgcgtttaccccaattcggtgactttatt

SEQ ID NO: 137305 - DNA, 1047 bp, Homo sapiens
gatagaagatatagaaagccagtgggcagttgtagggagtaggtagaactggtgtggtatttaagtgagaggtcaggactagagattgtcctggagccttagaatgaaatttctaatctaaattaatctaaattctacataaatatttgcaggtggtctcttcatcctaaaaacataatctgcccttaacctttaccctcatccaactaccaatttcttttccttcacagccaaacatcttagacattggctctattttctcacctcccatttcctcactacagtctgccttctactcctaccactactatgccactgtcctctgtatggttccaaggtgaattaatgtcttccagattgaaaaaaaatccaaggagcgtagtttcttctccttttctaatgtgcaatttttcagtaagtttttaagccattattatatggtagaactggtgtcaaatcacatataagctagatgacctttggtaagttacttaatcacagtttccttttctgtaaaatggggataatgatatttactttattacatgagtaaatgagctgatatacataagccctttggaaatagtagttgcttaataaatattattttgtttcatcattgcagctttgggcactgttgagcactttctagaaatttgttttcttttattatcataacacttttttttttttgagatggagtctcacactgtcacctaggctggagtgcaatggtgcgatctccactcactgcaacctctgcctcccaggttcacgtgattctcctgcctcagcctcccaagtagctgggattacaggcacaccccaccacacctggctaatttttttatatttttagcagagacgggctttcactatgttggccagactggtctcgaactcctgacctcatgatccgcccaccttggcctcccaaagtgctgggattacaggtgtgagccaccacgcctgacgcataacacttctttttccttgttttcctactactagttatcttgagctctttttccttaatttgtcttatcc

SEQ ID NO: 137306 - DNA, 1079 bp, Homo sapiens
ttgcaactttgtcaaaaataagtttggcatatttgtgtgggcctatttctgtgttttctattcgattccattgatatatgtgtctgaccctctaccaataccatacagtcttgactgctatagttatcaaagtcttgaaattgggtatattgattcttactttattcttctttttcacaattgctttatcctagttgctctgcctttctggaacaattgtgtctatatcaagaaaatatcttgatgagattttgataggaactgcattaaatatgtataaacatttagagaggattaacatgtttactatattgcgtcttctaatccatgaacacagtgtgtcttcctattcatttggatttttttcttttttcagcattatgtggtttttagcatgcataccctatacatgttctgttagatttacatctaagcatttcatttttttgcagcaactgtaaatggtattgttttttatttgttttcacatgtctattatttgtatacagaaatgtgattgcttttggtatgttgatcttgtatgcttcgtacttgctgaacttgttttgtttgtttgactgattgattttgttagttttagattctttgggattttcaacatatgttatctccaaaaagcgacagttttattttatcctttccaaatctgaatgccatttatttctttggttgcttactttatctgctattaatatagccattctctctttcctttcattcacatctacatagtatattttttgtctttgtactttcaacctgcttatattatttgaagtgaattactgttgacagcatatagttgaatcatgtgtttttatgcactctgccagtctctgtcttttcattgatgtgtttagaccacttacatttcacatacttattaatatgttagggcttaaatcttgttttgttttctctttgttctcttttttactttctttactttcttttttctctgccttacagtaggttacttaaacattaattagaatcccattttgatttatctttagagattttgagtatatctcttcatattgattttttagtggttg

SEQ ID NO: 137307 - DNA, 1027 bp, Homo sapiens
taatggtcctagtcctttaaagtaggaattcaagaagcatcttgatcccctcttctctcagctacccacttcacctttatcaaatcagttaccaaatcctgttggttctacctcagatatgtattcattcaaatctcatttttcaaaacttttattgtaagttcaggggtacaagtgaaggtttgttacataggtaaagagttaataggtaaacttgtgtcatgggggtttgttatacagattatttcatcacctagatattaagcctagtactcattagttatttttgttgatctctccctcctcccaccctccaccttccaaaaggccccagtgtgtgttgttcccctctctaaatgatgacaacgtatggacaaatctcatacatttagcctccttgaacatattaaccgttccctgaatacagtgtcctctcatgtctctgcctttgcagatactgttctctttgcttagaatagtgtcccactcctttacctgctaagtctctgctcattgttaaaggtttctgctatgtattacaaactgttcctcatccctacaggagagctccgtcctctgtgcacttaaccacatctcatcataactgttagtttagatattgcttttctctactaaactatgatttccttgaagacaggggctgcattttaattatctgtaaagtctcagtatccacaacatgatagtctatgttaacaattaatgaaggaatgaatgatgtaactcaaatccaatttatcggtttttcctttgatgaattaatatatacttttggtgtcaagtctaaaaactattttcaatgtcctagatcccaaattttttctcctatttttttctaaaatatttatagttttacatttacattacctctacattaagtctatgatccattctgaggttttgtgtgcatgtttaagtatcagacttaggtcgaggtttgtttttaggcctgttgttgtctcattgttacagcaccatatgttgaaaaggctatctttttttccat

SEQ ID NO: 137308 - DNA, 1095 bp, Homo sapiens
gtctgagtcccaaagctgaagaaattggagtctgatgttcgagggcaggaagcatccagcatggcagaaagatgtaggctgggaggctaggccagtctctgcttctcacatttttctgcctgctttatatttgctggcagctgattagattgtgcccaccagatgaagggtggttctgccttccccagcccactgactcaaatgttaatttcttttggcaacacccacacagacacacccaggatcaatactttgtatccttcaatccaatcaagttgacactcagtattaaccatcacatccagctacaacatattctctcatatctctgtgccttttcacattctgctccttcttcccaaaatgatgactgctccttcctcttctttgtttagctaactcttattcaacactcaagacttgacctaagctttatcacttctaagaagtgttagggttgatatccccagactgtattaagcttcctcccataaacaacaccctttaatttcctctatctagaatcgtaacagcctgtttacttgtctatttcccccctgtaaattttgggcagtgtccatgtgttgtttttcctcctatcttaagtatagtgatcatagtgcttagcagggttacatgctcgatactcattgaatagctaattgaatggaatgaatgtatgccaggcaagggcagtaagggttattgcagtgaggattagaggctgagacttttaggggtattgggttgtcaggcatccaaatacttgaaagctgagatagtggattcagcaaaggaaagagatagagtcaaagatgagtgcaaggtttcttgccaaattggattgagttaaaagatactagttacaaatgctatttataagaactagcatttattgagtgcctcttagacactgagcatttgactaggtactttatatgctttatatcaaaaagaaacaaaataatgagctagttttagacatgtggaatttgaagcatctgtaagacgtccaaatataaaggacgagtagacagttgtaactatggttcttgggtacacaaagaaaaaaatgactcaataattaaattgaaa

SEQ ID NO: 137309 - DNA, 1061 bp, Homo sapiens
gctgaaagggactaaattggacctctggctgcctctctttcctccgtcccccacccctctggaaggaccacacagaaatagcagagaagagccactctaaagaaggaaattccacaaccttcattgactgaccactcagtctaacatttacctattttgcctggcaggaagttcttcctccttgcttatatcagtccttctcgttgcaatgtcagtttcttttcctttgctctgctttcaatcaaaattgagaacagctggtccttccctctaaattttttttatgtgcttagaagtcatattaaaccattcttcctgggtccaggtttaaccatccttggagctcctttatccttcccgcatgtatctgacttgccaaccatttcatcattttgccataggaaagcagcttaggcagcctgggcgaacagtacagcaaagcctaaagctttatggcttgtgctaatgggcgtgctaaatgtttagtagagactatttttgagcacgcaattgtgaacaatttaaagtggaccgtacatggaacccatttcctctcctggctcccccaacagggcctccccttagcagctgaaatgagttagtggcaatcagcgcaaagtaggaatcctgtggtttctgcccttccctcctgctgcttctatggcagctagtctcttaaaatgagcattctctctagaatagccagtaaatgtgacattggaatcagttggacaaagggtctaggagtcactttagctaaatagcaggaggtgctagtgctgaagcaccactggaggttttaggagaggttgaggggacagggttgaacagcgattgatgaaagagtttggacccagaatatttgctatccacagaacggttgtacctcagagttgtacatgccttttttgcaagtttgtagaggacgtttctggcctttgttcacttggcctttgtccactgtctcaactatgctaaagtgatgccaggaatctgtggcagaatcccagcttcagggccagttgggttcctaaaagagaggagggtaacttgccatgcat

SEQ ID NO: 137310 - DNA, 1118 bp, Homo sapiens
gaagcaggcctggaaggcttttgcaagaccctcctgttatttaggagtgtgggattcccgtgagtgtattgctggctgcctttacccattaaatgcttttggttcattttaatgctttaatttccttggttaaagggagagtccacaccttagggctgcgctggggtttagcaggtactgatgaccagaggaaaatctactgagtgctaaatgcaaacaagtcaaggactgaagctggcctgagagtcagggaccccttcccttaggtaggttttagcctaacttctatacatttgctgtaactgaagccccacccccagcagctacattccctggccttcccagaacattgctgtgggcccccatactagatttccctccttcctctggacatctctagaaacatcttttctgcattgctgcaaactttcattttaactccctctctgctattacttaactcaaggacagaggaaatagctgcagtccagaaacagaataaaacaaagaagaaagaaagagaagaagccccaaactcctcccaaatctttaagaaaacaatcctgtaggatttggttgggaattgccatgcaatgtggggaatgtgaaacatgtgctaatcatggccctttctgcttggatcctacctgacttctctccaccacccccagccagctgggctaggctaggcccaggggagccacaaagctgccagcttagaaaatggagacaaatgaggaggccccagaggacaaagcaagacttgttactagttttgaggccaaagcaacacatacagtatttaagggctatgggggtagatgctgcaaagcctggaatcctagctttgagcttaaagattcaggctaatttgcagtgactgactgtgtcagaggtgtttgaaccagagcaactccatcttgaatagaagctgggtaaaatgaggctgagacctgctgggctgcattcccaggaggttaaggcattcttagtcacaggatgaggcaggaggtcggcacaagatacaggtcctaaagaccttgctgatacaacaggttgcactaaagaagccagctaaaacccaccaaaaccaagatggcgaccagagtgacctctgg

SEQ ID NO: 137311 - DNA, 1033 bp, Homo sapiens
attccatttaatctctttgtagccttttaatgaatgacaaacctgcatgagatgcagcacaaactggaagatggcatactggcctcaattttgtaagatagcccttgtaaaaatattgcagtaagcatcttcgccaatttctgacacagcataactgagttagagttctacattccatggatagctatttgtcagaacttttttttaatattacaagattccaaggtgctaaacacagatgcttggaatgtaatccagcatttgtggttcgctgtcatgtaaacagtcaaagtcacagcctgattctgaattcattcatgggttttctggatatttcccatgctctttttgaagaggggcatttatgtgaattagcacttttaattcgtctgacagagtgatataggcttgtataaaagcaataaaaatacagggtcccaggtggcatttattgccacacagatgaaaagccatatagttggaattctcctcttatgagaggcttttgggatgtggagggaaatccctaagcttagcaatctgacattatagtacagtggatagagggtaacctaagtgtcagatctgagtttcagtttctcctgtgctagtcactatgaatatgatctgggacaagtcctttcacctccttttacctcagctttcccttgtgtacaatgggaaaaaattgtaccaactttgtggattggttgtattataaatgagattaacaattctataccacctagcccagtgcttgatatatggtaggcaagcaataaatcattgctcttaggatcagttctagttgataacagctaagcctgctggagttgccatatcattttcctcttgaagagtgaaagaagtaatagcatgtgtatagtttggggattcaattcctgggtctctgtagaaactggaccaccctgagtccctcagactgtgctgggagtttataatcattcatgtgaaggacaatgggaaaacattgggttgcttaatagcccttgctggtacctaagcaaagaca

SEQ ID NO: 137312 - DNA, 1086 bp, Homo sapiens
agaaacaagggagacaaatgttaataacatattttagttaactactcaatatatctaaaatattaacatttcaacatggaatcagtataaaagttactaatgagatattttgtgttcttttttaatattaagtctttgaaatctggtgtgatattaaacttgacaagtgtgtgtcaatttacaccagtcacatttaagtgctcattagtcacacgtggctagtggatggctactgtactggacagctcagtgctaggccttgctcccaggtatactgaaatgtattagaaacctttctgtgaagtgatgaggaaaggcacataaactgcagtgagcccaataacaatttgttttgcagaaagctgttctttaaattattacccatataggttacaaattatgagattaaaacccgatgtaacattaacagtccttcaagctccttcagagtctcctccactggatttgggagagtaactctcttaaagcaggacatcattttgattctgcaaatattctccaaggcaaggaggttacatatctctgcagagtgtctgtgaactgaggcctgaagcaatttaaggtagggacttcagggtcatcaaagaagaagcacatgccactcaagtcctttacgtaatctagaggaaagaccaacaaagaactagctaatagtctgggaattatttctcgtttccctgttctctgcccttcttcaccatgcagtctattctcccaagacactccatctctcagaggttcccaatctctctctatagtctaggggatgtataactatataagtgagggtatgtgaccctatgtgagattaggtgtgtgctgtcatgggtcagctatgtaaagtatggagagtgagttggcagccccaaaagcatagctatgaataatcaagtaaaaagattctccccatttcatgtcctctcagaagaaggagacataaattaatggggcctgtaggcactgagctgacctgacaatttccatcacagagtttccctgtagttgcaggggctgtctggcataaatgaggattccaacctggaatttgatttttctcctttagag

SEQ ID NO: 137313 - DNA, 1033 bp, Homo sapiens
ttgagatttttcaaacagctgccagaaagcccatggtgcaggagaagaggccctcatgtcttgacctcagagagacccactggtccttaatttaatgggagcctgatatttcctcagttacagcagcaaattagaatttggggcggcaggatgggtgggtttgaggaggtagtttactctagaaatagacacagtgacagctaagtaacagacacccaggatggagaaatcataaaagcaaagacctggcaatgtggaataggcagatacccttacacatgaaaatataagattgtgtggtattgacatgccagattttgcttagccattctattattggagatttaagttattttaaaatttttactcttataaaaagtgatgctgtgaatggttctgcacaaattgcatttcttctgtttagagttattgctttctggtatcttaccaaatgtgtaataacgaggccaaaaggtatgagctgttttatagctgctgttacatgttgccagattgtactcccaaaagattaaactgcataagtgtgcctgttttcacagatccctgcagcactgaatgttatcatttttaacctttttgctagtttagtaggtatataagtatactatccatttgttttaattttatttaatgaggcttttcattttttagtgtcataatttgctgtttcctcgttcatcttctttcaccacttctcaagtaaaatctgggtaatgaccttatatatttttatccattctctatattttggatagtcagcttcatcatttatatttgtcacatatttttccaattttattgctttcatttttatgtatgctttatcatatttcactatgcaaaactattcctttttacatttatatattcaaatccatccatcctgtctctaatgtttctttcatttttcaatattcagaaatttaccactcctcaacagctgggacaaatatgtgattctgtcttccccactcccccagggtgtttttttcttttttgtgtttaatttttg

SEQ ID NO: 137314 - DNA, 1270 bp, Homo sapiens
tgttttttgccaaccacacagtttaggaaagcactcgaatagagaagcacaaggtctcccaagctgcttctgcctgagttgttctgctgcgctctagagaaccaagactgaaggcctggctactttctttgtgtgtgaagggagggtggggaaggcagatttggggagaaatacctttttactaagacaggggtggttggtcagttccagcttaaagataccttggtcacaccttcagtggaggcattcagctttctagtgagcctgacattccacagagttcaggccagtctagagagcctaactgacctacccactcctctggcttcctgtttttctagcagccagagtgcctcttgagcgtaactttattgtaagcattgttgagtagggggaagtgtgtgttgagaagtcttgaatctggatctcctcatctaacagcctgcattctctctgacttcaaaggctgggcattcatccaagaatgatgctcttggcctctgctagaaggtggggccaggtgtgggaatgcaaacagactgggggcctgtatgagggtggaaggcagcaggagactatgtgaccatggagaggagcagacgcctggtacttggccaggctccaccttacaaagggtgctccttgcaggaatgttttcaatgatgtctgtcagggagctagggctatttgaacctctaagtctgaattgggtgatgtttgccataagcagtaataagcatggaaataatttactctgggaccttgactgcattagtatgaaatcactggcatactgatggggcctattgatcctcaaactgtttcctgaattctctctgcaaatccattctttcctgtcccagcaaaccagttgtcactgctgactgtgtatgtatgctgctgccttgaaacacagtatgttggacttattcattcacctttctatccaggtcttcagctcactgagctgtgaaatttccccctcccaatctgtttacttttcttctgactttgtttgtaagcaaacctgtgtacataccttttcatgtgtttacatgtatttcttggaatgcatgctggctccccgaggctatttgtaagtctgtggctcttttatataaagggatgtatctcctctgagtgtacctagtcaggcacttcaattgagtgcagtgggggtagtccttggggcaggggagttgctgtgctggaagagtgattgacccttctcttggacaggaaggctttggtaagaccttaattgaattat

SEQ ID NO: 137315 - DNA, 1055 bp, Homo sapiens
attcattagcatgaatgtcttatttatttgtgtctttgatttctttcatcaatgttttatagttttcagtatacaagtcttttgccttcttagttacatttattcctaagtattttattattttaggtgctatagtaaatgggattgttttcttatttttttgaggtagtacattgttagtgtatagaaacactgttgatttttgcatgttgattttgtatcctgtaactttactggatttattagttctaacagtttttttatggagtgtctaggattttctccgtataagatcatgttatctgacaacatacaagatcatgttacctggtaagtaaaaaataattttacttgtttctttcttattttgatgcctttacttattttttcttgcctaattatgctgggtaagaattccagcactatgttgaacagaagtggcaagagtgggcatttttgccttgttcctgatcttagaggaaaaactcagcttttcaccattgagtatgacattagctgtggggttttcttatatggcctttattttgttgaggtaatttcattctatttctagtttgttgagagctttttatgaaaggctgttgaatttgtcaaatgctttttttgtatctcaaaatgatcatgtgctttttatcccttattctgctaatatgttgtatcacatttattgatctgcatatgttaaaccatctttgcataccagacataaatcccacttggtcacagagtatcatccttttcctgtgccattgaattcagttttctggtattttgttgaggattttcgcatcagttttcattggggatattggcctttagttttctttttttgtagtgtccttatctgtatcaggtataatgctggcctcataaaatgagtttggaaatgttcccttctcttcaatttttgggagcgtttgagaaggattggcattaattctttttcaaatatttgataaaattcaccagtaaagtaatctgttcctgggtttttctttattgggagatttttaatttactaattcagtctcctt

SEQ ID NO: 137316 - DNA, 2005 bp, Homo sapiens
aagtgaggggtggcctccctctctccctctcccctccttccttctcttctagcacaatttatttatttaaatgtttattttggggatagatgataaatgttcatggaacaaaatttttaaaactatataaatgggtacatctttcttcattcatgtccctaaaccacctaatttcccttcccagtggcaatcactgttaccaattccttgtgtactcttccaaagacacccttccaaagatacattatatgtaggcatgttgtatatgctcatatacgtgcatgctcagtgtctctgtttcctcactgcctgtcttcctgaatcctctccaatctggcttccaatgaggtcttcctgagggccaaatatactggccttctcactgttttcatcatccttgttttctctatacaattattgtttttcaataatttgttgaataggtaatgtagttatgtggtttaaaaggtagttagtatgaaaaggcggagaatagtttcccagtcatccttgtctctcatctgtccagtttcaccactacctcccactgtgcttagatatttctgtgtgtcttttcagagcctctctatacatacacaagcaaatgtcaatatagattctttattttgccttttatacaaaaggtagcatactaaaacaatcttttgcacttcgcttttttcacttacatatcctagagatctttccctatcaagcatacagaaggttatctctattttttaacagccacattgtatttaattatttaaacagttcttagtattgctagtcattggcattgtttccaaaccattcagactcgaccttctccaaactctgctgccagtatagctcctgtaatactgaactctcctgtttctgcatcttctcttgctgtttctccattctcctctgtaaatcgactgcctctcttatctctatcctgtggatattcctcaaggctcagcactcagtccctccccccgcactcttttctctgtttcttctttccctattctccctccccccatcctttccccctctcctcttttcctcaagaaagcaacgatgagatctcataactcctgaatctctagtcttaatcttttccactgtctgatagtattcactggaatatttcttttttacctcataccccagtatgtctaaaatggaacttatcttccccttgtaaaatgggctctttccttggcttccccactcagctagcattaaaatcatggagtcattgcttactcatcccatatcccacattctgtcagtcttgcttcctttacaatagccctcatatccacctgcttcttttcaattcctgctactcctaccctcttccaagctcttattactttatgtctggtttctggattcctggctggcttccctgcttctaagatcactcctgttaaatttatcttataagacacttcttctatccaagaattttagtttccctttctatacaatgaggaagctggactgactggttcatctcagaggtgggttaaaatcctagccctaccattccttccacctccgacattctagaccagaactccatcctttccacctctaacattctagaccagaaatcttcccagtgtctccccacctcccaccatttccactctctgtactgttctctttcacttgaattgttgctatggctccatgctcccagcagtgccttgaaaaaatctttcttccatattggtcctagagtctttatcctaaattaacttacagttgaaaggaatcttagaggcaggccatccaagctgaccaacactaacctgctgcctgagtgccattaataacacccttgaatttggttggtcagactgttcttttgaatgcttccattgatggagaacattatctcataagccagccctttgtattgtcagatagcaagagttgttctatatctcctaccacaaactgacaccaactgatctgcctttatgatactctattattaaaaact

SEQ ID NO: 137317 - DNA, 1037 bp, Homo sapiens
acattcagaacagttctggagaagcctatttaatccatagtgtatcattgattaaattacacaacctaaccatcatttataatgtcctatctacaggaaacagaattcaaagctccaagctgcttatttatagaagatattcttgggaaacaatgcattcataagttaggaacaaaaagtgctctagatagctctgttacacagttctgggggagtttgggattctgctaccattagtgcccaaggtgttcatacctttgatgctgggaccagatgtgtgtgcatggttacatttccctctgaaacggaattccaggtttccctgagagttatcttgtaatcagcaagtaacgtttttatattggttatgtcggtatcaagatcactttcactcagcttccatggagccaaaattttgtctcctggtgctccctgagatatactcccttcacacataattcaataaaatcattaatgaataagttgagttactattttttatggctaaagattgggttccaaggactgggaaggggtagaggtttgtctccttatacctctttgccctatccagtgtaaataggccaagtggaaaaattgtcttacgcattagtgttgcaacggatgatccattcttcctcacatcacactggcatgtttgcttggtcagatagccatcctggccacgcactgaagttgcaaaagtcaagatgacttgatctttcaaagtgagctctaacctctcccctttgacttcacatccacatcctcctctttcactgtgaatctatgactgtaccatatcgcaacacaagtactgcctagtagcaacagagacacattttccatgcatctaggctgtccttctttcatgtcaagtctttagttcccatcccccacccaagagcaccagttgcttgaggcctacattttggaccgtctcattcaagtgccattgcccctttgttcattcattgactgccctgccctctgtccaaaacccaacttttttttcttttttggtcacagtgagccct

SEQ ID NO: 137318 - DNA, 1114 bp, Homo sapiens
ttgttaagctgcaatcgttttccttttagcgatcatccatgggtcctagctgtatcctctggatagcatcacacagaacaagggtgcttcctctgtcttgggacagcccttgggatatctgaaggcaaatattatatcatcttgtttcacttttctagcagagccctagctctttcagctgttccttatgggatgtagattccagcctctcctcctgtttcctcctcccactcatgatgcacttcagcttgtccatgttcctcttaagttatggatcccacagctgaatactgtaactgaggagaatctgaccacagttgagtatgaacattctttaaaaaaatacagctgaagatcactttggctctttctggcggccatgtcataccaaggccctgtgtcaaaatcttttaatggaagtagctgtgctgctattaagccatacctgcctaaggcctctatgaaggcatctgggacagccacataatagatttgggagggacacatttcatctcctactatttatttagaattgcctctgcccctagccctggccagccttggtaaatgcatcgtaggggagatgagagagaagatataagccctgacttcaaggaacatgtatgtttaaacaaagagattattaagttacagagaaggaatttgtataatagaagaaggaaatggcatttaatgaatagtgtcaaagtcagaattccagatcttttttatttcctttttacctctctgaacttaattttttccccttctggaaagaatagttgtctccaagattgaagatgctaaccatatgtgccatacactcttcaatttacagagcccctatgtaggaatatagagacagcagtctctgtccctatccactgtcagatatatatttccctgcatacctccactgacactgattggaaaagcccctgctgttgctgccatccttcagctctgggttcttctgtctgtacctggaatacacacaagagtgactcctgctggaggtcttgcatccacagcctctttctccccatctccccacatttaccagttgtcatctgagctggaaaaatatctttcgttactactaaagcctcgatca

SEQ ID NO: 137319 - DNA, 1100 bp, Homo sapiens
ctatttgcagagtggggcctaggcataactgccccatctctattatcacagatgatgagacaatgaattaggcaaactctaatagtgtttgccatccttagcctaggacagtggcagggcatgctcatcaagttgttttagtctgtattccattcctagtctgaccttatttctagaagcacacagagaggcagttgagacttcaagaggatctggataaactcagatagaggttgtcttgtggctggaagtaaatttggctgtgattttgaattcttattgggtgcagaggtggtattatgtgaacaatgagagttcctgtgaaatcttttgagctgtgttacagaccagtgcctggcactcacaaagggaccttcgtggggtgtgcatctttggagcttagtccagcctggttacctacatgaatcccctcctcatttctgcctctagaatcaccaaagatgtccactacctcagtttcccacctgctgccctatcccagaaagtagagggcattttgaggcatggattagaaatccatcagagagatacaaagaaggttggagggaggtggagcaagaagggtgggtggtatggctggtaacccttggctgagctttgagtcgatactacttttggccctgctgggttttcataatacacctggtaccccattgagagccacatgtatgcttgctgaagttaaaaaaggtcaagcctattagaggattttccctctccaaaacttcacacaaagaaaataattcaactccattgtcccttaaaaaaattaaaatgatttccccccttgccttccccaaccccctccccaggaatttctttaaagaaaaaagagagactcagacttgagattggaggttatggatgattatctggagggaacatcatggcttttatagttagacttctttagaactaagggaaaaaagatgctgacccatctgagaaaagttaatgaagaacagcagggattatgggaagggctgctctcactgcctgcccctctacccctcaagcaccaaggggcagacttaactcagtgctcccagagtaattctgttcttggtagagacctagaa

SEQ ID NO: 137320 - DNA, 1220 bp, Homo sapiens
gtgaggcagtcaggaaagattgtggagaaactgatggaaaacccgagactgatgtattcagtggcttacctatgtctatcatactgagagtcaatggcagtcctactaagagagtttctgattcttctgttagtactgtggtttgtgaaggagcacagggcaataactttcagggatgtatctagtcttattagcctcctaatgcagtgtccctttccatgccagcctgtaattccatacttggtgacggactgggttgtaggtacactctgatggagtctgggctcagagtaggaaaggactattttgatgaccccaaatcacttgtgatgatctcaggtcagggagagacagaggtaaggtgcaggaagcatggtggaaaatggcagagaacctcctttgtggaaaaaaaaccagaagcggtttgcatcagggatggtgtggcatacatgctcagagatatcttgtggcacaagtggagatatctggggagtgggggaatttgaaaaagtagtgattagtgggggaagagggtatgcagtgtgaaagtctagttcatagttgtcatgggagaccctttggaccaggaaatgatcaagttggggaaatcatcaattcctgctggttcctatgatttccctgaatatggggaattcaactgcctgatttatggacacttgtatagtaccccccgacagtcaagtggcaaagaaagagaaaattttttaatactattgctggatgcggtgtcttgcacctgtagtcccagctactcaggaggcttaggtaagaggaatccctagagcccaggaattccaggctgcagtgtaccatgattgggcaacatagtgtgaccccacctccaaaaaataaaatacgattgattatcctaaataataagggatagtttatgatgtttccctatattgtggtgtttcgagtgagatcatggtaacaagtaaaagatacatgacccataaaggaatagggcccatgacattggcattattgattcctttggttaacatgttacgctacctcattgactcagaagtactgtctggatggaatggggattctcttctaatcagatgtgtctgatgatatgtaggctcatgctaacatattttcccttttcttggctcgtttatggtagatgtttctatctggcatagtgaagcaagtggggctagttactgccctggaacaaaacagagtgg

SEQ ID NO: 137321 - DNA, 1529 bp, Homo sapiens
gcctagaacagtgcctgaaatttggagacatttgtctttgatccacagattagaaatgtctacaagtgtattcccgatttctgagcttcataatgtacctgggacaatctgttattccctcaggctctcatctggcctcacagtgaaactgcattcgataattcactgaaggcttttccaattcaaaatggttgatgagccatagtaggtgctcaataagtatttgttgattagaggaatggatgaaccaataaaaccctattaataagaatttttctttttaggtgaatggcatagatgttgttcagatttactttgaaagaatcaagtatgtgaatggatggatgaatggaattgtgaagcacagatgagctctttcacactccaaggacacagctcatcctatgcttttggacacttcttccctgtttattacaatgactattctccaggttgttgcactaccgctgtatctgtacataattctaacttggcacctgtggccttttttgtgctcttatgtgtctgtatttcccggcagagtatacgcccttgaatgccaggaacttgtttccttagtcttttttatatatctagcatataagatattgcttagaatatggtagacatcactgaagatttgtttcagtagttcatattttgtaatgatactgaatggttaaacaatccctttctaatctgtctagcatatatgtgacttttgtttatcaagtgtcacacaactgcttcaaggcagctgtgagatactagaaagcaaaaattcttactcctatgtctgtgtcatcccagatgtgtgcctccagatggcagtatactacactatctgtaaaatatatttgcaaagccaggcacagtgttacgcgtctgcctcaggaggctgaggcagaagaatagcttgagcccaggagctttagtctagcctgagcaatataatgagactccgtctcttaaaatatttgcccaaacattgaacctaaatttgaccatgcccctagaaataattcctaatctttagaaaatagggcagagaaacattattttacaccatggagatgagatcagcagaatccagactataagaaactacaggacacatgacctagtttcttctgtaaataacttgcaaggatgaaagatggaggatgaacctatagatttaaagagacttaagagacatattaaccaattgttaattggatcttatttgaattgtgatttgaccgaactgtaaaacgaatacatttatgagacaatcggggtaatttgaacattggtggggtatttggtattagaataatggttttatcattatgttagaaagaagggtcctcatctacattctcaaacatctgtggctgatatgatatgattcttggaatttgcttcaaaataataagtctggatgttaagtgcattggaaatattgatgaaacgaaattggccttgataattgttgaagctgggtgatggctaaaatgatggttcattatatatgttcatctctattt

SEQ ID NO: 137322 - DNA, 1068 bp, Homo sapiens
atgtggtcactggactgaaaactctttcgtgggtgggaatcagcctgaattatttccatgagtctagagtctgtaacatggaatttaggatattttatgtcttaaatggtcactcctcttttacaaaacttctgatatcgctgctttcctgacttttttacatcatggtatacattggcttataacccctcagttgctgatccagactcattgattgcatctgcattagataattctgtggaagtgaagtgcttgatgcaaagtgattgatgtacataataagctcttggtacatttgtcagttggaggaattattaacataagcctgctaattgtgtgttggtttgtttttccagatgaacagcaaagatgttcagtattgtgctgaaagaaacattgatgtgaacccagtgatcagtggaattgtcaagtacaggtgagcacttctgtgttcccaagaagacagctcatctggtttcttcctgcatcttgggacactccttccctgtctataccactgactcttgctctggttgttgtactcttatacgtgaatagactcttaattcagcacctatagccttttgttgtgcttttttgatgtgtctgccttcattagactatgatgtctttgagagcaaagactatttttccttactctttgcatattctgcatctgagacactacttgaaatatggttggcatcactgaaggttctttgattcaattaatattttgtaatcaccgtgtggcaaaacattccccttccaatctggtgctagtagagtatatgctatctaggcaccatgtgtgtggcttttgtgtatcaggtgtttcagaaatatttcaagacagttgtaagatgtttgaggacaagaattattactcctatttctatgtcataccacacagtagctgcacagttttaagattatgccatcacctagggtaatgttttgtagaatcagtccttcgtgtaacaactctagtgtttttgtactgttgatgatttgcttaaattttattcaaaaactatcacttgctataaaggtaattgtaaaaataaa

SEQ ID NO: 137323 - DNA, 1060 bp, Homo sapiens
cactggaaagggaaaatcaaaaggcctgtggatttcaaattaatgagtgatcttaagttgcatttcctaagttcggctacagactcatatatttcatgagtccctccctacccattccttgcctctcccttcagttgctgggtttctgaatttctgtatagttaacccttatcttgcctcccatttgttcaatagaaatgatcacttttacttgaatcttttggtagaattgtataccatgtgttcctgtctaggtttaatcatcagattgtggtcaaattgctctgccagactgtgtgaacaaaaaagtgaatggaaattttcgttttaaaaaataatacttttggacttagcccgtggctaagaagaagtaaggaagccaagcgtacggatagcagcgaggggtcaatccacgcccggcgttgggtcgggggtggaggagtcggaagtggttggggtttgggggaggagatccgctcacacacaagaggagagtgttgagccgccatatctgctgctgccgccgcagttgcgaatgcagcatcggcgcttagctgcctccgcggtgcagctaaggttcgtgtcgctaccccttggcccttcgctcttgctgccttaaccccgccggcggagcccgctcttctggcctgttgagcccgctccctcactgccacacagcaagttccgagaccatggattcgggcagcagcagcagcgactcggcgcccgattgctgggaccaggtggacatggaatccccggggtcggccccgagcggggatggagtctcctctgcggtggccgaggcccagcgcgagcccctcagctcggctttcagccgtaagctcaacgtcaacgccaagcccttcgtgcctaacgtacacgccgcggagttcgtgccgtccttcctgcggggcccgactcagccgcccaccctcccggccggctccggcagcaacgatgaaacctgcaccggcgcgggataccctcaaggtaaaaggatgggacggggggcacctgtggaaccttcccgagaggaaccgttagtgtcgcttgaagg

SEQ ID NO: 137324 - DNA, 2350 bp, Homo sapiens
aggtggaaatggccctagaagaatcatgggagcacagtaaagaagtaagtgaagccgagcctgggggtggttcctcgggagattcagggcccccagaagaaagtggccaggaaatgatggaggaaaaagaggaaataagaaaatccaaatctgtgatcgtaccctcaggtgcacctaagaaagaacacgtaaatgtagtattcattggccatgtagacgctggcaagtcaaccatcggaggacagataatgtttttgactggaatggttgacaaaagaacactggagaaatatgaaagagaagctaaggaaaaaaacagagaaacctggtatttgtcctgggccttagatacaaatcaggaggaacgagacaagggtaaaacagtcgaagtgggtcgtgcctattttgaaacagaaaggaaacatttcacaattttagatgcccctggccacaagagttttgtcccaaatatgattggtggtgcttctcaagctgatttggctgtgctggtcatctctgccaggaaaggagagtttgaaactggatttgaaaaaggtggacagacaagagaacatgcgatgttggcaaaaacggcaggggtaaaacatttaatagtgcttattaataagatggatgatcccacagtaaattggagcatcgagagatatgaagaatgtaaagaaaaactggtgccctttttgaaaaaagtaggcttcagtccaaaaaaggacattcactttatgccctgctcaggactgaccggagcaaatattaaagagcagtcagatttctgcccttggtacactggattaccatttattccgtatttggataacttgccaaacttcaacagatcaattgatggaccaataagactgccaattgtggataagtacaaagatatgggcactgtggtcctgggaaagctggaatccgggtccatttttaaaggccagcagctcgtgatgatgccaaacaagcacaatgtagaagttcttggaatactttctgatgatactgaaactgattttgtagccccaggtgaaaacctcaaaatcagactgaagggaattgaagaagaagagattcttccaggattcatactttgtgatcctagtaacctctgccattctggacgcacgtttgatgttcagatagtgattattgagcacaaatccatcatctgcccaggttataatgcggtgctgcacattcatacttgtattgaggaagttgagataacagcgttaatctccttggtagacaaaaaatcaggagaaaaaagtaagacacgaccccgcttcgtgaaacaagatcaagtatgcattgctcgtttaaggacagcaggaaccatctgcctcgagacgttcaaagattttcctcagatgggtcgttttactttaagagatgagggtaagaccattgcaattggaaaagttctgaaattggtcccagagaaggactaagcaattttcttgatgcctctgcaagatactgtgaggagaattgacagcaaaagttcaccacctactcttatttactgcccattgattgacttttcttcatattttgcaaagagaaatttcacagcaaaaattcatgttttgtcagctttctcatgttgagatctgttatgtcactgatgaatttaccctcaagtttccttcctctgtaccactctgcttccttggacaatatcagtaatagctttgtaagtgatgtggacgtaattgcctacagtaatgaaaaattaatgtactttaatttttcattttcttttaggatatttagaccacccttgttccacgcaaaccagagtgtgtcagtgtttgtgtgtgtgttaaaatgataactaacatgtgaataaaatactccatttgaaactcttcggttatttgaaatgcttttgaataatgtttaaatgtcattatgtaatgctattcaattagctttattactttctcaaatagttgaatatgttctatcacttaaaaacttaaaaactcttcaccacttactgttttaagtgaggaatttacaaacaatgcataagtgtgtattaaaggaataattttaattttgagaaaaaaacgtatgttaaggctcttcccagtgggctttgttttctctgtccaagtccagtcaataaaggagctcttctgcttccccacttgtgatttgaaaatgaaaggctcaggccgtctttatttgtatagcagtagttcatgtaacattatccataggttcttgaagactacaacattaagcaaaacaatgtacagcaggtgtacatcgtacaacaatgcacaatgtatgacattgttcaatgttgttatgacattgttcaatg

SEQ ID NO: 137325 - DNA, 3008 bp, Homo sapiens
tgttgcaattagagaccccaaacagagacctaagcatgctggacaagggggtggagatgcaagccggcctgacaggaggggccttgaataggggagggacggaatagagacgcattgcggaaaaggtagggggccggtgtgtggggcaaggggtgggaccaagaggcacagcgcatctgtgggggagggggcgtagaggaaggggaggtgctgttgtatagtgtcgacctggttggtggtggggtggtgtgttggcaaagggggcgggaccgccttccagcgcacatgcgcatcatggtctccaggacgaagcttttgttgggaaagcaggcgggactgactttggctcttcagtgtttgcgcatgcgcgtaacgtcctgaggcggtgggtggtatattaggcgaagaggcggggtcgcccaagctgccgcgctggcattttctcctggacaaggagagagtgcggctgctgagagccgagcccagcaatcccgatcctctgagtcgtgaagaagggaggcagcgagggggttggggttggggcctgaggcaaggtgagaattagcccccagactgggcatctgccccctggtgcgggcccccatttttttttatcccgatcccttcaccctggattctgaatccccttccaccccccaaaccccaattcaatgcccctcccgatccttcctgattcaaaacccctgtccgatccctcccatcgttcgaaatcctcagattccttgacctcgatctgtactgttagatgattcctcctgactcaaaacctccatgcaacttcccaaatgcgaatcccaacccaaccgcacccccgctccgaattcagaactcatctgcttcccgatccccatttgaagcttcgccctgtcagtagcttctcggggttcagaacctccatctggacgcccattcacttttaccgctccgatccgttcctcctcacattcaccttatccgcccgcacagtcagaccacagtcacccccctcccaattaggtccttcgtatttgccctctgtagtataacgccctgcccctctcccacagcccccaggctccgctcttgccagagggacaggagccatggctcagaaaatggactgtggtgcgggcctcctcggcttccaggtgagatctccactccccaccccaccatttccccagccgacagtcacccctccccgcgggcctctttggtctcccaaacgccgggatccggtttgaccctatttagtgactagactccgtgggcttttcgaattcccatcgtttatcgaagggggggaggggcgtctcttttcagccatcagtccctgctcagagagaggggagaccctgttagtagtcagggcaatctgcccagagaatgcggggtgggtaaggaaccatttttttttttttccagaatcctgacgcttgtagagcagtctgtcaccccctcccccagcctcctgcctccaccctccctctttctgcattccccactctgtgcgaccccccttattctcaactccgcgatccgcctgccgtcctgagctgctactgcacgcctcttggagcgtccccggctcctgttcgtgcccactttccgcataccgccccacccctcattttgcccttgccctacttcacccctgccacatgtttagtacccgcctggtcccccatcgcccctcgcgggccccctagatctctgcctcagcccccctgtttttgcacccaccgcccgcctgcagctccgctgctgcgctgccacccgggctccctattcccaccccacctcctgcctcagaggcccagagatttaattttttcccccctgtgtttgcaggctgaggcctccgtagaagacagcgccttgcttatgcagaccttgatggaggccatccagatctcagaggctccacctactaaccaggccaccgcagctgctagtccccagagttcacagcccccaactgccaatgagatggctgacattcaggtttcagcagctgccgctaggcctaagtcagcctttaaagtccagaatgccaccacaaaaggcccaaatggtgtctatgatttctctcaggctcataatgccaaggatgtgcccaacacgcagcccaaggcagcctttaagtcccaaaatgctaccccaaagggtccaaatgctgcctatgatttttcccaggcagcaaccactggtgagttagctgctaacaagtctgagatggccttcaaggcccagaatgccactactaaagtgggcccaaatgccacctacaatttctctcagtctctcaatgccaatgacctggccaacagcaggcctaagacccctttcaaggcttggaatgataccactaaggccccaacagctgatacccagacccagaatgtaaatcaggccaaaatggccacttcccaggctgacatagagaccgacccaggtatctctgaacctgacggtgcaactgcacagacatcagcagatggttcccaggctcagaatctggagtcccggacaataattcggggcaagaggacccgcaaggtgagatctctgctaacttcattttgctttggggctgtctcctttcttctctgagggtgttcatttgttctaaacaaaacaatgtatgtaactgtattcagctaggctatagggcatttgaagagaatgtttattcctgtcctccggatgttcacaaactgatggggagataatacatggacacaaataatatatacaacctgtatgtaattcagtttacattttgttatgttagtaaccaccatgtgttaagccttgagctaggcacattcacacaggttgtctcattaaaccttaaaggcacctcctaccaggtagggatcatagtgccaattttacaaagaaggaaattaagtgccagagaggtgaagtgacttgagtgatttgttcagggtggtacaggcagaaccagtggtggacataggaagaggagaagcctcaggccccat

SEQ ID NO: 137326 - DNA, 1102 bp, Homo sapiens
ggatcagaggcgggccccactggctgcagggacctggaggtctgcaccagttccagtgaccactcagaacccacctggcgcaccccccaatgtgctctggcagacgccattggcttggcagaacccctcaggctggcaaaaccagacagccaggcagaccccaccagcacgtcagagccctccagctaggcagaccccaccagcctggcagaacccagtcgcttggcagaacccagtgatttggccaaacccagtaatctggcagaacccagtgatctggccaaaccccattgtctggcccggccctgttgtctggccgaatccactggcctggcagaatccacctggatggcagactccacctggatggcagaccccaccgggctggcagggtcctccagactggcaaggtcctcctgactggccgctaccacccgactggccactgccacctgattggccacttcccactgactggccactaccacctgactggatccccgctgattggccaattccacctgactggcagaacctgcgcccctcgcctaacctgcgcccttctcccaactcgcgtgcctcacagaacccaggtgctgcacagccccgagatgtggcccttcttcaggaaagagtaagagctgtaactccccagtcacttttcccctctcttgctcttttctttgtcatcctctcatctgtaattcaaccaagtttttttgtaaatattttataagtttaatgatttcctttttccctcccaggcaaataagttggtcaagtacttgatgcttaaggactacacaaaggtgcccatcaagcgctcaggtatgcatccagtgtcccctccccaagctctgcccttcccttcactccatgctctgtcagcattcttctgcttgtagctctgcccttcccttcactccatgctctgtcggcattcttctgcttgtatgacccttccccttctatcccctcctttccatggttggctctttccacccttgaggaccttgactgtgctacccccagcagggctggcaaagggactgctgctctgtggcccccgctcggctcagatggctccctcctctctcctaca

SEQ ID NO: 137327 - DNA, 1032 bp, Homo sapiens
acgtagatcagggtccagggttcagggtcacatagcaggtcatgggcagagctggggtataattctcccctagctgaggaatattggggaggctagatgggcaagctggttggggtctctcatgcaaatggctactgaaaatatattctttctatattcccttaggaccaaagacacacccaagctcggtctcctcttggtgattctgggtgtcatcttcatgaatggcaaccgtgccagtgagggtgagtggctggacctgcagctgggggttggccacagcctgatttccatgcttattttccgtcccttgtctccccttgcctcccattgcagctgtcctctgggaggcactacgcaagatgggactgcgtcctgggtatgattgggctctctcatctcttgcctgtttgtgccatcctttggcaacagtggatggtcccaggattgcattaacctgggggtctggagggtttggtttggggatgttcagagcccaaagatgtgacctgggtggatggggaaacagttctgaactctctgcctcttttctcatctctgacctctgttctggaaagctctttgggcatggtaatagcctctgattgtgggtttcctttttttaccttcagggtgagacatcccctccttggagatctaaggaaacttctcacctatgagtttgtaaagcagaagtaagtgatgcctaaggggcttttcctgcttcttatgattctgcctgtgtgctggtcagctttagaaagcccttcctggctggatacaatggctcatgcctgtaatcccagtactttgggaggctcaggtgggcagatcgcttgagcccaggagttcaagaccagcctgggcaacataacgaaaccccatctctacaaaaaaatacaaaaattagccaggcgtggtgacatgcacctgtagtcccagctacttgggaggctgaggtaggggagaatcatctgagcccaggaagttgaggctgcagtgagctgtgatcatgccactgcactccaacct

SEQ ID NO: 137328 - DNA, 1069 bp, Homo sapiens
gcaatccacccacctctgcctcccaaagtgctgggattacaggtgtgagccaccacacccggccagaatttttctaatttttctacttttctaagcagttgtcttgcaagtgaagcccatccaccatccccacagtagacattcccaaggctgggccaggctgacacttttgcactgcattgtactcatttcaatggacctctgtggctcactgacaagattacaagaatctggagctagagctcaggcagaaggagtgaaaggaaatgttgtcctttctgtgaccctatacaagcctcgcctgcatctctagtgagtgcttagcgttctagtgcaggaatttaaggcttgatgattaaggggtaaataccctgatggtgttcaggaatgagcccaagggggagttgctatctgaaatctgttaaaaaatgtaagattatttttcattagtggactaccattctgcctgggtaggtagacacaaagactgttttgctctttcagatacctggactacagacgagtgcccaacagcaaccccccggagtatgagttcctctggggcctccgttcctaccatgagactagcaagatgaaagtgctgagattcattgcagaggtaatggaggaactgttccagcattgataggtcaagggatgaagtatagctggctgggaaaggcccagggtaggaatgagatcctaggtgtggcaggtggtaggtgccgcattgctggtggtatttgttgttgctgttaggtaaacttaacatgtattaggtgctaacatatgttaatatattagctaatacaattatgagtttgttttgggtttttttttaggtttttaaagtatttttattttttcccaactttactaaattataattgacaaaaattgtatatatttgtggtgtacaatgtaatttttaagtattttgttttatttatttatttatttgttttctcccgagatggagttttgctgtgttgcccaggctagagtgcagtggcgcaatcttggctcactgcaacctctgcctcccaggttaaagcgattcttgtgcctc

SEQ ID NO: 137329 - DNA, 1153 bp, Homo sapiens
ttaaataaacgacacattattattaactatagtcgtcatgctatacggttgatctccagaacatattcttcctatctaaatgaaactttgtaccttttaaccgatatctccctatccctcctgaccccaggccctggaaactaccattctactctctgcttctatgagttagacgtttttagattccatgtataagtgaggtcatgcagtatttgtctttctgtgtctggcttatttcacttagcataatgtcatccagcatcatctatgttgttgcaaatggcagaatttccttctttttaaaggctgaatagtattccattgtgtgtgtgtgtatcacattgtccttatccattcatccactgatggacaggtaggttgattccatatcttggctattgtaaatggattttgttttgttttctattcctcatctcaggttcagaaaagagaccctcgtgactggactgcacagttcatggaggctgcagatgaggccttggatgctctggatgctgctgcagctgaggccgaagcccgggctgaagcaagaacccgcatgggaattggagatgaggctgtgtctgggccctggagctgggatgacattgagtttgagctgctgacctgggatgaggaaggagattttggagatccctggtccagaattccatttaccttctgggccagataccaccagaatgcccgctccagattccctcagacctttgccggtcccattattggtcctggtggtacagccagtgccaacttcgctgccaactttggtgccattggtttcttctgggttgagtgagatgttgggtaggtacatcactttggattgggcagttagggtctctgggggatatagggtccatggggttgtatttatgtgcatgagctagaagtattaggaaactcattgtagggagatgaggaaagtatggggcagcactctttggtatgtatattccttattatttgatatatatcattgatttttttacttcttctttcttatgttcacagatattgctatcaatcgcagtagtctttcccctgtgtgaggctgaagcctcagattccttctaaacacagctatctagagagccacatcctgttgactgaaagtggcatgcaagataaattt

SEQ ID NO: 137330 - DNA, 1070 bp, Homo sapiens
cggcctcaagtaggatcctgtcacttcctccagtggggcagctgagattacaagtgcaggcccactgctgttgggaagtggtgagagtttctctccaatcgctcctgttttttcaggggaatatcaaggaatatcatgagaagagttggtgctagtccttgtgggggctattgtagggagaggagagagaaggtacacttgtggagggtgcacattgtttgtctacttggttacaggggggcgggggaaggcagggggttgccaggcgagtagggaggaaggaaaatgaagagatgcgtttgaggagcgagagttaatagctttgagtaagctgggtaaggaaggtgaatggtgaggaacgcggttggggtcagtggacaggcctccttgaggctgaaggctgtggatgctgggacattggagagagggagctgttaggactggatggggtgctgcccatgatgagagtgcgggatgcaagaaatagacatcgtgaaggggcgcggtctttcctgaggcccagagcattaccgcgcgcggaggagacttaggtggggaggaggaggccccctcaagacggaggagagccggccgcggcctggtcagccccgggggcgctgaggtcgccggggaggatccgtgctgtgagggctgagaggaggacagggcgtgcgtcacatgagaagcgtgtccaggggctggctgggagagtgtccatgggattggcacaggtctcgaacgtgaggcggctggtgcagccatgcagtagagcctggccttcagcggtcgcgagcctgagccatcaactctcaatagcagggaaggagtcctgcggctgaccctgaggagactagcgcctacctccccggactccgatgcgcaggcccagagcccgtcaatcctaggccagccccgccccgagagctgctttttccggtggcgcaggaacttcctgctgggttgctatggttccgagggcgggactatgggaggctgccttgtacggccggttcgtcggggcctgtctgaccggtactagtctattctctggtcctcatcttcattctgcg

SEQ ID NO: 137331 - DNA, 1041 bp, Homo sapiens
gcacacctgggcagagggagtgctggtgagtgcacatgtctacgtgtgtgtctgtgtgcggtgtgcacgcgttcctgcgcaggcaccctgtgggtgcatgcactagtgactgtcaatcctctgtctgtgggctggctcccataatccatgctacgtcctgaattccactgccggtttttctgttcaccaatctcaaggacctggcttcagtttctctggtaaccaacctcagcccttagcttcaacctctgagcacaggaagacagccagagtggggaggggtgttgtctcacccacagggcccctgccggagctgagcaccccaatgggatgagtggcagcacggttaccaagacaacagaactctcgacccctttccacctgcaaggctcttctccctctcctgggcctgccgagcatcaggtcggaaaggtaaagctgtggcataaccaccctcctaagtccttgaaattgctctagacgtggctgtagaataaatatgtcaaaagatgctcttgaaagagaaggcaacccctacttttttttcccaattcattaactacaaacaaggctatgaagtccaaggttatatttaaaaatcagggcaggcgaaagggagtgtgtgcttatgtctctcaacgtcagctgtgcatcaggtctctcgtggagcatttgtccaagagcaaatgccggaccccatccccagagagtctgacttagcaggtctggaatgtggccccagcatgagtatcattttataactcctcttatgaaagacgaggtggcagctgcagaaacggaaccatcctcataggaagtaaagcatatctgaaacacaaggtccctcgccaaagggaaagcaggacgtctttgctccctgctgtgctggcggtttctagggctaatagatttcccgggctaaggaaaggtcaaaaacattcaaagtaatgtgagtgcgtgttttacagctgacactgtgctcgccttcctctatattcctgaaatcaaaattttcacgttaacatgctgcatttgccagtg

SEQ ID NO: 137332 - DNA, 1041 bp, Homo sapiens; identical to SEQ ID NO: 137331

SEQ ID NO: 137333 - DNA, 1041 bp, Homo sapiens; identical to SEQ ID NO: 137331

SEQ ID NO: 137334 - DNA, 1091 bp, Homo sapiens
ggctgtgtgtgtttcattgaacatgtctgtatatgcctgcctgtccatacacatatgtccacacacatctgtccacacacacacgtgtgtgtgtgtgtgtgtgtgtgtgtgtgtgaatatgcctgtgtgtatgcctgtacattcagacaggcatacacagaggtatattcatatgtgtgaatgtgccagtttgtacagttctaattatttgcatgtatgtgtttgtgtttatgcatctttgttctggagcatatgttgtagaacacaatgtaaggtaacgtccatgcatgtcactctcagcctacaagtgtgtttaagtgtgtgtgtgtgaggatgtgtgtgaggatgtgtgtgtgtctgtgatgagtgtggatcagtccttcttgtatggatgtacagttgtgtgcatgtgagtgtacttccatgtgtacatgtgtgtgaatatacctttgtgtccaagtccatctgtgagaatgtaggtgtaaatgattcctctttattgtgtagcttctcatatgggtgtatgaacttgtaggaatgtacatggtgtacatatctggctgtgatagtgtgggcatgttttgtgagtacatttgtatttccatgtctgagtgtaagcatatgggaatgaattaatgaacaagtctatgtgcatgtgaacatgcccagttgtgtgtacaagtctgtgttaggaatgtctgcatatctatacttcatgtcatttacaagcatgtgcatatctaggtgtttatgtgtgtgagtgtgtaaatatatgtggtcatgtctgggtgtgtgtgtgcacacatttgggagcttccctgtctgtgtccatgtttgttcatcatctccttgggtgtgatacaaagtctgtctgtctgtggacatgtgaaggtatgcctgtatgtacccctgtgtttgtgagtgaatgtacgtcattcatgggcattatgtcatgtgaatgtatgtcacgcatgcgtgcctatgtttaagagtaaatggatgtacacgtatgactaagtacagtgtgagtgtgtccatgtgtaaggatgagtgtaggtatttgtgcatgtgtctgtcagtcgatgtgagag

SEQ ID NO: 137335 - DNA, 1050 bp, Homo sapiens
tccaagtgtggttatatgtggatgatatgtcagtaggtgagagcacaagtgtatctaggcaatggaagtgtgtgatagggtgtattgtgatggtgtgcatgagaaagagaatttgggcacatctgggtgagggtgggggtgtatataattgggggtgtctatggagtgtgtgtatgggtggtgtgtgtgagacagtatggatgtatctgcattgtgtgtgtgcagtgtgagtagatctggctgatggtgattaagagagaattgggggtcgagattgtgtttgtgtgtgagagtgggggtgtttctgagtgtggtaggggtgtgagcacgcatgtctcctgtgggaagagcatgtatgtgtatctggatgaggtgtgagagtttgggtttaactgggttggaggagagtgtggatgtatccagatggtgtgtgaaagagaaagtgtgtaggtacgtttgggctgtgtgtgagacagtgtgtggatgtattgggggtggagtgggtttgaatgtgggtgtatctggatggtaggtgagtgagagcacggatatatttgggtgatggagtgtgtagtaaggtatgtctggatggcgtgtggtgagagctttggttgtatctgggtggagagtgcaggcgtatacgtacttgggtgtggatgtgaatgtgtataactggatgggttgtgtaaaagagagttgggggcacagctgagtgggaagtgtgtgtatggagtgtgggtgcttgtgggtggtgtggaggagatgagagcatgggtggatctggggagtggggcgtgtgcagaggtgcactggatggcatgtgtgagagttggatatgtccaggtgggttgtgtgtggatgtagttatacctgggtggtgcatgtggctttgagtggatctccatggtctatatgggatgaatctggatgatgatatatgagagggtggatgtgtctgcatggggctgtgagagtggggctgtatttggagtgtgcgtgtgctgtaagagtggggctgtatttggagtgtgtgtgtgtgtgtgtgtgtgt

SEQ ID NO: 137336 - DNA, 1008 bp, Homo sapiens
ggcaacagcgagactcaaaaaaaaaaaatctgaaaaatgagaagcattcacaaagaaatgttgccatgtttcttttacctcattattattattattactattatttttaccaaatctctacacatttgggtttaaaacaacacggaagggtgtactgatcccagttccttacagaaagctgaaaggcaggtgggaaatgtcttggatttaattacattcatctggcataatttactgtggaaatgagacctatagacaaacttacaggtgagggctcctcagtaaatgaatctcagagttttccaaacaaactgctgttgtaaacagcagcatctgtccacagacttatggagtttccacagtatttcaaagtattcatgtatcactttgaatatttcaaacttagtttatgttggtgcttcttgtacttctcttcaagtttctaactagtactgtaaactatgcaatgtcaacacccatagatgcatgggtagaaaatgaaaacctttctgattgaacatctaagttagtgtcatctcaatgccctttgacctgtcaccagtgtatctcctaacagcaataattgaacatggcccctttcctattccctttacctcattggtcttaaaaatagtgtacacaatttccctgcacaccgctaacctgtgagattctactgggaggggcatcttagctttacttgttaatcatacaaccctgtcactagccggttgagctccagctaaaaatattctaacccatctcataaaagatcccagtttctcaatttgcactgccagatgctttaaaaattccaaatctttctattgaaggggtcagcagacctctgtgagttctgaaaactgatttttctctgcattcttaagaaagcaacactctggcggggcgcggtggctcacgcctgtaatcccagcactttgggaggtcgaggcgggcggatcacgaggtcaggagatcaagaccatcctggctaacacagtgaaaccc

SEQ ID NO: 137337 - DNA, 1671 bp, Homo sapiens
cgcggcggccggcagccaatggccaggccgagcggacccctgcgtcaggagtgggcggggcttcggcgattggcgcggagggagtagagcgggcgctgtgggagggaacgccagagcgaggtggtgaggagagctggttgcgtgagtctcctcagctctgcttaccggtgcgactagcggcagcgacgcggctaaaagcgaaggggcgagtgcgagtcccctgagctgtacgaacgcggtcgccatggaccgcccagatgaggggcctccggccaagacccgccgcctgagcagctccgagtctccacagcgcgacccgcccccgccgccgccgccgccgccgctcctccgactgccgctgcctccaccccagcagcgcccgaggctccaggaggaaacggaggcggcacaggtgctggccgatatgaggggggtgggactgggccccgcgctgcccccgccgcctccctatgtcattctcgaggagggggggatccgcgcatacttcacgctcggtgctgagtgtcccggctgggattctaccatcgagtcggggtatggggaggcgcccccgcccacggagagcctggaagcactccccactcctgaggcctcgggggggagcctggaaatcgattttcaggttgtacagtcgagcagttttggtggagagggggccctagaaacctgtagcgcagtggggtgggcgccccagaggttagttgacccgaagagcaaggaagaggcgatcatcatagtggaggatgaggatgaggatgagcgggagagtatgaggagcagcaggaggcggcggcggcggcggaggaggaagcagaggaaggtgaagagggaaagcagagagagaaatgccgagaggatggagagcatcctgcaggcactggaggatattcagctggatctggaggcagtgaacatcaaggcaggcaaagccttcctgcgtctcaagcgcaagttcatccagatgcgaagacccttcctggagcgcagagacctcatcatccagcatatcccaggcttctgggtcaaagcagtatccttctaatcgatactccgtaggtcagaagcccgtgacaggaaaggggaaggtgggggagggacagaaaaggtaaagcgggtggaggagagccagaggtgggcatgatccccctatcggaagacggactagactgggtggaagagggatggaaggaggagggcaaaacagcagagaagctggactggagatgatgaagggtggtggagggggggcggacataaaaactggaccacagatgggaaagggggaagaggaggaacatagcattaaaaaaaggatcacagatgataaaaagggggagggtagtaaaggggcacacagcaaaaaaattggaccagagatggtgaaaggaggaggggaggggcacgtagaagatgaactgactcagagaccttgaagagggaggggaatggcacacagcagagaaactgcccagaaagggtgcttgagccatacaaggctctgtaaacctagatttttgcttaagatactaggagaccccaatcctggctggagtgccttgcattggagggaggggggctggagcccctgaaagatcaagagagggagtgtctaggtatagagaaaaaggagttaaatgaaggaaaggggag

SEQ ID NO: 137338 - DNA, 1554 bp, Homo sapiens
catcaagatctctgacttcatggagaccaccgactacttcgagaccactgacaatgagataactgacatcaatgagaacatctgcgacagcgagaatcctgaccacaatgaggtccccaacaacgagaccactgataacaacgagagtgctgatgaccacgaaaccactgacaacaatgagagtgcagatgacaacaacgagaatcctgaagacaataacaagaacactgatgacaacgaagagaaccctaacaacaacgagaacacttacggcaacaacttcttcaaaggtggcttctggggcagccatggcaacaaccaggacagcagcgacagtgacaatgaagcagatgaggccagtgatgatgaagataatgatggcaacgaaggtgacaatgagggcagtgatgatgatggcaatgaaggtgacaatgaaggcagcgatgatgacgacagagacattgagtactatgagaaagttattgaagactttgacaaggatcaggctgactacgaggacgtgatagagatcatctcagacgaatcagtggaagaagagggcattgaggaaggtgagctaatccccccccacccttgtcttccctcttttcttttctcagagcaagcctggccaaggacagggtatcaaggcatgaacacaatctgcttttatggaggaaagaaaaagcattctgagcaactttttaaacaaaggaagtccagtgaacatttaacttaaaaatgtaacaaaaccccaaaaaatcattttagttctaggtgatggatagatggttgtaacagcagaagatgaagagtacacagagataggagacagtgggtggaaaactgaaaaggacacttcacatcgaggtgggggagtggcaaaacacagtgcatttcagcacagtctgtacccggccttggcctttggcgcatttccaggcttgtgttgggagcagagcatgaagtgaacagtgtgctctctgagtccagaaaagggtgcagccagttctacctcaagaatcggggtggggggggtggcgggggaagagctagaggaaaaaggtgacatttgaactggaggatgcattcacactgaggagctttatggagcattctccgtggagtggatcatctgaacaaggacctggaagggtgaaaatgcatcgtaggttgggcagggtttccaaaattatgtcctgaggatcactcaccagatctgaaagctgcttcccacaaaaggtttcagtggtcgtatatgttggacaagtactgcatatagtaataccctcttgtagagtcacattagcaccttaaaggctctgagaataacacgagaattataaaggtgctgagaagtactcagatgggaggtggaaggggcaggaaaatcaactactcttcgggtttttttggctatggggtccctggcaaacttccattgagggcaaggccagggcactaagggaagaggaatgaatgtggagcctcaatctagacatgttcaggtaggagagagaaacagggattctcagttctcttcccctcccacct

SEQ ID NO: 137339 - DNA, 1196 bp, Homo sapiens
actgaaaagaatattgtctctcttggtttctgtcttttctctgtctctgacccttcctccattggatctttctgaatgcttctgtctttctctgttactgtttttcctctttttacccgtctctttctcaaccctaaagaggttagaggtgcatagtttatagcaataagttttacccccgaggacatgagcttagcctggggctccgacctgttctgtgggtaaaaaatggagcctggctttgggttgcttctggtgtcattgaagagagaactctctttgctccccagcctactctgttaaacaggtagagacacccaaagttgggagcaacttagattaaaaaccactttttaatagccccttatcctatataatgttagtcaccacaggaagcccacagatctcctggttatgtctccatacagccctggacatcctattttctatttccatcctgaaatcctttgaccaggccttaaggaactcaccttcagttatcagcaaaattccctccattctcatcctggcttctgaatactccctttattttcttgctatgctttggtcgttctcatacctgttggacccaacattgctttttttttttaataaggtgtattttgaaatgcttcactattctaaaatgaaatggatagaaaatagaatctgtctacacccataattccctgaaaaccaatataatgccctaattgtaatatagagagtagtaaaggaagagtaatatataatattatattatacatatatcgcacatatatatgcaaagactgggatatgactccattagaagacatgatgaaatggtcttacacttaatgatagtgacagctacatgtgtgttgattggtgattcagaagccacaggtagagtgacacagttttcctaaataatgaacaattcttcacaaagttctaaacaaaacaatgtggaagagtttctcagtttatatggtcgttaaatttctggaaaaatcagtatatattaatatccatgatgagaccctcttaatctccctgaccttatctcccaccactctccccccttgctcactctatctacccatgctggccaccttactattacttgaacaccttaggcacacttccgcctcaggggttttgcattccgtgtatctggaatgctctttcctcaaatacccacaaggctcagg

SEQ ID NO: 137340 - DNA, 1996 bp, Homo sapiens
tggtggctctatgtttaactttttttttttctttttgagacagggtctcactctgtcacccagactggaatgcagtgtcccaatcttggctcactgcaacctccacctcctgggctcaagtggtcctcccccttcagcctcctgagtggctgggaccatgggcatgtgccaccacacctggctaatttttgtattttttgtagagatggggttttgccatgttgcccaggctggtcttgaactcctgggctcaagagatctgccctcctcgcctcccaaagtgctgagatgataggtatgagccatggtgccccgccttatgttttgaggagctatcaaactgtttgcaaaagtggctatgccattttacagtcctatcagcagtgtatgaaggttccagtttctccatatcctcatcaacacttttcgtttgtcttttttattatagccatcctagtgagtatgaaagtggtgtctcattgtagttttgattttcatttccctaataactcatgatattgaatgtccttttatatgcttgtatatctttggagaaatgtctattcaaattcttagcccatttttaattggattatgtgtctttttattattgagttgcaggacttctttttttttttttggagacggagtctcactctgtcatccagggtggagtgcagtggtgtgatcttggcttacttcaacctctgcctcctgggttcaagcaattctcctgcctcagcctcctgaatagctgggactacaggcacacaacgacacacctggttaatttttttttttttttttgtattttagtagagatggggtttcctgtgttgcccaggctgatctcgaactcctgagctcaggcagtccacctgcctcggcctcccaaagtgctaagattacaggcatgagcccctgcacctggccagaacttctttatgtatctggatataagtcctttgtcagataatatgtttttttctttttttttttttttttttttgagacagagtctcgctctgtcgcccagggtggagtgcagtggcgcgatctcggctcactgcaagctccgcctcctgggttcacgccattctcctgcctcagcctcccaagtagctgggactacaggcgcccgccaccatgcccagctaattttttgtatttttagtagagacggggtttcaccgtgttagccaggatggtctcgatctcctgacctcgtgatccacccgcctcggcctcccaaagtgctgggattacaggcgtgagccaccgcgcctggccagataatatgaattataaatattttctcccattctgtgggttcttttcattttattgatggtatcttttaatgtacagtaggttttaatttcagtgatgtccagcttacctattttgttgtcacttgggcatttggtgttatatccaataaatcatcgcctaaatcagggtgacaaagatttattcctatgttttcttctaggaattttatcgttttagctcttacatttaggacagtgatccattttgagttatttttgtttcaagacagggtctcgttctgtcacccaggctggagtgcagtggcaccatcacagctcactgcagccttgacctcttaggctcaagtgatccccccacctcagcctcctgagtagctgacactacaagtgtgagccatcacacccagctaatttttatatttttgtagagatgaggtctctgtgtattgcccatgctggtctcgaactcctgggctcaagtgatcctctcacctcagcctcccaaagtgctgggattacagacatactgtacccagcccattttgagttaatatttgtgtatagcgtgagagtaggggtacaggtttattcttctgacatggatatctagttttctgagcaccttttgttgaaaaatattctttttaccattggattgtcttgacgaccttgtcatagaccaggcatagtgacacccatctgta

SEQ ID NO: 137341 - DNA, 1939 bp, Homo sapiens
agctccacaggtcccttgtcctcaatgagcagaagactacaggagctggctactgaagaggctgtccaagtaatagagcaccttcttggccctgcttagcacatttactgcagagctggatgctacttatttgtgctcaccaccttcagggactgcagagagatttgtcagaccctacttcactaagggccaccctctaaggatctccagaagaggctgcccatagagagaagtggcctgcctagggtctccacttcctcaggtcctacccggacacctctagggctgaggggatcagtatctcttcacctgcctgtaatccacataccaagtggaagaatctgcctgctattttttgtttgtttgtttgttttggcgggaagagttttaactactgctgtaactcctttagtagctatggaactgttgaggatttctttttcttcttgagtcgattttggtaagataacagttttctaggagttggtccattttgtctgcattttcaaattcattggcataaagtttcctttttattctgtgctgtgtatgaactgtaacaatgtctcctttttcattactgatattggttatttgtgccttctcactttttttcttgatcaatctcaccagaggtttatctattttattagtcttttcaaagaaccaacttttggctttgttgctcctctctattgtatctttgttttctatttctttaatttctgctcttatcttttttgatctccttccttccacattttttgggtttattctgttgttctttttctaatttaactggacattgagctcattagttttcattctttcccattttctaatttgtgcatttaaggatataatttccctctaactcctgcttctccataagtttagatatgtagtattttcattattgctcagttataagtacttcatttctatcaaggttacttctttgacctgtaagttatatagaaatgtgtttttagatttccaaatgtttggggatttaaaattttatctctttgttattgaaatctgtcttaattgcattatggtcagaggatgtggtttgtgtgacaacaactctgaaattttttagacttgttttatggcttagtatgtgaccaatatttttgaatgcttcctgtgtgctaatttataagaatgtgtgttctctaattgttgaatacagagatctacatatgtctattatcaagtttgtgaactattgttcaatttttacttacctatactgatttttttggtcattatctactgataattgaaagaggtgcgttaatgttcaactgtaatggtggatttggcaatttctccttgtaattctatctcgtttcttgctttatatattttgagggtgttcattaggaatattcaaattaaaaattgttatatattcctgataaatatgtaatgaccctctctattcctgataatgcatttttctttgaaacctattttatcttatattaatgtagtaacacaaacttttcttgttgggatttgtgtggtatataattttccatccttttacttttgagcattttcatgccattatgtttaattatatctcttggaaacaacatataactggaccttttaaaaaatctaatctgattatctcttttggttggcaagtttagtctgtttacatttactgtgatgtatttgggcttgtttctaccatcatacttttttatttctgtttaccatcactaccttttctgtgcttcattttctcttttctcgcctgcttttttagttttgagatttgttttcttattcaatttttttcctccctatttttaaatttttttctattctttctgtggttatccttgatgttttccatatgtgtttaacttataaagtctaaagttaaacaatattttagcccccttcttaaagaatgcag

SEQ ID NO: 137342 - DNA, 2572 bp, Homo sapiens
cctgtgtgccttcctttttcatgaaaggcagcaaatgtttgcagctgaactgtttccccagtttgcttcctgccagtagaattttgggggtccagtggctttttttcattttgtcttgtctgtaatcagctgccaccaagaaatagttccacaggggggcttgggttactgttctgttggcaggttgggcactcagcagtggcttatagccagattggtcgtggtggaagtccatattgtggagtccatgcataacctccatgcctgccaccatggccattttgttcaggaatccattgggcaaagaaaagggtgacagataagaggctgactgacatcacagaacaggacacctacctgtctacttgattgagctcctcttctgcagtggactctctctggtgcttatttatgtgggacgtgaatatctctgcccattccaagagggacagccatatgctcttcctcagaccttgtcaataatatttcagtcctgttatttccaagtccttcaccatttagccgaatcattaaaaactactcatgaaacagtggaaacctatctatacctctgaccagctatgtgaccaggcagttgttctactgggagaatttcccttctcactgtccttcaggatcaaccctaagtagggctgtaacactacagctagctacttcagcagggccagcatatcatgcagggctatgtataaaccaagctggaatagaatattgtatcccttagtcacctggtcacagggaattccccatgaggcttcaggtgtgggtgagagagggatggcagtacagcagttgggagtatgattcacttgctcaggcagcttattcatcatctaggcctgcttgtataactctattctattcggtggtggagtgctactgcacatagataacttcgtggcttgatgagacagttaacacacaactcaccatggggagctcagcttgcctgggtcacttggagtcctatgctcagccattcattcacaaaatagacccacttttccatttttatttttctctgctcctgggactcctgttgtcacgatattgccacctccaattttatcccccatttcttgaatctttaacttgctcttcagctgtagtcctcctcccctttatgccatctatactgtgtagattcgaatagtatatccaagaactggagaaatcaccacaggatttcttctgggcccagtgtaagaaagactcagatcaaaacttcatgtataaccccatcccactctgactgatgggctgcagtggcaatctggatcaccagagattaacattaattcagaaccaatatccagtctatttcaaaggcctggatatttccctgtccccagtgtacaatgactgtggctgcaggtctctgtgaggaaagcaaggagggagattttgccatacacacttgtgaaaagtgtagcaaggtccttcttcagatggaccctccccttcattcaaggggctctggtctatgaactggggaagaggctgggatgccacatttttgaggacaaaatcaggcctccattttccagagtagaagattattggggttatataacaactaggactttatcaggctacctattttggtcctagggaaactatccttaattatccactgttatacaaacctccacaggtcaaacctgattattgctatggctctgctatccattataagaacgagacccaacttctctttggagatgaacctgtcacctccattgaaatcagggagcccattcatgatttctcaccatgaccctcacctgcagaaataaatcactgcaatgctttataatactggtactcattcatgtactagttaaggtaaagctagctcctgggacagaaaaaaattttctgagatttaagacaagtttacttcttgcttctgtagtattccaaaacaggtgttaataattgagtttccctcttctaagtgatgattcagaggcttaggcactttctgtctagaaggtctgccatcttcaaaacatggtcatcattgtatttattgtcatctccatccttaatagccagaagaggaaaagaccatgtgggaggtttctatgagccggatgtagcacacatcacttctcatattccattagccagaactcagacaatgggcatacccaactgtaagggacactgacaaatgtagtctaaatctgtccctaggaggaagaggaaacaagtttaatgaccacttagctagtctctaccacagtgtatttctcaaagtcctgtgaaaggaatgtcaatgtccacatagtcaaaagggtgagttgaatgtgttacatatgactaatcgattccaacattcttattgccctaaacgatggattcccctgcctacactgtaccatggaatttctggcatcttaacctcatttaacacaagctactattgagtagaggttttggtcaatcaatagaacaatttttagaaatactcctagctgcttcaactaacaaagtacatccaggattgctgatgagtgtacccatactgaaaagtttggccctaccc

SEQ ID NO: 137343 - DNA, 1051 bp, Homo sapiens
cccctagaaagggagggggactggctcaggggacaccctccccctcagataaggggctggggagaatgaggtcagggaagcagtgggtatcttctcacctcaaagtcattttctattatagagatatcacctagctgccgagtcctcccaaatgttgccacatccctcaggatggctcctgaatctgcaggtgacaaggggatggaaagagacatcacttctattaaggactttacccaaacccttcaggcccaactgaacccttcttccccttctccttagtgtctccacctgtgccttacctggtgtctgaaacacactaagattaataggtctgtctctcctcccacccccaagctctggagcttctggagggaaggcaaggcccaggcctcagtctgtctccacttccaggccaagggcccgcaatctagcttagaaggaggtaggagcatcagttggggctccacactgtgcatatgactctgtttcctttgcattgcagagtccagtggtacaggataccaccccttgggagtggcgcctggggtctgaggtacatggtcagtgggtccttgaaggggcagacactaaccatgcttcccagaagacctgaaattgtgatgggagaagaggggttaggaagcagaggaacagggttcttgcccctgggcactcacatgaaaggaaggggaacagccccttgtgaacctccacctgggtgctcagctccatgtgaggtatttcacaaagtccccaacagacacaggaaacagacccctaggaaaacaggcctcacctaagcatatcagcctggcagagctgggattttcaccaaatctctgtgaccctaaggcctgtgctagacagaaggggtccaaagtaatcagcctgcaatccggaaatagttcacagtgggagctcagtgttgatctctgctgttggtaggttgggaattcagcagtgctagggccacagtggccttggtaggttagaagttcatattgccgaggtacataacctccacgcctatctctattggttatatatt

SEQ ID NO: 137344 - DNA, 7099 bp, Homo sapiens
gtttctaattctttcccctcataatatgaacatgctctataatttaaaaccttccctctaacctgggcaattggggcaaatttgaaatatgcgagatcaaggtggacaggtgtagtgaggaaaggtgttcagtcttagcatagacatggagggaaggcactgagtttggacctgaaacctcacatgtgatacttcatagcccccacagggtggctggtctacagatgaccctgactgagctccgggcctttctggaccagatgaacaacctgccttgcgccatgcaccagattggggatgtcaaggtgaggacgcttggagtgctgatgagggatcaaggggaccaggggacctgagcagcaggccatgcttggctcctttcaaaagcttaaagtgttcaggcaagacaggacacacgtgtgagaaaagaacaggtgggaggggtgaggcaagggtctagtgacttgtctgttagaaatgggccttgagggtcaggtggcaagggtatgggtataggatacagagtccaggtaaggtttcctggaggaggggtagaggagaaggaggtaacaggggtgcttgttgggcttggaaagtggagggaaattcatgaaggtggaggaggagtgagatggagagggcaacagaccccagggtggtgagcacaagggtttatgtgaggactaatcatagcaatttttagggcagggaggtctcttggtgccctgagaacagagccctctgaaaagttaaataaagcatagattaataattattagttaattaagaatctctcagggtggggcccaggaatctgcattcttaaattccccagggcattctaatgagcagtcagtgttaggaaccccaactgtcttagggcttggagaaggagagctcagcccatgttaggctcctttgccccaaaagcttggagggtaagaagataggtgggacaaggttccatctggtggtggaacccctcagtgggcccagctgaggagtttgttcttcatcctgtgtcctggtagggtgttctggaacaggtggaggcctaccaggctgaggctcgtgaggccctggcctcactgccctccagtccagggctactgcagtccctgttggagagggggcggcagctgggggtggaggtgcctgaggcccagcagctccagcggcaggtggaacaggcgcgatggctggatgaggtgaaacgcacactggccccctcagcccgaaggggcaccttggctgtcatgcgaggactgttggtcgcgggtgccagtgtagcccctagccctgctgtggataaagcccaggccgagctgcaggaactgctgaccattgctgaacgctgggaggagaaagcccacctctgcctggaggccaggtaggtccagctgctgcttcccttccctgccctattccaaacatcaaagttgagtggagacccagaagaggatgcccatgggtggccttaggtatcacgctcctgtgttactgtattgactctcccctcttttgttgtctatcttgtcgtttttttaaaaaacaactctgtatacttaaaggcaaagagaggctgatggagaagcagaaatggacagatagagattatctagaagactagccctacaggctaatgtgcgcatacccagaagcacaagtgacaggcagatgggcagatgttggtagaaagaccccacacagggcagttgacaaactgcagcaacagattacacaatacaggttgtatatgtaggcattgctagcaggccagcagactggcagacaaacagaggtgcaagagctgtggcagaagggatgaagttgggtgcatgcagtcttggggaagcagggactggcagctacccttaggtggaatacaagcaagtaggcccaagtgacagcaggaataacagacacccaaggggcccatgcagatatatctggtggtcaggctgggcttctggtcaggcagaccacatcagactgagcgttctttttttccttacctttaggcagaagcatccaccagccacacttgaggccataatccgtgaagcggaaaacatccctgttcacctgcccaacatccaggctctcaaggaggctcttgctaaggcccgggcctggattgctgatgttgatgagatccaagtgaggaccctgccactcccaccccaggccttcagtccagctgggaagagatggcatatacactgggatgtgctgggttgctgggatgggttgggttggctggagagaggaagggggcatggcatgtagtcaggaggcaagatgtgcctgatgagcagggtgagaggaagagtgtgaggctggcctgaaggaagagagggcactggttaggatgagattggtgggccagggaagcaggtggtatgggactgagcagggcaggggcatggaggagaggagaagaggcaaaccacaacagaaggctgactagatatttggggctgagccagtcagtagatgccggtgttgtgggagagagccaagtggttgttccttaggatgacacctatttttttaatccctcaagactgagcccagttcatctttccagctcagggccaggcacagagtaagcatcaatagcattggcaagttgaactgagctgtctctcgcccttggccttagaatggtgaccactacccctgcctggatgacttggagggcctagtagctgtgggccgggacctacctgtggggctggaggagctgagacagctagagctacaggtactgacagcgcactcctggagggagaaggcctccaagaccttcctcaagaaaaattcttgctacacgctgctggaggtgaggcctgggaccttgacctacagcgtctcttaacgcctgccctggcttctgtgagatggctcatgagataacatgggttttgtaggggcaccagggagggaaggaggcgggggatgtaagggaagcccagtcattccctctcttgtctgcctgccccaggttctctgcccatgtgcagatgccggctcagacagcaccaagcgcagccggtggatggagaaggagctggggttgtacaaatctgacacagagctgctggggctgtctgcgcaggacctcagggacccaggctctgtggtaaggagcttcgacacagatggggagaagggcttggtgatgatagagtgtctgagctgggtggccatgagcagaccgcttgtcccctgagcctcagttctcctggtttgggagtgggggtgttaagggggggcccagagaagggaaggggtaggctgctgacccactttgctcctgtcctgggtatggcagatcgtggccttcaaggagggggaacagaaggagaaggagggtatcctgcagctgcgtcgcaccaattcggccaagcccagtccactggcatcatcgagcacggcctcctctacaacctctatctgtgtgtgtgggcaggtgctggctggggcgggagctctgcagtgtgacctgtgtcaggactggttccatgggcggtgtgtgtcagtgcctcgcctcctcagctctccgaggcccaatcccacctcatccccactgctggcctggtgggaatgggacaccaaattcctgtgtccactgtgtatgcgctcaaggcgcccgcgcctggagaccatcctggcactgctggtagccctgcagagactgcctgtgcggctgcccgagggcgaggccctgcagtgcctcacagagagggccatcagctggcaaggccgcgccaggcaggctctggcctctgaagatgtgactgctcttttgggacggctggctgagctccgccaacggctacaggctgaacctagacctgaggagcctcctaactaccctgcagcccctgcttctgaccccctcagagagggcagtggcaaggatatgcctaaggtgagctactcagcccagctcttgtcctcagattcttgtctcctagcccctaccccagtttaggctcggccctgccccttgttctccaattttcagttttctttggaccagccttcctactccattctgcatctgtccagattcctagactctgctccctgctggcagcctgtgtcttccctcctcctccagaaggcggagggtctcaagtttggggttggcggaggaggaatagggcctggttcttcacttcagttgcccctacctattcttgctctcctccgcaggtccagggcttactggagaatggagacagtgtgaccagtcctgagaaggtagccccggaggagggctcaggtaagagaggtaggtctaggtgtggtgtgggtaggctgttgactgcacatcaccatagtgacccatgtagtcctcagctctgttgtagtggtggggataagaccaagggcagcctctaatgccgcttgttcctgcaacctcctagatctggagctgctgtcctcgctgttgccacagttgactggccctgtgttggaactgcctgaggcaacccgggcccccttggaggagctcatgatggagggggacctgctcgaggtgaccctggatgagaaccacagcatatggcagctgctgcaggctggacagcccccagacctggagaggatccgcacacttctggaggtgaggagaggggtcatgggccgggccaggaggtcaggccgagtagggagcccaggcctgaccactggcccacaacctgtctttctgcctgtctgtaatcacagctggagaaggcagagcgtcacgggagtcgggctcggggccgggccctggagaggcggcggcggcggaaggtggatcggggtggggagggcgatgacccagcccgagaggagctagagccaaagagggtacggagctcagggccagaggctgaggaggtccaggaggaggaagagctggaggaggagactgggggtgagggcccccctgcacccatccccaccactggcagccccagcacccaggagaaccagaatggcttggaaccggcggaagggaccacttcaggcccctcggcccctttctccactctgactccccggctgcatctgccctgcccacagcagccgcctcagcaacagttgtgacagtggctgagcctagcacagaccctgacagagacccccctcggcctcaaggatcctctttctgaccatcaagcctgcttcttggggggtgggcgggtaggggggtggccatccctgctacccgcccacccctgagtcccttgacttttgtattctgactccaaggtattgttcagacctcagctcctgggggccggcccctggagtcttccctccctggtagcctctaaccagcattcccagacacctgaggcagatagatggatgggctggtgggcaggggggtggctggggctgggccatcaccattccagagacaaggccagtgtatatgcaaactgggggactctcctcccttctctccccagttctggtcctggccaggccatgctacactaacccctgcccccactctcctcccctcttttccttccttcctacccccttctccctctcccttcccctgactgttccacccaggaggaggaaacttcacatagccgtgctcacagttttttattttaaaggaatttggctggggagctgaacagggctccctgtgatctgaagaaagcttttggtgcttgtcctcacaaccacctcagtcctccctccctgtcctcccctgtctcctttcctcctcctgggttcatgttgtaataaaagaagattgttggtgtgtaattaatttgttcaaaagaaaaaaaaaagcaaaacaagaaacttggttccaactgaagcctattttaattttattttattattttcctcttgttagaaataaaacccttagaaacattttttggaaacatgtttctgaagtgcatttctcttagacggggaagacagtgcttccatcaccagtcagtggagcagctgtagtgctggcaggagcactagggctgaagccagggagctctgggttctgaaatcaagttccaccagcttcttaaccttgggcaagacattctgatcctcccccgactctaaccccaagccactttccctcaagtccaaacagatgggctcgggccccctcacccaaactcctacactacaacctcccccagttgatgccctccagtttatcctcctcaagctcccaaagggatttttttgttaatggctttattgagatataatttacatactataaaattcacttgtttgaaatgtacaattcagtgatttggggggtttctaaagtgtagatctgattatatactgcttaaaaccttccatgatgctttattgcccttaagattatacatagaatctcgttcttcctagaatgttttcctgtctaacccatctactgcataattccctgatttttctccacaggttatgcccctgatgaatggggactaaagctcagatgtgtggtcatttgcaacccctgagttcacttttttaagacagcttattgatatatataatgtacataccatacagtcacccacttaaaagtatacaattaaatagcttttagtatattcagagttgtgcagccatcattcgaaaaaaaatttcagaacattttcatcactgcagaaagaaactccatatcccttaggcgtcctttacccctcatcccatttgcctattctggacattttacataaatggaatcgtataatatgtgatcctttgtgtctagcttctttcacttagcaaagtggtttcaagcccattaatggtcccatagtagttggaaagatctctcttctgagtcccaaagtctttaagatgagggtgctggactaaatcagggaccatcaacagattgtttacatgtttttgtgggtgtttgcatgcatgtgtttttctgacaagaagactaaccagcttgtatcagattcataaagggatccttgaccctccaaaggctaagaaccattctttgtggtcttgagtgttctgtgtttggagtctgcccatgatacgaggatacaaaggaggaagcaagagtatggaagccctaagccag

SEQ ID NO: 137345 - DNA, 2007 bp, Homo sapiens
agtgctgagatacttgtctgattccatagctgctttatttttgttaatcctcataacaacccaacaaggatgatactgtttatctccatcttactagataatgaaacagacccagagacgttaaatgatttactcatgatcacacagcatataagtggcagagtgggatttgggctcataacttatgcagagattaggtgttaaagttggtatgtaagacaaaaactgttaagagttgacatttcccattaaaatccctaaaattgcccattagatatacacactgggttgtctctcgattactccaatatagccagcttttccttcatttttgaaatggattgctttttctttatctgagcaacagatgaagtcattggattaggtttggaaaccatattgttgggagaaaattattatatctctttaaaccctgaacacaagcacatacggttgaatttctctaagttatatatgtgcacaagtatctcctgcctactaagtggccagcgtggtgcctggaacacagtgggctctgagtaactggaagccgatattgttccccagtacacataactagccaggcctgtcccttggccacttgcactcattgccacctctctggtatcttggtccaccactttcctcacttctcacccacaagaccctttctgctgatctggatcttacctgatttttcttcctctataaaattatctgactcagcgcacactgatcttgccctggtttatctgattccccaagctttgagagtctagactttacaaagggcaggtatgctccctggggtttggcctcttaaaccccatgaccctcagcatagatttgaatctaaagtaggggtcggtggtggctgagatggaggattttgctacctggttctggttatatataacgcataggttaaatgcccttagggtatcacagaggctgagcgagaggctttcgagctgctcccagatgatgagcgccagtgtatcaagtgcaagactacgtgtttcctgtcagccctggcctgctacgactgcccagacggccttgtctgcctttcccacatcaatgatctctgcaagtgctccagtagccggcagtacctgcggtgagcatgggcctttctggaggaagtggggcaagaaggaggatggagagctgggccagacatgctcttgcctgccctcttcctccaggtatcggtataccttggatgagcttcctgccatgctgcataagctgaaggttcgggctgagtcctttgacacctgggccaacaaagtgcgagtggccctggaggtggaggatgggcggaagcgcagtgagtgatgggggggatggagggactccacaggcaagttctattccctttcttctgtactctgacccccttcctctgcctctattcaatactgcctactctttgctgccctcatttttcttccaggccttgaagaactgagggcactagagtctgaagcccgtgagcggaggtttcctaatagtgagctgctgcagcaactaaagaactgcctgagtgaggcagaggcttgcgtgtcccgagctctgggactggtcagcggccaggaagctgggtatgacagcgtgaggagttagggcacacataaggtgctgaggatccagcaccgaggaaaagtgctgcaaggggtagactgtgaataccatttggcagaatggacatcagcaggaagctgccaggcacaagagtgtgagatggcctggaaggtgttgggggggacaaggagaccaggccacctaaaaaggagaggagagcctctgtgataagaaagctagaagtgtttattttttatcagtacctggaagtggcctgagagagaggctgaggggttttgtgggcagggaagagttgtgggaggcttacgggtaagaacaggacaaagatgtatagacctgatccctgctaacacagctttagagttcacagtagaggatggattgcaaagtgtagctctt

SEQ ID NO: 137346 - DNA, 1032 bp, Homo sapiens
gagagtttgtcatcaccttcccccgtgcttaccacagcggcttcaaccaaggctacaactttgccgaggctgtcaacttttgcactgctgactgggtgagtctagaatgtggtgggatggtggggagaagcaggagggttgtagagaagctggggcatcatggcctccagacttggccacactcaaccttgaacctgcccacagttgcctgctgggcgccagtgcattgagcactaccgccggctccggagatactgcgtcttctcccatgaggagcttatctgcaagatggctgcctgcccagagaagctagacctgaacctggcggcagctgtgcataaggagatgttcatcatggtgcaagaagagcggcgtctacgaaaggccctgctggagaaggtggggagagtaccccagatcaagcaccctattctggtggaagttcggggaggcagaggcagcaccaagaagatgtagcctctactcttggcgtatagtgaaaagaactagatgcatctcgattgaaaaccacataccattctctgctataccctttaccagcaaccttaagtcgatttacttcattgtcagttttcccctctgaaaaatgggattatgataatgcttatctttttggatagttgattgtattaaagataatgtttgcttagtgactgacccatggcaggtactggtatagcagctatttatcattatttacatgacctagcaaaatagactggcatatgaaacctcactgctgattatctaggtgactgtatcaagttacttgatctttcatatctcactttcctactctaaagtgggaataaatacctaacttgcaagatgtaaggttagagtaaggtgatttatatgaaagccatctctctaacattgcctttgcaatgttgcagctgctattattggtaatgttaatacatgaagaaactgattgaaatttggaatgtttctcaggaattgccattttattacatgcagatggtttattaactccagctagggcaataa

SEQ ID NO: 137347 - DNA, 1022 bp, Homo sapiens
aaatggcttagctagatcaccctacagtgaagctcacagttgacaagcttcatctgtgtactcagagcttccatttagctttttaatctcttcctcttaaatataagcaggcagccacagattaacaactgagaggccagtgcggtgcagtggctcacgcctgtaatcccagccaaggtgggtggatcacctgaggtcaggagtttgagaccagcctggccaacatgacaaaaccccgtctctactaaaaatacggcatagtggcgtgtgcctgtaatcccagctgcttggaaggctgaggcaggagaatcacttgaacccgggaggccgaggttgcagtgagccgaaattgcaccacggcactgtagcctgggcgacaaagtgagactctgcgtcaaaaaaaaaaaacaaaaaactgaggaaaccctaaaaaatcccccaaaaaacagaagcaacttggagatacagaggctaggcagggagaaataaacttcaaaagaaaggcatatactgtaaaaatgaatgaagaccagaatactgtttaaaaaaatagcataccgcaaacaaagttatgatagcaaaagtgaaaaatgtaaaaagtgtatgttttccacttttgaaagatgaatagttgaggaaatctcccaaaaagtagagtaaaaagatggaaaagggtagaaaaaattagggaatttttctaggaggttcaatattcaaataggagttatgaaaagaaaatagatgaaaactgagaggatgaaatcattaatgaaatcactcaagaaaatttccctgaactggagaaccgattttccagagtcaatgggcctacccagtacatgagtgaaaagaaattcataccaagatatatcctgtaaatttccatgtcaaacactgagaccagaagaatcctataagctcgagagagagagaaacaggtttcaaatgcttatcaagcattagaaatcagaatggcttcgaacttttcaacagtaacactagaagatcagagcagtgtgcct

SEQ ID NO: 137348 - DNA, 2419 bp, Homo sapiens
catgagccactgtgcttgatttttttttttttttttttttttttttttttgagaaggaatcttgctctgttgccctgggtggagtgcagtggtgcgatctcggctcactgcaacctccatctcctgggttcaagcgattcttccgccttagcctcccgagtagctgagattacaggcgtgcgccaccacatccagctaatttttgtatttttagtagagacggggttgtaccatgttggccaggctgatcttgaactcctgacttcaagtgatctgcccgcctcggtctctcaaactgctgagattataagcgtgagacaccgtgcccagcaaaagaatttaaaagtacctatgtacctagcatatttctcttggacagcactggtctagaatgattttcgctttgttactatatgaattataaccattttttaaagttttattgcggtatgatttgctacataccgtaaaattcacccattttaagtacacaatccagtaaatttatggagttgtgctaccatctctacaatccagttgtagaacatttctaccaccccaaaaagatcccttatacccatttacggtcactcccctttccagcccctagtcccagtcaaccattcatctgttttctgtctatagatttgtcttttctggacagttcataaaaatggaataatatgtggtcatttgtttcttctctcacttagcatgtttttggggttcatccacattgcagcatgtatcagaactttattcctttgatggcccagtaatatacaccagttgatgaaccttttgagttgtttttactttttggctattcacagttgtcatttttaacagctgcagaatgtgaggagaacttttctaaataaccacataggaaatagtaaagtgacattgccagcatcagggtgcagggtgagacagagttatgagcatcaagttctactcctggctctgctacctgaggcttatctgagacttagttttcttgtcgataaaattaaggctggcatagtaagaccccttctaattaattaataataaataaaactaagcctgggactagatcattcagtgaatgttgctagagctcattctttgtgcaaggcctctctggtcaacactcagaaggcaaataacccagtgcctgcgtttgtgtatgcatagctgagtgctggacagaggagtaaataagtggaataaagcattaaaggtgctgcaaaagagcaacaaactaggtcatttaggaagcgggggttatcaggaaaggttttgtaggagcagtgatccctgaaagaagagtaagagtttacctgtcagagctgtggcttaatcatgtgggcatggggattccagtgagaggctctcagctgaggcattacatggtcaaatttgctatttttggaagatagttctggcagttagtaattgaggccagtgcagtaatacaggtaagaaagaaatgctgatgttgcctctaagtagagatagatttgagaagaaaatatgacggaggtgggagctgatgcatggtccaaataaatgtggagatatgtttatgaatgggaagatttgatattgttaggatgttaattctccccaaattaatttagactcctggcagaggaatcattgggttgaagggttcttgatatacattagcaaatttgttttccagagagtagaatgtatttattcccttaccggcactgtacctacttcactgtgtcttcaccaaaattgaatgtttatcttaaaaagctttgtgagacttctcagtaaagatgacagattaagcatacacatggctacttccattctgtactgaaactccacaaaaattacataaagggattttttaacgtgaaaaaaattacagagatggagaatacgagagaggagacaatgataaaattcttgaaactagaaaacagatagatgagaaaactgaaacataagccactactgaggacatcttgagaaccagcccgattcatacctcagaatcccccaaagatttgttatcagtggcaccaggcattctaggggtaaagatggatggggtgaaaataaggattggttcatgtctgtataagaagctgtgagggccgggtgcagtggctcacgcctgtaatcccagcactttgggaggccgaggcgggtggatcatgaggtcaggagattgagaccatcctggctaacacagtgaaaccccgtctctaacaaaaatacaaaaaattagccgggcatggtggcggatgcctgtagtcccagctactcgggaggctgaggcaggagaatggcatgaacccgtgaggcggagcttacaatgagccgagatcacaccactgcactccagcctgggcgacagagcgagacaccgtctcaaaaaaaaaagctgtgagat

SEQ ID NO: 137349 - DNA, 2331 bp, Homo sapiens
cggatcacagggtcaggagtttgagaccagcctggccaacatggtgaaaccccatctctactaaaaatacaaaaattagctgggcgtggtggcgggcacctgtaatcccagctactcgggaagctgaggcaggagaatcgcttgaacctgggaggcggaggttgcagtgagttgagattgtgaccctgcactccagtctgggtgacagagcaagactccgtctcaaaaaaaaaaaaaaaaagaatcacattttagctagagaggaaaaatggtggcagaagaacacaggatagcatattaaagtcagagccatttagataaagtcctaaaggaagaaaagagcatgagatgactccctggaagttgtgagactggaattgagttttgaggaaccaatgaaagaaagtggaaaaggacatttcagtagggaggaactgagcaaaagcatgatggggaatgaaaagactaagccgaagtggtaagagcaaaaggtacagctgtaaagtaaggcctgcctcaggggccttgagtgcagacctagggctcttctccctccctaccccttatattccagttccacttgggaggattcttcacctctttgcctctgttttggtgacatgttctcctttgggtttcaggagtgtaagcggcccccagaagcctttggctttgagcaggctacccgggaatacactctgcagagctttggcgagatggccgactcctttaaagctgactacttcaacatgcccgtgcatgtaggtgatggagggctgaggtagtgttgggctaggatcataggtattgatgccagatggtctcagctcacctggatcagtgggtccagggtgtgatgggccatagtcatctgctacctgtcttcccccagatggtgcccacagaacttgtggagaaggagttctggaggctggtaaatagcattgaggaagatgtgactgttgagtatggagctgacatccattccaaagaatttggcagcggtttccctgtcagtgacagtaaacggcacctaacccccgaagaggaggtgagtggatgattcatggttacgtgtcagctgtgtgagcttaggcaaatcatttagtatctgaaaaactcagtatctctgtaagatgaggataattatgcctgtcttatgtagccatgagatttagatgagatgaaagaaaacagtctggtacctggcatgtacaaacatgagatgggttctttcgcctctgtgagcccatttccttatctttaaaatggggataatatctactttgcaaatttgttataaaaattaaatgagaaggtatatgagatcctggctcatccataagtagtgttcagggagtggggtttgtatgcacaggagaaaatgagggcctagttgtgcttccaagaaagggtacattttgatccagagcaggatttttttaacttgcaggtattttggtaggtggatatatcggtaaacttcgtagaaattgaagtgaatacaattgaaattttgtgtgtatgctttttggtggagaggtagggagaaaacctatatgtttcttaagatgtttcaaaaaagtctctgacctcaaaattaaggttccctaggctaaagaaaatgacttaagatctcagttccttagcataaccctcatgccctttttacaaatacctgacctggcaggagtatgctaccagtggttggaacctaaatgtgatgccggtgttggaacagtctgtactgtgccacatcaatgcagatatctctggcatgaaggtgccctggctctacgtgggcatggtcttctcagccttttgctggcatattgaggatcactggagttactccattaactacctccactggtgagtgggaccctggggagccagggaatcaagtcagtgtgggctccctgcatgaccaaggtgtgatttactgtgtgtgtcccttttccacttgtgcaggggtgagccgaagacctggtatggggtgccctcacttgcagcagaacatttggaagaagtgatgaagaagctgacacctgaactatttgatagccagcctgacctcctgcaccaacttgtcaccctcatgaatcccaacaccctcatgtcccatggtgtgccagtgagtacccaggcaacagggacaagcggcaggagtgatttagtgatgtcctttgtgatggtggtggtggcggtggttgtcatctgtattctgcccctggcctttcttcattgctgttcttaattgggctacgggtttgactagtctagtagagacccaaaataatagtgattagatgcaccgtatgatggtatgcc

SEQ ID NO: 137350 - DNA, 1617 bp, Homo sapiens
ttcaggataaaggctaagctcctcattaccatgcatgatccagtccctgctgacctctagcctcatcccccagcactgcccacctcactcctctgctatagccacactgaactccttgtaggtatgttcatttttccccgtaagatgcagtatgctctttcatccctatcctttgcacatgttgtttcttcagcctggaagagattccccctgtgctctgccctgttgccatgttttgttttgccttcaggtttcagccagtttcaggtgttaccttttcaatgaagtcctttctcaaggccatccctccttatctccagctgctttgagtgcttccttctctaggctcccacagtgccctttatggaccgctattggcaatttttaatttttatgaacacatgtctctagagtactgtatatacttggaaggataccatgtcttgtctttgtgctagagtccagcgtagttctgaatacgggtttagtaagtgtttattggatgaataaaaatgggaggattcaagactggatgataaaagactgctcttgcagctctacctgcttatttggggagatggtacatacgtgcagttgagctccagacctagcatgactagcctatacagggctgtaaatcattcagccagcaaacacagtggatttccaatggagaacttttgctcttctcccctggcagattgagtcatatgtctgccggatgtgttctcgaggggatgaggatgacaagctcctgctgtgtgatggctgtgatgacaactaccacatcttctgcctgctgcctcctctgcctgagatccccaagggtgtctggcggtgcccaaagtgtgtcatggcggtaaggcctccccactccacatctgcctcatagggcttccttgccttccttcatctggccttattgagggcagcctcttagctcagccatagtcttaggttttgggtctctgtggtgggattaggctgggcagagctttgggagaaaggagcaggagattcagcctttgcttctgtcctctaagagctcccagaccacctggagaggtaagcatcataattagactatatgtggtgacatataaacagaggctaaattgtgtgttagaaactctgagatatagaagttcagaggagaggaaaatagctaagggtaataatcagggaaaatgtcagaaatgagacttgaaggataggaatattaagaaaaaaatgttctttcaatttctgagtttttgttttgtttttttttttcttttttagaaagtttgaggccgggcgcggtggctcacgcctgtaatcctagcactttgggaggctgaggtgggcggatcgtttgagcccagaagtttgagaccagcctgggcaacatggcgaaaccccgtctctaccaaaaaagatacaaaaattagccaggcatggtggcgcacgcctgttgtcccagctgctcgggaggctgaggtgggaggatcgcttgagcccaggaggcggaggttgcagtgtgccaaaatcatgccactgcactccagcctgggcaacaaaatgagaccctgtcttcaaaaaaaaaaaagacattttggaaaataggcaaattacttg

SEQ ID NO: 137351 - DNA, 1048 bp, Homo sapiens
gccaggcattcttggcactgggaatacaatagagaacaagatggacactgtccctgggctcatcgaagcatgtaatttagcagatcctattagactgccatttgttggtaatgccaaacactgttagctttttcatatgtattgtccctaacccccctcataactataagggaggaggtaatattctcattttacagttgggaaaactgagatatcctgtcttttattcctttctgagagagggccgagggggcagctcacctaccctcagtctccaaaaagcaactctgagttcttggcttagcccatctgtgcctcagccctcagcatgagatcaggtgatatgtagtccgagttactgttcttttaggatgggacagtctgccccagatagcagtcttgattcatttccttctttccttccagccggaacccacagaggaagacattgagaagaatccagagctgaaaaagctacagatctatggggcaggccccaagatgatgggcctgggcctcatggccaaagacaagactctgcggaagaaaggtaaggcctaacaggctggggtggcctcacctggggagaaaagtcagggccctaagtgtcctagacctgtgtttacagccatttttctctctcccagataaggaggggcctgagtgtccccccacagtagtggtgaaggaggagttaggtggggatgtgaaggtggagtcaacatcgcctaagaccttcctggagagcaaggaggagctgagtcacagcccagaaccctgcaccaagatgaccatgaggctacggaggaaccacagcaatgcccagtttgtaaggacccagccctgacttcttaatgctctgcttcttgtcccttcaataagcattcccctgcatggcactggaccagttcgcattaaccacaaaagcgggcctccatgggccctgccctcaggtagctcacttaattggggaaacaaagccaactcatatggaacaaagagcaagaaagggtgatcaagtgctgtcaacatgaagtgctggaagggt

SEQ ID NO: 137352 - DNA, 1026 bp, Homo sapiens
cctagtgatgcttattctctttctacactgctcagggtcagaggtcctggagttatctgtacggctagcttatttgttatgtgacaaagttttaactgatagagaaatcagagaagggagagcttgggctagaaggtgtgggaagagatggcgtctgatttagttggggagatggttggtggaggaagtgactggaagggaggagtgatacaagcaaaggtactgagaattcccaaaatgtgtgctggtgtcagtgctaaagaccagtggaacaggggctgttggtgtgggtcaggtgagtggaccacagctttggatgccattgggtgagggtagagggaagttattgcttttgcgggctggagtccatgtcctgacccttaccccttacctgtccccagcagtgtaacacacgtccatttgataatgaggagaaggacaaggaatacaaaccccacagcatccccctacgacagtctgtgcagccttccaagttcaacagctatggccggcgggccaagagactgcagcctgatgtgagtactccccttcttcgaacttagagctttgaggtggagggagtcctctccttccttctggctaaggctgtgttccctgttccattatcccttcttttgttctctgagttcttctgagcattagtgtgcctctctctggcttcactcttgcttttttctcccctctcagctgagctgctgagctgggtcttgatctgtttgtgcaacctcttttgtatgtctgctcttcttgcctgttttgttcctttccggacttactctgctcatagaagtagaactcttctttctctttatacctgtatcttttgttttgttttgttttgaggcatagggtcttgctatgtcgcccagactggagtacagtggctattcacaggcttgatcataatgcactataatcttgaactcctaggcttgagtgatcctctcacctcagcctctggagtagctaggactacaggtgtgtaccactgttcccagctccttg

SEQ ID NO: 137353 - DNA, 2193 bp, Homo sapiens
ctgaatacttataccctaaaagttcacttgtgttctagaccagagttcctcagcctcggcactattaacattttgggaagctaaggtgggaggattgcttgagctcaggagttcaagaccagtttgggcaacatagcaagaccccatctcagaaaagaaaaatatatcttgtcaggtttataggggtacagcttgggcaagatgttgcctagcatgacacaagggcaggttttctgtagagggagtgctgactaataagaaggagcagggatgaggccaacttcagaaagctaaggggctgaggttgaaggagcacttccttgccctttgagagttctcacagccaaggaactgtaggttgtttctttctacaaatagaccttagtttttctcaactatgaaatggaaagagctgtctttgttccccctaatgggatcagggcaaggtagtgaatggtaatgactatctagttcttccaagaaccaggctctctgactggagtgaggaggttgtagacttggggcctatgggagtccttcttggttactgagatttcagggaagcatcatacatatcttgtttctagtctccttggcccacattgggtcctgggttggccaggtgctagtgctactctgatataccatctcttagttctaggccattctgtctatagttatagcatgcactttcaccctttagccaccatggaacaagtttggtggtacataaggaggtgcatgtgcctttttggagcttgctttctctgaaacatgcctagagcttagatataattctgaaatctgcagaggatcttcactggtcccctcattaagtctacccctctggggtaagtggactgtgcagttattttccttttataattattagtaaaaggaaaaaggagtccacagtggaactgatttgctcaaggcagcatagcaaatcagtagcagagggagagccaaagctcaaattatttggcaccaaaatatcttgatgcttgctgtgtgtcctaactcctctgagcctctgtttcctcatctgtataggagatgataatactcacatgaccttgtcagggagattagaggacatatctaaagcttttggcagttgtgaccctctctattgggaccttgggcttctctgattgactggaaggtgacaaatgagagagaggtggctgggtgcagtggtgcagtggcttgtgcctgtgatcccagctctttgggaggccgaagtggatggattgcttgagcttaggagtttgagaccagcctggtaacatggtgaaacttcattgctacaaaaaatacaaaattagccgggcgtggtggcgtgcgcctatagttccagctactcaggaggctgaggcaggaggatcacttgagcccaggaggtcaagtctacagtcagccgtgattgcaccactccattccagcttgggcgacagagcaagaccgtctcaaaaaaacaaaaacgaaagaaatgagagtgaggtggggctaagcactgcctagagtctgggatccggttcattgggagaaaccctgggtagtgaaagtgtggagtgctgtattcctctgttctcccctaagactggacccaaagatagtggtcagtgggagggggtggccagcctctttgagccatttcttcttcaggcccagacgagagtgaaactgaactacttggaccagattgccaaattctgggaaatccagggctcctccttaaagattcccaatgtagaacggcggatcttggacctctacagtctcagcaaagtaagaacaggtttttgtcaagcacccctcccaccaaaccccaatatccttgatactctgggggcccccttagtttggatattagatctttaggctgcaatggaaggggcacagcttggtagcacacaagctgtcatcagaacatcttggaatcttttgctgcaatttgaggttgggataaggggatagcccccagtgaagtgagggactagagttgccctcattgcccttttgccctttctacaggcctactccctcacatataaatacacgtggcacatccatgtcttttcctacttgttttttcagattgtggtggaggaaggtggttatgaagctatctgcaaggaccgtcggtgggctcgggtagcccagcgcctcaactatccaccaggcaaaaat

SEQ ID NO: 137354 - DNA, 1011 bp, Homo sapiens
aggtgtggtcagccttagatgtcaggtcataacggtgactcctttgaataacattttcatttgaaaactagttttaattttccatattggtctggcaaggaagccagggctagagttcatattcccacctcacagatgagaaaacaggttcagaaagctaaaatctcatagctagtaagtagcggatctagaacatgaacccatatcttctgactctagatcctgtgtgctttccagtactcccaggcctgtgtgtcctacagcacgtgcctaggggataaggaattaatgtgggtgtggagaaggtttagggtcaacaaaacagaggctccatctcttaatttcttgaaatcctggcactgtactgttgggtgggactcaggagaagtttcctagggcatgtgcatggggccttgggtgcagacttgaggggctgctagactcttgtgagttctggggggaggtgggggtgggtggttgggtaggatgtttgcaggttaaagggtctggagtggctagaggtttgggaaggtgccagtgggattccgagctgcttttggtgacttccggtcttacactatgctgagataactcaagtccctttcccctctctaccctctcaggactggcagccaccctttgctgtggaagtggacaacttcaggtttaccccccgaatccagaggctgaatgagctagaggtgagaagactaggagctggtggtggggttgggagaatgtatacctgagttctaatcccacttcccttatagtttctctggctgaggtactttacctagctaggcctttattctctcttctgtgaaattgcattactttagtgtgcccagggcgtggaagaagctttagagctctaaatataaccaagagccaggggcatttagcatttgtgatttgatagcccaaaggctggggacatatatccctttctcacaaaggtttgctacttctgaaactcccctgtaaactagcctaccctagctgagtcaa

SEQ ID NO: 137355 - DNA, 3555 bp, Homo sapiens
cccgcgggccagcataaggggtcctttgcaatcaggctcccagagccgccttccgcggcccataccgttaagaccagggagaagggacagagaacactggtgcggggctagcgacctggttgaggtctgcgggggagtgccggtttgactccaccacccacggacaccagctcctcttccggtctccataacgcgcatgcgcatcactggcctttaaacgtgcaccgccggtccatccggaaagacgatccggcaaactaattacaatcttgttcctccgccgttgcaatgaactattttctctcagtccggggtggtacttttgagtaaccccttccaaatagaaacccataccagcctatttagctcggtctccactatatgaaggtttcctagggcttggtgtgacgcaacgtatacgaggctcggaaggacaccccgcggaaggatccggtttgttgtggtgtggggaggggagacgctgacaaaccaagatggcggcggcggcgctgaaggccgcggcgtttgggaggtaactgtggtggcgaaggctgcggtagtggggaggcaaccacacagtttggaagaaacggagcgggacgaagaggcggtagcagtagagtcagcctgagactctcagagcacgacggccacacgcccccttaggccctcggcgggcggcggctgccccgcttagggcctagcctccgagcattgcctcggcttcaaacagcggcggcgccatgagtccttaagggcggtccaagcctcccgatccctggcccagacctcgggcccaccatggagccggggtccgacgatttcctaccgccaccggagtgcccggtgttcgagcctagctgggccgagttccgagaccctcttggctacatcgcgaaaatcaggcccatcgcagagaaatcgggcatttgcaagatccgcccacccgcggtaagccccggggccggttttcgccggcggcgagacggaatgaagcagtaggatagccagcggcgaagtctggggcggagggcagctcgaggtggggagagggggtggctgggaccgttgtggttgcggcgcggatcggaaaaagggtgttgggccaggggtcctctcgtggtgtgaggcccacaggtgacctggagtcagagatccacccccaccccggcccttcagaatcactccgggtttaagacagggattcctagtgggccggagggagttcacagagaggcaccccgcacatctcttagcccgggccacctaggtcgaggctgtaaaaataagacgtttctccaatctgttgtcatcacttcctttaaggcaggcagcatagtatagtattaatagaaagatcgcagtcctgaagggagacagacttgagttcaaaactccactttgaagctgagcagctgtgtgaccttgggaaagtagaagtaatctctctgagcccgtgaaatggatcccagaaatggttatttagaggattgaattaaactaggtagcgtctgtatgtagtacgcactagataagtggtaattattgtgactgtgagggtgtttgatgtggtcattggtttattcctatgtaggttgactcatatttactcataccttgccaggccaattcatctatgataatatcctggcctgctggaccagtcaggaaatcagtctcacagggattgctctgtctcccttgaggtgggttcagggaattgtcctcttcttttcctcgttgaaggcaatgtcaaggccttttctgcacatcatcccgcagacttgacttcctatggagatgtttggaccggtcagcttggtggtggggtgtgagtccttctcagaagatttctactctcctctggtccaggatgtaggagatcccagaggatagggcactcttgggcccgcagaacagaatggagccatggaattctgtcccttttggaacatgattgccaggggtcagcaacaaaggccatagctttcctcctaggcctggcttcaggctagaagtctcccaagggctagggcaagctgctgccttgctgatatggtggaaaagtgatgataatgttcagtgatcagttgggattccaagggcagaaattgagctttgctggaaaagggtgtttttgagtgggtgtctcctggctgaaatggaataggaagcttcattcccacctgaggagggcaccacaggcctccttatccaacttggtgctttctggtgctcagccacagatctaggatggtttcagatagatcctctaggaggtgttgggtaagcgaatttcttccttcttggagtctggccacagatttctgaggtatccttgtccatggtgagggagtggcagtgggtagagggtcaggaaggctagtggaagggagaggcaggagtcctgggcagcctcaaggaggcactccctgaagtggttgggcaagcctgtgggaaaaagaggcatagctgacgtagggggtagttgaggcctgaattccttttttctatcttggactgacttaggcaggctggccttgtgtaggtgttgttaccctgctttggggcatcaggaaggggaagagtgacatgtcccaggtgtgcatggccagcaggaggccgtccttttcactgctcaacagtgtgcttctctctaatccaggatacctggctctctggtttggttttgttttttccttctctatggcagctcctaggccacctttaggcagctggccttcttctggttgaagtttgaagtactcgctcaagtgatgcttgggcccagggtgggaacctgtatatgggtgggtacctgggaattggaggtttgctggaggaaggatggtttggggcctgaattgctgggcaggtgactgctacgcttgggaaagatgggtgggaggagagtgtgggtaccctgagtagacccagtggagtttggaaggatcttgctttcttcatcaggtagccagccttttttttatcaccacatcccagtaataccaacatacatttggcatacagtagtctggagatgaaggcaggcggtttgcagggccttcccaggtatctgttgcatccatggctcctgccgtagcattccagggctgccatttcctgtcaggtgcttgatgttgcactgattgtctagaacttgattcagcaggaaagaagggtgcccggagttttgggtttgagcacctttttagctgggttacctgtgctgaggggagtgccctatcctgatgagaggcaagagggcatggggagcttgtctggatttgagccataccattttggcctgcctgtttttttttttttttgtccctgcttactgagccccagatgtttgccacctgctttggctggtaggggcaggggagtgtggtctgtgtatgcatgcaaaatatgagtcctctagcccattttctaaaagtgtgtgtgcagaagaggtcaacagtttttcttctctttcactgtctctcccccccgcccacgtgtatgcatgtatgtatgaacattgatgtctggtgtagtgcaaaggccttg

SEQ ID NO: 137356 - DNA, 1044 bp, Homo sapiens
tccccaccttccctttttagaggggaggtgatatggtgtagaaagagccctagtctgggaaacaggagacctggccccctcagtcggcctttggctagactcactgcatagccctgggcaaggtgcattcctcccctgggcttccatttttccacctaccactagcagaatgtgtatgtaagaggtgttgggggcagggtggtgtgctggacccttcagtgactgtgactaagctctttctaggtgcctggtcttctgccaggtgtttaggagtgaggtgggagtgtgacatttgattagaaaataattggaaaatattagatgtaattggaaaacattagatgtaattggaagccattacttgaatgccttacatctttatagcttattaaacactgccacctatatttaattcttacaataactcagcaaggcaggcagtagtgttcctattttgtagataaggaaccaaggcttggagaagcaaaaggaattgtccaaagtcatacaactgggaagtgatggatctgagactcctatggcatcagtcccttccaaattttaaccttgtggggtcctaaggttctggggttctgaatatgggatagctgtgacccagattttggcccagctccctggaaatctagggggcaccttgtctacagaaacactcagagaaagttggtgatacctgcctgagtgggatgtgggacgtggaacaaagtaacctcttcacttcttccctactctgagggtctgtgactcagagggaaggtgctcagccctctcctcggttcttgctgggaatgtcaagcctggcatagagcaggctctcattagatactgattttctttcaattgtgatgtggctccagtgaagggggatgttgggttgaagataccttgggattttgaagctccttgaaatgggcaagtggcttcttctccctgggcctcagttttctcacttgtgccatgatgggattggatcaaattatgtatttgacttcgttggtcctctgaggccggacttagttgggccca

SEQ ID NO: 137357 - DNA, 1051 bp, Homo sapiens
ctggaggcgggattcaggagggcttcttagtggtggcatatgacctgaatcttgacggaactaggatgtgggggaatttctcagattgcagatggcggagacgatggggattgcatttcaagtggtaggtactgtatgagcagttttggaggtagaaagcagaggagcatttgggaaaagcaggatgtgggccaggctggaatgatgggtggatggaatagggggctggcagccaaccctgaagtatggcttaatgtttaagagtgtgggctctggagtcagactgcctggatttgaatcctggctctatcattagtagctgtgtgaccatagatatgttacttaacctctctgggcctcagtttctttatgtgtaaaatgaagataaattacagtacctacctcatacggttgtcttgaagagcaagcaagttattcagtgtgaagtggtaagaatggtacctaaatgtgctaaatggtctataaatattagctgttgtatcttggagaagcctcaaatgccagaataagggacttgggctatctcttctgagcagtggaagttatagatgatggttcatgcatacaggagacagttgatcaaaactgggcttgagccgtgtgctgggaggggaggtttgagagattaatgggcaagatcctgcagtcctggcagggaggagaggaacatcttggatgccgggggtgggctgagctggggctgaaccctggagtgggggtgatgtcagggccaccgccccaggcccaggaggagagagaatttggggtggagagcgagcgatgggtgggagctctccccagggcggagccgagctccacagcgctgcagcccgggaccgggcctcgtgggcgcagccttcacaccacatccagcccccagtgcaaagcgctctgctgcaaggctggcaggcctgttgcagttccagctcctgcactggtagggtcccccccagtacctaccccagcccatttctgccctttgcctttgcctctgccgaataggggctggggagtaccccttcacctgttt

SEQ ID NO: 137358 - DNA, 1053 bp, Homo sapiens
gaaagctgtgtttaagccagtcattcaaggtccatgaggattctgagagttagagatgggggaggaggtgctgacagtgtccgcaaaggcctggaggtgagcaaggtgaaatcagacattggagggtgcagaggtcaggcttacctcaagcagctgtctgaagagtataggctttttattttattttattttttttttggtaggcagttggagagccatgaacagttcttgaataggaaaagatgaaaagtgacatgatcaaattagcgttttagaagggaaatgagggaggaggctatgcagtaatccaagggagagagaagccaaggtcgtgggcatagagccgaggagatggatttgagaggtgatcaggaggaagagaggactggagtcagagactgaagaggtaaccggggagagaggaggaggtggagatgacagaggctggagttcgcagtaagttcaagtgttcatgcctggcactggattcattcattcactgaatatttattgaatgccaggcactgtgttaggcactaggggtttagcactgaacagaacagatgcctgtcctgatggatcttacagtgagtgagacagaaaaataaataaacaactaaatgtctagagtgtatctgatgtcgataagtgctatgaagaaaaagctggggtgataaggtagagaatgttggggtgccttttgagagggagggcctctctgatgaggcagtatttgagcagaggcttgaaggaggtaagagagtgagccgtgtacctctcagggacgatgttccagatagaaggaaccgcaggtgtaaaggccccgaggcaagagtgtgtttggtctgtttggggagcagcagggagaccagtgtgatggggaaaaggctgaagaaggagtgagaggagtagaagatgagatggtaggggcaacatcacagtctatcttttagagctatttaggaggtagagtccacaataattggtgactgacttgctaagagggcaggaagaatctagggtgactccaaggtatgttttgggctcaggtga

SEQ ID NO: 137359 - DNA, 1155 bp, Homo sapiens
agtgaaaacatgttatgaacaccctgtcatcatttcaaaattactggcctttttccttggtcccatttccttgcttttattaattcatttccctcctcctttataccttgtccctgtatccagctgttcagattttgtttagatccttttaataattagctcagataccacatcattcattcagcaaggattctgtcttgcctgctttagattaggccttgtgctgacctttggtggaatattggaatgaattgtatctgatcctgctctcatggagctgaagtctagaagggagaaaggcacatagacaatgacaccgtagtgtgatttgggatgggacagaagtaggcccagaaggctgccagatgaggggcaattaaccccatctgggaaggcttcctactggaggggacgtttgtactgagtcttggaagagtgctagctttccttcatccccttcctccaccagaaatggtcttgttcactctttggcccttccaagcaggatgacgtcataggggaaaaatagtggagtcagtacctttattcaagtccgagttctgccacttaccaactcggtgactctgggcaagtcatttatcctctgagcctctgtttcctcatctatgtaatgcggctaatgccaacttacctcttagggctgtctttaggattggagataatgcatgtaaggctcctgggtgactgtcagctctagaagaggagggactacctgtgtcttgttttcctcatagccaactgtgtagcattgaattggattcgatctcaaagctgtgtgtattagacggttctggagcaaagaatgggcctgaccatagcagggctttgggatgagaaggctgagaggagtacagggtacatgggttgcatcataagaagagagaaccaggtgcctggtcttgccttatataaaggtgatgcaggagggaaaataagagtaggcgttcctgggaaagggattccaagtagggagttctggccctggttcttggtcctcttctactgataccatctcctaatctcacagttcagagcagtgaggcatggtggaccactacttgccatggcattcatggcaatttcagtcccaactttgtcactcactagctagctgaccttgaccaactcacttca

SEQ ID NO: 137360 - DNA, 1013 bp, Homo sapiens
gaggacagaagtctagaggagtcagagctggattttgacagtgggagagaggaggaggtaactttccaggaagctaaagaagggcaagaaggggtaagaggtttctcttctcctccccttcctctctgtgttctgccgccgcctggcccagccccaggaagtgggtgacccctaagctggctgagtgcctggttggcaccgaaataaacttgccttctctctcttcccctccccttgcctctgtcccctctgtcctggctttaattagcagccctggggatgagtcacttggcagctggggagggaggctgcacagagctcagtgaagcttcgactcctgccctgagccttacgggcagcacctctgtgtttatgcatgtgggtgtgcactgctgcatggcagcgtggctgtgaagagcaaagtgcaacactgcatgctggcgcgtggccctgcatgtcagggggtctgcagagaaccatatctggttgctgctgcgtttgttgctgtgtgccactgaatgtcagtgtgtgtgagcgtgtggctggagcgtgtggctgtggttgcaagtgtcagggaaccagggagcttctgggtgaacaaacacaaacgctggacaattgcattcacccctctctacctaagtgttctttatgcgattttgcttacacaaaccctgcacttacattcccaattttcacttgtcttagtctgggtacactttgttgtgaggaacggaagcccactcaagctagctcaagaataaagggctaatgaggggactattgtgaggctacatttcacagaatctaagaacagttaatgaaaaacagccaggcctcacaccaactggaagtgggaccaggaagtcgaggaccaaggttgctgtctcgctgtctgcatctcctgggcccatgtctcatctttctccatctctcatggcttgcctggtccctgtcatctctttttctttctttctttctttttctttttcttttttttttttttttttgag

SEQ ID NO: 137361 - DNA, 1046 bp, Homo sapiens
agtgcagtgttgcgaacatagcttactcaagtgagttcaggagtttgaggctgcagtgagcaataattgcaaaaaaggaacaccaggctggcccttctagttgctatccgcccaattcttttaagcagagacggggtctctctgtgttgcccagactggtctcaaactcctgggctcaagcggtcctccctccttggcgtcccaaagtgctgagccaccacgcccggcccaacgtggtattcttgacagctagggcagtgtatggtctaccacatgctgtcgtctgcttgcagtgggatgtcagcatgctccccgcaggggctaaggccactgagagacagcacgtgagacagtgagcccagggagaggctcagggaagtctctcctttggggtcttgggtacttttcccagggggtgtctctccttcccaggagggaaaaccatttatcttccctcccactgtgttgtgagcattatcttcgtgtgggaggaaatggtaatgttgaatttaatgagaatgagagtcttgcttctctatctagatctggggcaagaatggggttgttatcatctacaaacatttcttggctgtgtgcacagcgcaggaggggccacgaggctgagcaaacactgcactcttagcgcttgcagaacccctgctcccctccatccagggagacagggttgcaggcctagccatgccatagaggcaacactcaggacaaaatgagtggcaagaatggtgaggagtggaagttctcagaggaaggagggatcaggccaggccaggctgctgtttgagtacctgggcggtgggtgagggatgaggggtatggaaggaatgtgagtggtcccttcatggaggtggcagctgggaggaagacgtcagaccagacttgctgcctgccctttcctcatctgtcccacccctgcctaccaaggtctctgaatttgctgggcgcagagtaaaggcctggagcatggggaagaggccacacgtgtaccgagtgagtctcagccttctgccaggccccacgctatgtga

SEQ ID NO: 137362 - DNA, 1039 bp, Homo sapiens
aaaaattagccgggtgtggtggcgtgcgcctgtaatcctagctactcgggaggctgaggtgggagaattgcttgaacccagcactccatcctggacaacagagtaagactccatctcaaaaaaaaaaaaaaaaaaacagtacttgaaaaaagtacatttgccaggcgcagtggctcaccctataatcccagcactttgggaggccagggcgggtggatcacctgaggtcaagagttcgagaccagcctggccaacatggcgaaactctgtctctactaaaaatacaaaaattagccgggcatggtaccgcatgcctgtaatcccagttattagggaggctgaggcagaagacttgcttgagcccagggggcggaggttgccgtgagccaagatcacgccactgcactccagcctgggcgacagagcaaggctccatctcaaaaaaaaaaaaaaaaaaaaagtacatttaattgtcataatcagaggcataaatgaagactcgtaggaacccccaaggggagagagagttctaccaggggacaaggaagacttttggaggaggtggaatttgaggtgagcctttttaaaagggaggattccaactggtggagataaggaggaaaggctttccaggcctgggggacataaaaacaagaaggtgggaataaatatgccctgtttgggctaacaaatattccattttgactaaagcaaagaggcttcacctaagggagaagcaggaagagagactgcagggtttcccaaactttattatattctgctacagtaggtctggagggataagggaatttggggggaggagggttgtgggcaggagtgtcctttttaaaattttttttctcattttaaaatagaagtaatccatgtaccttatttagaaaactcaaatcagtaaagtcaaatcactacagacggactcgtgaaaagcaaaagtctactgccccacacatccccacccccactctcactttttgccaccacttttagttatttattctgatttttatctccataccta

SEQ ID NO: 137363 - DNA, 1025 bp, Homo sapiens
ggtaggaattagccagttgaggaagtagaaggaatttccagatattggaaacagtatgcatgaagacatgaaggcaagaaacagcaaaacaaatactgaagcatgaagattcctggggtggggggaaagcagcaagaaaaggtagagaggaaccagattggaagagggtcgtaaatgcatggctacagaattcagatttgttttgtaggacagtgtggttcccaaactggctgtataccacaaacaggtacggcattctgggccccggcccctaaaacattcattaagtctggggtgaagatttggaatcttgaatgcttataaaggttaccacatgactagggtacagccagatttggaaaccatagcttgaaggcagtgagggagccatgaaatggtttttaatagggggactccagatcagatgtgaacttaacctgtttctggctggctagccaaccagcatggaaaacagattaggttagatgttcatgctgtatgtgcccgtgcctgtagcttccctgttaatcagcttcttacactactatatttgcttattttgtctctgaataagctttaggcaccacaagggtgggcctggggatattttgcttaccagtatagcccctgcaaaaaagcacagtgcctgacacaaaacaggcacccagtaaagtttttgaatgaatgaatgcatgagtgaatccatttgtgagagagcgaatggagatgacaagattagctaggagactggaaaaagaccaggaggcctgcactagggcaaaggccagtaggaatagattggaggtgttaaggtgtgaactgttaaggtaagatgataacttaatgactgattattggatgtggagggtgactgagaggatagaatgagtacccatgaatagccatgattcctaccctgtcccagtcatctctttccttatccatctctgaaacaatctgcttacatcctcctcagcaactggaattcctcaagttagttagacattctgtgtgctgtgtggtct

SEQ ID NO: 137364 - DNA, 1050 bp, Homo sapiens
attacaaaatactacacaggagcatcactatgcctgtgtgaaagtatatgtatgaaagtttacctagggttgattcctagaagtggaattgcaaagtcataggatatttatatattggtttttaataatacttccaaattgccctcctgtactatttactcagtatttttcttgaggttgatctgaggtctaacattgttatcctatatcattttcatcccaagtagtgatatctgtgaaatcacaggtttgatgtgtgctaattatgtattcttctaatacatattaaaagacataactatcaaaacaaaataaatttgtctgttttcaaccaaagaagtcacgtaccactggtggtactgtgtgccataatttggcaaatgctggcctttatggacgagcacaattcgggggtcagacctggttcaaattctagctgtagaaacttgtgcaagttacttcacctctgagcctaagtttccacatctgtaaaaggagataataaacacctaccttgcagtagtgaagcaaagagaaaattaaatatatatgaagcaatttggctggcatctagatcattcacagccctttaaaggtcacctttgctgttctccccactttacagataaggaaactgaggcccaaaaaggtttgaacccaggtcttccaagtcattcaagtgctttctccactgtacaggtggttatcaaccttggctgcgcatcagaatcgtttgtaaagctttttctttttcctttttaaaaagtaaagcaatatatacacaggtaaaaaaataaaatagtacagaagggcttataatgagaagcagcagttccctgcttgcacccccacatccaaaggatgtggagctctttaaaaataaattgctctggtcccacctctggaaatctgattcagccagcatggataataacccagataactaacccctacctcacaggataaaaaggattacatgagatgccttaggctaaggccctggcacacaggaacacatgtgctacaaaggagctttggggacttaagtcc

SEQ ID NO: 137365 - DNA, 1691 bp, Homo sapiens
acacccagagagaaccattgactgggctttgggcaggtatgtagggaggagggtttgaggcccctggtcctggggcactagacccctcttaattctctccttacaattttatttttctttttctccctcctccttcagcaaggggactgtgtgatcagcaaagtcctgaccttcgacctcaccaagtacccagatgccaaccccaaccccaatgagcagtagcagtatttttgccctcccgccctgtctggatccctaagctgtccctctcccaatctctggatatttgactcccaaccttccccctacctcctggccctttttggtgtagtcatgggatttaggcactgctaatcaagcatgaagaggaacagaggtgatgttaggtctggagcaaaaattcctgaacgacagggagtattctggcctctgaaaggaggtgctgagctgaacagggccatctgttcatcacacacacccccttcctccccctcatcacccataatcgtgggccccttgggcctcttgcccactgtgtgtgtgggtatgtatgtgtgtatgtatgtatccgcatgtgtgcatgtgagtatgtttgcaaaataataaaggatattggagacctgttttagaaggagcctaggctgaatttgattccaagagagcttaggatgacagcacccctgagctgggcaaaggtactcaggacctcataggagtcttaggcagttacctgaaactgccttcattcactcatttgtgtattcattcatttatgtattcatcagacacataccgaacaccctctatttgtcaggctctgtgcttggaatacagagttgaatcagacatgatctctaccctcctagtaaggagatacagtgggttcatgaatgactatagttagctgaatgtcatatgtactttgaatttgagaagtgggtgatcccctctaggcttcctggaggtcacatttaagctagaccttgacaaattggtaggatttggtcaggcactaggagtggagcatgagctctggggacagacagttatgggttctggtcccactttttatcacttactagttgtttgaccttgggcaagtcatttgaccttctgtgcctcagtttcctcatctgtaaaatggggctaacaatattacctacctcataggatttaatgatgtcaagctcctcactggaggccttatcccttcgtggagcccactaggtgccgacccctcagaatataaccctcatgcctggacccctgagagcttctgatcccagctattagggacagaagaagcctccaaatctggaaggtgctgaatgccctgctgactgggaaagtttcagggcactgatggggtctacctggtaagcggagggcctgaggaaacctgtagcttcaatcatgtctggtaaccgggtgcctgagccccaatctgggttgtgaggaaataggggagaggtatcctgggccacatcccagcctaacacctgtgaggttcattttaggaactaacctcattagctataaggatcatgcagaggcagcaaagccgggtgcgatgagctcagcctttactcattcacatacaccatcacactttaattccaatctgtatattgctttttaaaagttaagtccattctaattacccaaatatgcatgaattcattctccttttg

SEQ ID NO: 137366 - DNA, 1585 bp, Homo sapiens
ctggtggaaggaaccgagctggagaagaagaacctgccctccgtataggagcaggcgcccaggccacactcagtcagtcatctttcggtgggggccttggcacaggggccaggcccttcttgacattgctgggcctggggcttacaggatgcccaggctgaggaagagatcaagcaagagatgaacacactgcagcagaagctgaatgagcagcagagtgtgcttcagcgtattgccgcccccaacatgaaggccatggaaaagctggaaagtgtccgagacaagttccaggagacctcagatggtaagatttacccttctacttgggcctacgatgaggacaagaggctaagggtatgccacgggcctgctatacatcacagcagttcctgttctgacatgttttcttacttaaaactctcaggagccctaaacagtaggggttattacacctgctttatagaacggaaaattgctgaggttcccggagagtaaatgacctgttcaaggtcacacagctggttgctggtagaacacagggaggaatccatatttgtgtggctccaggcccctgtttcttgctctgcattgtatccagtggccagtccactggatacagatccttctgggaccctcctcaggcattcctctctctcagtgggatgttcctgctctggattgtcatttgcaggtccttcttgccagggcactgaggggtctcctgtctttctttctggcagagtttgaagcagcccgaaagcgagcaaagaaggccaagcaggcattcgaacagatcaagaaggagcgctttgaccgcttcaatgcttgttttgaatctgtggctaccaacattgatgagatctataaggccctgtcccgcaatagcagtgcccaggtaggctggagccccttacccaaccagctgctaccatcctcagttgtccttccctctaggcttcctgtccctatctccatccagtctcagatacagatcctgacccatctgccttcccctaggcattcctgggccctgagaaccctgaagagccctacttggatggcatcaactacaactgtgtggctcctgggaaacgcttccggcctatggacaacttgtcaggcggggagaagacagtggcagctctggccctgctctttgccatccacaggtaaggctgatcccctagggcagttgacgaagagactgaactgaggccaccagaggctctggggcccaaggatacacagagatctgcgaaggtgatggtttggtggaatctggattgcatccctgtttcactatctactgcagcatatctggctttggtttttctggacctgtcttccccatccaccctcatctgctcagcatgtcctcaccggcctctgcatgtatttagttccgcctccaggcttttgctcacgaggttgctggctaataatccctttccatgtaaatctagcttgatcatcacctttcaccccttcacccttcctcattctcctcccctttaggaagccctccttgatcactgtggcataccctgaccttcccctcctgaatgccagtagtacttgagtctga

SEQ ID NO: 137367 - DNA, 1004 bp, Homo sapiens
atcctggggccgggcgcggtggctcacacctgtaatcccaagcactttgggaggcctaggcgggcggatcacgaggtcaggaggtcaagaccatcctggctaacacggtgaaaccccgtctctactaaaaatacaaaaaaaaaattagccgggcatggtggcgggttcctgtagtcccagctattcgggaggctgaggcaggagaatggcgtgaaactgggaggcggaggttgcagtgagcctagagcgcgccactgcactccagcttgggcgacagaggaagactccgtctcaaaaaaaaaaacttaaaaaaaaaaaaaaaaacctattctggagaccactccaaagtagtgtatagagatcttcataagggctttctaaaatgtacataagtttatgtccttcttattcttgaaatcattcactggtacctcacctttctcaggataaagtctaaaccttataaggccctttataatctggcttctacttgtctatctagcatcttctctttctgtgccctccaacacacttgtacgcatgcacatacacacacaattgctactactgccatatatatatatatattttttttagctttcgaagtttattgaagttgattactcttttttttttgagacaaggtcttgcactgtcatccaggttggagtgcagtggcaccatcatggttcactgcagcctcgatctcctgtgcctaaacagtcttctcacgttagcctcccaaggagctgggaccacaggcatgtgccaccacgtctggctaatttttttatttttgtagagacggagtctccctattttgcccaggctggtctcaaattcctattctcaagtgattttcctgacaggctcccaaaatgctgggattaaaggcatgagccaccattcctggcttgctttctcttttgaattattttcagtttgatgaacggaccatgagcaacctcccctggctatttttttgtgatgctcccaactgcata

SEQ ID NO: 137368 - DNA, 1458 bp, Homo sapiens
tctgtatttagatttcctaaaatttacaattgaaaaaggagacccacatacccaagttgttccaaatatccatcaaagttttccagtaactgaattgaatatcaggttttcaatttaaatgaactaaaatttcataaaattaagattttatctcctcagttgcactagccaaatatcacgtgctaagtagccacatgtggctactggcaaccggattggacagcacagtggcttggttagattcagattttggggttcgcttgtttgttgtggctacggctccttcacagctggtggtgttacttccatcagaaggtacttaatgtccattagtggctctttttgtgtggtttgcagccatgcttcttattgcatagatccattaattagtcaggggttgcaaaatggtgaccttactctatcatttctgtgtttactggctggaatactataaagagagacttcctctcatcatttatttggttattctgagatacagtttgtataggaaaggcaggctatatatgcttgatttttttcccccctttatcagtttataaaataaggaattgcttccttggctttctcaagatttgtccactgagttctcatatcattatgaatttaaatatatttggtgtctttcagtctgttgtggttattatccttcttggtgctcaggttgtcccatctttggccaatggtgactcattcagtttggcttctgaatcatttcaacacaaccctggtagtctttgatatctcccttgctttccaatatgtccagattcatcctccccattttccacccagacctggaatccactatttctccaggaagctctgacttcctttagtgggaaatgctattatttagcaactaccatctggatattggagtgttcatgattgctgagtttattagtgcttctagaacttttcaatagattgggctattaaatgcggtttttttgttgaaggaaaaatgcatcatgagttcatattgatactttgaattgaaattgtaatttttagtttaacgtcattgattttctttttgagtcttccagttattgttgctgaaaatctcagttcctagcaacactaacataataacacatttactttatcctactctgtatatactagtttgaaaaatcacaataagatattattagtaaaagggccaggcgcagtggctcacgcctgtaatcccagcactttgggaggccgaggtgggtggatcacaaggtcaggagatggagaccatcctggctaacatggtgaaacgccatctctactaagaatacaaaaaattagccgggcgtggtggcaggcgcctgtagtcctagctactcgggaggctgaggcagaagaatggtgtgaacctgggaggcagaggttgcagtgagctgaggtcgcaccgctgcactccagcctgggcgacagaacaagact

SEQ ID NO: 137369 - DNA, 1103 bp, Homo sapiens
gtggttcacagagaatttccagtatctatgcacgagaggccctcattgagattgactacggtgatctgtgtgaggatctgaaggtgaggatcaaccacaggggtgtggtgggggtgggggttgggtgggagtgggactatcttcctagttgtccagagaggaggtcagcccatctgggggctctgtgaagaccatggctggaaagaggggaaagctggcaagggtgggaggattcagttgtgaggcaggatctccacctcatatattcaaacagacatatgcacattccctaccccataccccaagttgcccctgcccttgcctgctatcagtcttccccttccatgtgtgtatataactaagctaagcctaggtccacacagagaagagacttcagtacagtgaacagattgacctcaggtgttcctcagggctctttcctcctcacttggcattctttcatcctggatatcactttacttccgtggcttccgctgcaatctctatgctaggtcccacaggtacctcaagccctagccttcctccccatatttacccatctcctcagtgccactcacatgctcagccagaaatttgagcctcatccttgacttctccctctttcactttacataatcaattaattaccaagcaccaagccctatggattctgcctcctaaatatcttttttttttttttttttttttgagacggagtttcactcttgttgcccaggctggagtgcagtggcatgatctcgactcactgctgcaacctctgcctcccaggttcaagcgattctcctgcctcagcctcccaagtagctgagattacaggtgcccgccatcatgcccagctaatttttagtagaggcggggttctaccatgttggtcaggctggtcttgaactcctgacctcaggtgatctgcctaccttggcctcccaaagtgctgagattacaggtgtgagccactgtgcccggccctaaatatctattgaattctggtttttgtttccactgtctaatgcaggccactttcatctcacatagccaactacaggagcctcctaaatagtttatgatgtgtttcaatcatcatt

SEQ ID NO: 137370 - DNA, 1290 bp, Homo sapiens
tacatatgtgtattcatagaaaatgcacagtattgtttgtgtgggtttaaaaaaaaaaaaacaacaacaaatgttaccatactgcacatgacaaagttttgatgtagaaaaaaatgctcaaatataacattaagtcagaatacagagttttaattacagtctagtctcaactatgtaaaactgtctgtaaatcaaatgctgaaagaaaatgtgctagaatgttaattgattatctagctgatgagattgtgagtgattccccacttaatactttctctatacttttctacatatattagataacttgtaaaattggggtgtgtgggagaggacaaccaaattttaaaaagataggaggctgaggggtgatgggggtgtgaaagcaaagctcattgacgagtgactccaataaactgcctagtaggaagggtgggagcaggagaatatcccagggtaagatggggaaagtcttcacctattgtcctgttcccactgctgggaccaggaggaacaaagacacatgaagatcatagatgagaccatggctcagctacaagacctgaagaatcagcatctggccaagaagtcggaagtgaatgacaagaatcatgagatggaggagattcgtaagaaactcgggggcgccaacaagtgagtgggttcaggcctggggtgggaggacgtagatagagcaggcagcctgccagatttgggtctcacctagcccctggaccttttttagggaaatgacccatttacagaaggaggtgacagccattgagaccaagcttgaacagaagcgcagtgaccgtcacaacttgctacaggcctgtaagatgcaggacattaagttgccactgtcaaaaggcaccatggatgatattagtcaggaagaggtgagtattgtggctggtggtgggagtgggcgatgaacatcattaaccagggatggggagtgaaagtgaccaggaagggcagtgagagagagaaagatggtgggcagatggtgaagggacatgaaaagggatgcagcagaaatgaggcaaggtgcagtggtgaaggcaggtgaggcgaaaggtaataatggctttggtgtgagagagaagttgaattgggagtaaagctgcaagccagtgagtgggtggtgagagagttgagccaggaaagaatgaagtaattcattaaccttagggacctgagctatattagctccagcaggtgacagaaattggtaggagtgggaattgagggacattagccaagagcaaaggaagacagaaagctagggga

SEQ ID NO: 137371 - DNA, 1263 bp, Homo sapiens
taatgcctacttgcagagctgttgattagaggattagagataatgtatgtaaagtacatagaagcctaataggaattaccatagctggtagaatcagatggactcttttatgcctccttgtaggaacttggagggcgctggggtcttcattgtttaaagggggataaataaggtttggccgaatcttccctgccttatgccatgtccacagggctaggctgaggaacttagttcttcagcttcaggggaccgttttatgtgcatatggatggatgaagcaagttgtgactgaaaatcagtaactctgggtccctgagccctgggtctagtttccctttcttcccatagttggattttgtacattggttatctctggctgatgagattatgagtgattctccccccacctttatacacagtttggagtttgagaatcagaagactcgcttgggcattcagttggattttgaaaagaaccaactgaaggaggaccaagataaagtacacatgtgggagcagacagtgaaaaaagatgaaaatgagatagaaaagctcaaaaaggtaaggaaggaaagaattaaaagacagactaataactgggaggaaaaatgggaagaaatacgacagacagaaggataatgtccacaacttagaaatttctcatctaaatcaataagaaaaataccaagacctaaacgggaaaaatggataaatgtcacaaacagttcaagaagactttcaaatagtccctaaacacatacaaataatttagtcttactaaagaaatgcaaattaaagcaacaattagatacaatgtattttgtaacacatcgtggaaaatgtaaaaacagaagacacaatgctcaataccagccatggtataggagaccagtattctttttttctttttttgagatggagtcttgctctgttgcccaggctggagtgcagtggcactatcttagctcactgcaacctccgcctcccgggttcatgccattctcctgcctcagcctcccaagcagctgggactacaggtgcctgccaccacgcccagctaatttttgtatttttagtagagacggggtttcaccatattggccaggctggtctcgaactcctgacctcatgatccacctgcctcggcctcccaaagtgctgggattacaagcatgagccaccgtgcctggccaggagacgagtattcttatgtaatgtggcaccatccttcaagaagcttcacaatgcatttatactctgtaa

SEQ ID NO: 137372 - DNA, 3352 bp, Homo sapiens
tcttacccaaacttttccacctttcaaagggacgttaggattggccactgtgctgatctggagtgcacacagcaagctagtctgcaattgcctcctcctcagtccatacagtctcattcagatagggtagggttgcatgggtacagaactagtgggctgtcttttttgtttgttttgagacagggtctcattatgttgcccaggctggtcttgaactcctgggcttaagctgtcctcccattgcaacctcccaagtagctaggattacaaacacacactaccatgcttggtattgggttatcttaaccactaggcaatacagttgcattcacttcctgatatagattctagtctgtccccctttccatactgggaattaggattcctgagccagcttccaaaagcttcatacttcagttttcccttcctactttactcagtacggccgcctcattgacctatgccagcccacacaaaagaagtatcagattgctgtaaccaaggttttgggcaagaacatggatgccattattgtggactcggagaagacaggccgggactgtattcagtatatcaaggagcagcgtggggagcctgagaccttcttgcctcttgactacctggaggtgaggcttgttggggattgggtcaggccagtgttcaagggcccctcctctagtactccctgtttgtgttctgccactgactgagcttctccccacaggtgaagcctacagatgagaaactccgggagctgaagggggccaagctagtgattgatgtgattcgctatgagccacctcatatcaaaaaggccctgcagtatgcttgtggcaatgcccttgtctgtgacaacgtggaagatgcccgccgcattgcctttggaggccaccagcgccacaaggtgtggattcccttgcccaggctggagctggacaggctcagtactggagattcatttgttcagcttctccccctcttctctcttccccctgctgtgtgtagacagtggcactggatggaaccctattccagaagtcaggagtgatctctggtggggccagtgacctgaaggccaaggcacggcgctgggatgagaaagcagtagacaagttgaaagagaagaaggagcgcttgacagaggagctgaaagtaagccacaggcagtgctgtttttagcagtgggagtcctaagcctaggtcagccaccaccttaccacctagcccttctttcttgttcccttcaggagcagatgaaggcaaaacggaaagaggcagagctgcgtcaggtgcagtctcaggcccatggactgcagatgcggctcaagtactcccagagtgacctagaacagaccaagacacgacatctagccctgaatctgcaggtggggcctggccttcagccctgttctccaaaggccatccacacattcctggcctaggtttctctgggggtggggaacttgtttcacttccccgtctcctcccagcctgccgcagggagtcaggtatagcatagagtcagacagccaggggttcagagcttggctctgccttgagtatgacattaggcaagtattttcacctctcagtgtcaaccttcacatctttatctgtgaaatgcgagttaagatgatacctactcggccgggcacggtggatcacctgtggatcacctgaggtcaggagttggagaccagcctggccaaacctgtctctactacaaatacaaaaaattagctgggcgtggtggcaggcgcctgtaatcccagctacttgggaggctgaggcaggagaattgcttgaacccgggaggtggaggttgcagtgagccgagatcatgccattgtactccagcctgggtgacagagcgagactctgtctcaaaataaataaatgatacctactttatagggtcattattgaatgagttaacatgtaaagtgcttaagactaccatgtgttcagtttatgttatgtgctattgttagcataatttattcattcaacaaatttgaatttttgaaagtgagctatgggcatttcagtccctgcttgtggtagtgggcggggcggggggggactgttctaggtatattaatgtgttttgttttttttactgactacttccccagaccgccctagaggttttatatgtagtgtgtgtatttatatatctttttctaaactcaaaaaatctaaactgaattctgaaacaactctgcccccaggggttgtagatcaaagactgggacctatacctaatgatgtttactgtgtccccagccctgtggattgaagctggctgaactggatgccagggaagaagccatgtgatggcttcagtgcaacatcatggaggcttgactagggcagtagtgctaagccaggttctctcagttgtggagagctagcccttcctgactgtggggccaatgcagtcaaggtagctttttctccaaggagcctggtctgctttgtcctctcaacccattgcctgtaggaaaaatccaagctggagagtgagctagccaactttgggcctcgcattaatgatatcaagaggatcattcagagccgagagagggaaatgaaagacttgaaggagaagatgaaccaggttggtagggtgtgggccatgccagcgtgtgtgtcagggcaggactgggactggaagcaggacagactaaaagggccgatgccctccctggcttctcttctcaggtagaggatgaggtgtttgaagagttttgtcgggagattggtgtgcgcaacatccgggagtttgaggaagaaaaggtgaaacggcagaatgaaatcgccaagaagcggtaggtgggaggattggtagaagagattggcatgcccttgagcctctagcttgacatccttggaaaaccagatgctgtcataggcaagggtcagctcttagaactatgtgagtttatgtagctaggccttaaagaacagaaatcaggagggcagtatggcatagttatagtggttaagagtgccaactctaaacttgattttctggattcctggattacaaccccagctccacaactcgttatctttggcagtgacttgacttctgtaagctgcaatatctgcaaaatggtataatgatacctatctcatggcattgttgggaggattaggtgaaataattttttttttttaagattacctgttttaccttttttttttttttttttttttttgacacaggatctcactctgtttccgagactggagtgcagtgtcaatcttgaccttcccaggctcaggtggtcctcccacctcagcctcctgagtagctaggactacagatgtttgccaccacgcccgg

SEQ ID NO: 137373 - DNA, 2467 bp, Homo sapiens
gagcaacacagtgagaccctgtctcaaattttaaaaaataataaaaattttttaaaaataatgtgatagtcattaatattaataacaaccctatattaagcacttaatgtgtattctatgcagtggagattacccacattttgcagatgaggaaacaggtacagaaaggcctgtgaagctttatcttgatttgagcctccatggttggtgaagaagatgccttggctgggtagaacacctatgagaggttctggagctctgggaggcccccatcattagttagtagatcaaaccgaacaccatctatgtctgctttttagtaggcctcctatattagtgacagattgtcctggactgttcggctcttggatgagtgggcacataaagggtgtgatctagagcccccatggtcttggcgtaaactcgtgcagcccctgatgatggaatgtttgtttcccaggccaagatcaagcaaaagctgcgggaaattgaagagaatcagaagcggattgagaaactggaggaatacatcaccactagcaagtatgtagctctgcatctgtcccccttacttccaggcctgttcttgtgaccctacctacatgcccctcttcatgcaggacccccagagctctctgagccaggagtattttctcaccagccggagtaactcctgtgtgccctcactttgtaggcagtccctagaagagcagaagaagctagagggggagctgacagaggaggtggagatggccaagcggcgtattgatgaaatcaataaggagctgaaccaggtgatggagcagctaggggatgcccgcatcgaccgccaggagagcagccgccagcagcgaaaggcagagataatggaaagcatcaagcgcctttaccctggctctgtggtaagagcagagagggaactcatttcctgagcacttacactcactgtcacacgattttcccagcagccctgtaaggacagggttgccaatcccatttttattgttgggggaaatgaggctcggagaggtttaaaaaagcaccgcttctaagaggaagaactgcagttcaaacccaacttgttctcctgagctcatgttctttttttttttttttttttttatttttcaacctgtcatactaggcaatcatgttcttttcatcataccaattgcgtctttctgaaggttttgtcttgctatgtctatgcctctgggaggggaattggaaaaccaggaaagattttggaagcaggtggggccatggggctggaattactctcccaggaagtagctctgtgcagtcttataaaggggctcccttggcatgtattaactggtccagtagcttttagggacaccctgagctttatcagatctcttgatcttttggcctctttcaccaaatcctgagttcccaggttccctgaatattatcccatacctgggttcaacttagtttggttccactaatatttccctatcacttctctagacactgctggggagataagtatggttagagtcagtccctgcccccttaatctgatagttcttagggaaccaggcttggttttggaggctgcaggaagggaactggtagaagagattgattgattgattgattgattttgagatggagtctcgctctgtcgcccaggctggagtgcagtggcacaacctcggctcactgcaatctctgcctcctaggctcaagtgattctcctgcctcagcctcccaagtagctgagattacaggtgctcgccgccatgcccaactaatttttttgtatttttagtagagacggggtttcaccatgttggccaggctggttttaaactcctgacctcaagtgatctgcccgcctcggcctcccaaagtggtagggttacaggcgtgagtcaccacgcccagccagatttattttgctaagtgcttgtgagaatttgaaataatatatataagatacttggcatagtgcctgggtggtggtggtctgtaaaatggtagatgtgaggtttagaaagatgattctggattcagacacgactgcctgaagtcattgcttgggaaccagaataggcttttccttgatagcatgggggctgtgttcttctgtgagataggaaaaaaccaaagtgttttttctactctcacaaccagcacaacacttcacttctgacaccagaagtgtgggggtttttcctcacacaccaagcaattctccagcagacaccagctgggtgacctataattcacttcagctctgacactatttatctggagatagcatcagatcctgtgggttaggggctcagtccaagacttcaggtgccaattgcaagtctcaggttgtgacttgtggttctgactgacctgctataaattacagttcccgagaatccctccctgggttcgattaatttactagtgcagctcacagaactcaggaaaatgttttacttat

SEQ ID NO: 137374 - DNA, 2603 bp, Homo sapiens
ggctggtcttgaactcctgatctcaggtgatctgcctgcctcagcctcccaaagtgctgggattacaggtgtgagccaccgcgcccggccaccttttttcttttattttcttggttagtttccctccagcttccaaactcagcacagatgtcacctttgggaagccttctgagatagatatccctatcagtctcctacccccaagcttcattttgtccttttcctatgctgcttctgttactgcacataacactttgttgtctttgtccctttggctccctgtgctcctcagagggcaaggaatttgtcctcaaagcccagtgtgaaatgtggcagcaggggcatgggagagaaagttggtaactttttctgggtgaaggagtggaaatgggtaaggtgaactgggttggctggggtctgaagtggaagagtgtttcgacctttactagggtgctgtggaatctattgccatgaagaaccccaaagagaggacagctctatttgaagagattagtcgttctggggagctggcgcaggagtatgacaagcgaaagaaggaaatggtgaaggctgaagaggacacacagtttaattaccatcgcaagaaaaatattgcggctgaacgcaaggaagcaaagcaggagaaagaagaggtaggtggccaagctacctcttggctctgagggaccaggatggagccagtgccttatcgatgcacccctgccaccattcccctgtttgcacaggctgaccggtaccagcgcctgaaggatgaggtagtacgggctcaggtacagctgcagctctttaagctttaccataatgaagtggaaattgagaagctcaacaaggaactggcctcaaagaacaaggagatcgagaaggacaagaagcgtatggacaaggtggaggatgaactgaaggagaagaagaaggagctgggcaaaatgatgcgggagcagcagcagattgagaaggagatcaagtaagaggcagacctgggcctgcaacttgtgggaaaccaagaggccgtgctgtttattagggttcctctgagcccggagttcagtacctatactcatttctctgttattctcctaacttgcttttgtaagaaccaggcacatttcttgacttgcagtttagacaaatagaatatttaagcactcaggccctgggtagacaggtgctcagatgagggagaactcaaaaggggtggtggccttgccaagaaagaggaaccaatgtgaggccgagccaatggagtggctgagaaggccttcctagaagaggaaactgaagctagaagtttaaaggataggaatttgaggggccaactaagtaaatacaggatgttcttgggagttgttaatgagcttcctggccagggttgaggcagagttggtagctttgccttatggagtggctggaatgccaggctgaagtcatacctttcagggagtagtcagactgcccctttttttcaggatctgtggggcattacgcccatgttcttttaagtaattccctgaggttggctcaggggctcaagctctcctttgggtgaaaagcctgggaaccctcccttcttccatagttctcactggtttcccccacccctctggcaaaagggagaaggactcagaattgaaccagaagcggcctcagtacatcaaagccaaggagaacacctcccacaaaatcaagaagctggaagcagccaagaagtctctgcagaatgctcagaagcactacaagaagcgtaaaggtgacatggatgagctggagaaggagatgctgtcagtggagaaggctcggcaggagtttgaagaacggatggaagaagagagtcagagtcagggcagagatttgacgttggaggagaatcaggtaagctctggaaggggttggcagggaggagatccctgggctgacatctgctgacttggtcatccctgttctccttccctgtccctaacacaggtgaagaaataccaccggttgaaagaagaagccagcaagagagcagctaccctggcccaggagctggagaaattcaatcgagaccagaaagctgaccaggaccgtctggatctggaagaacggaagaaagtagagacagaggtgggctatagttataagattagggatgatggtccacagaaaaggatatatataggttgagcatcccaaatccaaaataatccaaaatctgaaacgtttccggtcctaagcattttggattagagttacccaacctgtaatgatagtctttttttttgtttttttgtttttttgagacagagtttcgctcttgcccaggctggagtgcagtgatgtgatctcagctcaccacaacctttgcctcccgggttcaagcaattctcctgcctcagcctcctgagtagctgggactacaggcgtgcgccaccatgtccaactaatttttgtatttttagtagagacagggtttcactacgttggccaggctggtctcgagctcctgaccttgtgatccacccacttcggcctcccaaagtgctgggattacaggcttgagccactgcgcctggccatgataatcttaatgataatgacaatga

SEQ ID NO: 137375 - DNA, 2279 bp, Homo sapiens
tccttccaattcccgaccctgtccttgtcctagccttgaaagctggccaggctaaagccacagccgagctcccaccttcctcttgccctgaggggcataatcctgctgtgacttctgtctcagcaagcgtgagctcaggtctcccccgcctccttgaacctcaagaactgctctgactccgcccagcaacaactcctccggggatctggtccgcaggagcaagtgtttgttgttgccatgcaacaagaaaggggggcggaggcaccacgccagtcgtcagctcgctcctcgtatacgcaacatcagtccccgcccctggtcccactcctgccggaaggcgaaaatcccgttaggcctggacgtattctcgcgacatttgccggtcgcccggcttgcactgcggcgtttcccgcgcgggctacctcagttctcgggcgtacggcgcggcctgtcctactgccgccggcgccgcggccgtcatggggttcctgaaactgattgagattgagaactttaagtcgtacaagggtcgacagattatcggaccatttcagaggttcaccgccatcattggacccaatggctctggtgagataaacctggccgcggccctgcgcacgtcccggcctggaccccttatccggtgccggagtagtacaacccagcccatgtaacctgaaacgtcgcggaccttacgggttccttgcccgtccagagggggttctgctcgaacccactctccccgcgcgggtgctctaactcgaaccccttccaggtgtcacttgccgcttcctgcgcggcccccgccccggcccagtggtacaggccgagctgccagttaccccgcctacttccccctcccgccaaaggagtcgcgtctggaaccagcttcccgccagctcagtcctccgccgcgcggctccccgccggaccggccggagccggcttcccagccttacttgaccccctccggagaatgtggggacgctggtagctctcccgtggccttcggtcccaaacggtgcacttctgtttcagcccagcgtcctctctcgcctcgcattggtacactccaactcctttctactcttctctggaggcggcacttttgaatttcagacccagcgctccagtctttagaatgcttgaggtgtcgatccccaccccccaccgctatgtcagaggtagttgcctcgaactcgcccttttcctaccaccgaaaccgtcaaaagccgaaattaactaatttaccaaatttgttgaatgcttattgtttatcaggagttattcagttgcaagttgtggaaacagcggagaatagaataaaccaactccatgctcacagggaacttatattccagaggggaaagaagataaggagaaaataagatggttttaggctgtcataagtgctatacaggaaatgagacaggtggatgtgataaagtgacttaggtggtgtctttagaaagggtggtcaggtaaagcctctattttgtgtcttcccaactctaaacgatacaccgtggattcctctcacctcagatgtccatttggaatcctgctgtattcttccaccccagagatgttctagctgaatgatatcctagcctaagaggctgcccttgctgaagtagcacatactgagtacctttcctggagactgagtgtctcaacagtggcactattgacatttccagcgagataatcctttgctgtgggatgtgctctgtgcattgtaggatgtttaacagcatctctggcatctacctgctagataacagtagcacccctgctccccaggcatgacaatcaaaactgtctctagacattgctagatgtcacagagggtgtgtgtgattcccccaaccccccaacttgtttgagaaccactggcctggagggctaatgcttggtgtccacccagtttcctcgggttttagtgtagtggcccctgttggaagagctaggatgtacctcttggcattcagtcccctcagcattagtagatttgtattcccagctgttctgaaaagggctatggcactcccccacttgcccccgttcttcaaggcccacctctacaagccattcctttagtccctttggtgagtgagtcttcctctgtggcataccgtagacacttggtacacgttaatgtttattaagtcctatattgatggtgcatgtttttgtatcttcattggcctgtgagtaccctaaagcagacattccttgaaacgttttactggtgttcagtccataatatatattacaaa

SEQ ID NO: 137376 - DNA, 1073 bp, Homo sapiens
gcaagccgggcgaccggcaaatgtcgcgagaatacgtccaggcctaacgggattttcgccttccggcaggagtgggaccaggggcggggactgatgttgcgtatacgaggagcgagctgacgactggcgtggtgcctccgcccccctttcttgttgcatggcaacaacaaacacttgctcctgcggaccagatccccggaggagttgttgctgggcggagtcagagcagttcttgaggttcaaggaggcgggggagacctgagctcacgcttgctgagacagaagtcacagcaggattatgcccctcagggcaagaggaaggtgggagctcggctgtggctttagcctggccagctttcaaggctaggacaaggacagggtcgggaattggaaggacccggggggagcggagagctggacgggaaggaggggccaacgggaggattcagtgttaggtgagctcagactttgctaatggtggggtgggattggtggcgggacgggttgcgaaggcggacgggttgtgaatgggactggggctactcccaggcaacagggatacaggctggggaaggctacggcctgagatactacccctatcccctgcctccctcctgttgtaccaagcagagttcagaaactgccgccgtaacccaagaacaaagttgcatgcagagccaacctaagagcttcaaaatcgggattccttactgagaaaggtattttgtgtgaacccccaggagtcagggtccctaagccagcgctctccacctccacctacctctgcctccatgcctctcccccatcccattcccacagctctataccacaatgccaccttacctctcttccctctctgctctctatcattaataaggcaggggccttagcaatccaagaagcttaaaatgtcagctgaatcttccccttcagtgaccttatactgtaatggcaggtgaaaccagtaggtaagttggtgccattctcagacttaaacatggaaaggatctggtggttgccataattattcctttaactatttattaaattatgtccgaaggctagaaagagtc

SEQ ID NO: 137377 - DNA, 1292 bp, Homo sapiens
caaaaggaaagtttggccgtgtggatgtagctgtcaactgtgcaggcatcgcggtggctagcaagacgtacaacttaaagaagggccagacccataccttggaagacttccagcgagttcttgatgtaaggccttggaagttctccagggatagtggtagtaagaagtatctggctgtggaggaccccaaagtttttaggggacaaaggcttcttctgcctcaggtcctatagcatgtctccatctgtcctacaggtgaatctcatgggcaccttcaatgtgatccgcctggtggctggtgagatgggccagaatgaaccagaccagggaggccaacgtggggtcatcatcaacactgccagtgtggctgccttcgagggtcaggtgtgtgggcaggggtaagacttatgcctcctaagtgacttgttggggccctcccacctatgacttctactctttctccaggttggacaagctgcatactctgcttccaaggggggaatagtgggcatgacactgcccattgctcgggatctggctcccataggtatccgggtgatgaccattgccccaggtagacatatcccctctctccatcatacctgggattgggtgggatccatggacagttgagaggggaaggtatccaccacctaagcagcagcagccttttatctttgggccccagagaagcaccaagaagtagggctaaagtaaggaagaaccaggtaatcatgaaagcaagggtgagtctctgaatttggctatattgtttaggtctgtttggcaccccactgctgaccagcctcccagagaaagtgtgcaacttcttggccagccaagtgcccttccctagccgactgggtgaccctgctgagtatgctcacctcgtacaggccatcatcgagaacccattcctcaatggagaggtcatccggctggatggggccattcgtatgcagccttgaagggagaaggcagagaaaacacacgctcctctgcccttcctttccctggggtactactctccagcttgggaggaagcccagtagccattttgtaactgcctaccagtcgccctctgtgcctaataaagtctctttttctcacagagtgtaggcagtgttgtgtgctagggggcctggcatggggaagaaatgtgaaggctgtgacagggttggatgctcagagctccagggtggggtgggaaaggcagtaccttcataatactttgtgtcctgttacaacatgtggacttgattttgagtgcagaactttattacctaggttag

SEQ ID NO: 137378 - DNA, 1394 bp, Homo sapiens
cagggccagcgtgactggagcaaggaggagttgcagggagcaaaagtctaaagagctcagcagaggtccgattaccagtgactctgaaaaccaccttcaagtttgcactttagcctatgggcgagtgaggccagggtgtttaaggaggagtgacagggtcagatttttggttttggtgcctgatggccagtttgggagccagataaagggggacatactgggctgagacaagattgggagtcatcaagaagcagggagttggtttcttcagggaggggaggggctggtgggcaccatgggaacacacagatttggttatctgtcatccctcaccacaaactgatctttcttctttccttagttttaatcagctggatctgcctgcctatgagagctttgagaagctccgccacatgctactgttggctatccaggagtgctctgaaggctttgggctggcctaataaggccctgcccaactccgtggggttttttttaccattgttggacctggggaggggggagttaaaaaaagaaccagaaagaaattgtcaaaaaccaataaatgaaatccaccaactcaccgtgtgtgtcccagctgccccatcttccccagcgcatacctgttcctcttctcattctctccccgccgcctgtttcctcaccttctctcccctttccatgccgtccatgatccccaccccatgtgttttaaaaaggcagtagcctttgcagggacctgtctgtcccaactgtttgaacagtgtgctcctcagattctgtgttcagaaggatttgctgcattgagacttgaaacctttggataggggaaaaaattatatatatatatatttttttgttctgtttgcatttcttaatttgtgcttggaatgtgttgatgtgcacagctaatgattcaatgcgagacaagattggcgtctgtgttgtggaggtttcaaataaagagcactcttcataactcacttttcacaatggagtttttttcaaacttaaaaaaaaaaacaaaaaactcttaagcacatgctaggcatctggagaaaagatggattctccaggaaaccatccctgccctacccgcttgcccacctgcctccaccactggtgcaacttcctccttcagagtcagtttctgcagtcaggagagatgagcagttcaccaggaattgggggtgggggcatctgttttttttttttagaatgggagctgcacttggggatggtgatggtgttagagattgcagcccaggacaaagcatcaccttgctcaaggggaacaaactgcagcaggttgtacaaaacattcagagagctcacttgacccaaccgagggttttacttggtgagcctttctagtagtcttgagtctggggctc

SEQ ID NO: 137379 - DNA, 4133 bp, Homo sapiens
gtagcattgatggccatcatacctaaatactcctgggcttctccaccccatctgcatttttcatcagcaaaacagagtcacatgatttttgaaccacacagtttctaaagttctgttccatccgttgggggtagtacaggaggcacaggtggccatagaacacacacagcagggttccaggggcttccacaacactcctggagtcatccctatgcctctccttctcctcgtgcatgtatacatgcttacctgcttgtggcagaaatcacatgtcacaatctttgtgggcccttactcagtggaggtaagaaaaatttagagttggtaatgagtgatctacctctcccaactactgggcatttcccaaacaggtgtggagcagagatcaaagtgtttggaggatagaaggagcatcattgtgggtcttcttcctaatcacacaaacaaatttgttctgccacccttaatcctatcttccttccttttctacctcccaagatatttccgccaagagctggagcgtttagatgaggggctccggaaagaagacatggctgtgcatgtccgtcgtgaccatgtgtttgaagactcctatcgtgagctgcatcgcaaatcccccgaagaaatgaagaatcgattgtaagggcccaggaacggagaaaagatggcgggtgggaggtggggcctcctgcacagtagcgatggcttgctctagcctcaaatttagggaggtgctgccctccctaataggaattccccataggaatctggttttagataatcttactgagttgtctcctatcttctgggcctgccctgctggctggccctttagctaagctacccaacaattcccagacagacaggaaagtctttggtgtttataaggatatacctgctggctttgcaatgagagctttaatattgctatactaggaatgaccatgtatgagtggcctccaccaaactggtaactgctcactggtgattctgaagccacctagaggagatcagcagtttgtaatactgagcgtaggagctgatgagatgaaagacctattggagttgtttaatgattcctccccatctcttgtggtgtgggctctccaactgtgtaatcacaagaagtcagggagtctccctagacagactgtatgccatgttcttccaccaccaaatacctttagagaatttggactctgggcttatccctctctaataccacttttctcccctccccacttcacctaagcaaggcctcatttatttctctgatacctttcctattggtgttttctggaatatctgttaaccttgactattttgggacatctcctctgtcagtggtgcttttgtttgctcccagatctccaccccatttctgggctgtcctggcactctctgtttacctcttcatctgacactgcactccccagacactgcttcacagtctctcactcacacaaatgactggatgtatcctgggttttctgcacagctcttttctgcttctgctttcttatgcaggtatatagtatttgaaggagaagaagggcaggatgctggtgggctcctgcgggagtggtatatgatcatctctcgagagatgtttaaccctatgtatgccttgttccgtacctcacctggtgatcgagtcacctacaccatcaatccatcttcccactgcaaccccaaccacctcagctacttcaagtttgtcggacgcattgtggccaaagctgtatatgacaaccgtcttctggagtgctactttactcgatccttttacaaacacatcttgggcaagtcagtcaggtgaggatgaggcatagtcctgggactgtcttcagtcctgggggtctggtctttttgtgtcccatccttgtgctccttcttcccccccactcgcaaaccatgaccctgtataattgtgtttttctagatatacagatatggagagtgaagattaccacttctaccaaggtctggtttatctgctggaaaatgatgtctccacactaggctatgacctcaccttcagcactgaggtaggtcaggaaatcctaatcacagcacatcccagccaatctggaagatccattccaggttcaccttagaactagcactgcgtgaccttctcatagttctaaggaagcatcttgacttcttaaagctgtagcaggtgtttgtgagtgacatcacaaacaggaaaaccagaatttgcaggccatttcctagtttcacctttattaaaaaaaaaaaaaaaaaaaaactccagtacataattcctcattcccaagggtaggtctttgtagaaaaatcgtacaaatgtaagtggggggaaaatgaaggcagttaaggttactcttctcctaaattcttttcctaagagattacattccgttacatatgttagccattcccttttcccttttaccactgatagttgccttactctcttctgccttttttgtaggtcttagagccaaagagtattttcctctttcctacccaaagcctttccctataaggggagttgcgagctatgagtagtagaaaaagtcactgttttgtatggacttgcctcatctctctgcctaggacatggcaaggggtttagggtgtgttcctaggtatctaatcccatcctagatgaagtctgatatgtatgattggtgttttggttgttctaggtccaagagtttggagtttgtgaagttcgtgacctcaaacccaatggggccaacatcttggtaacagaggagaataagaaggagtatgtacacctggtatgccagatgagaatgacaggtaggggaaatgttcctagacctctagttgctcaatatgagaagaggtcggacttgattcatttgataggcatgttttgttttcctctgctatgacagagccacaaatgccttgcacaaaagacaaaacacttgatcaaaaatacttaactttgggcacggtggctcacacctataatcccagcactttgggaggccaaggtgggcggatcagttgaggtgaggagtttgagaccagcctggccaacatggtgaaaccccgtctctactaaaataaaaaattagccaagtgtggcagcgtgcgcctgtagtcccagctactcgggagactgagacagaagaattgcttgaacccgggaggtggagtttgcagtgagctgagatcgcaccactcttctccagcctgggcaacagagtgagactccatctcaaaaaaaaaaaacaaacccagcttaacttcactggacacagtggctcacatttgtaatcctagcactttgggaggctgaggcaggaggatagcttgagcccagggggttgagactagcctgggcagaattaaccagttgtggtggtgcatgcctgtagtcccagctaacagtggtagatgggagccagatgggggatctctgacctctacggttgtgtgagtttagaagtcatttggctttttggttatctcaccaggagccatccgcaagcagttggcggctttcttagaaggcttctatgagatcattccaaagcgcctcatttccatcttcactgagcaggagttagagctgcttatatcaggactgcccaccattgacatcgatgatctgaaatccaacactgaataccacaagtaccagtccaactctattcaggtgagctgctgctggcatccctcctcatatggtcctcttaccctaggcaacgctagtttgtgtgataccaaataaaccagtagtactcttagaggaagttgcatgtagaagacagtctacctatatctaactctttgttctcctgaagcatagcagacttctcttggccgtcttatgaatgaaaggagctaaagctcatcccacagaagggacttgcctcagataccaagtccagtcctgtttcctagattccatcccccccaccctgcttctaggagctttctacctaacactggcttcatgggtcccttcctacagatccagtggttctggagagcattgcgttctttcgatcaagctgaccgtgccaagttcctccagtttgtcacgggtacttccaaggtacccctgcaaggctttgctgccctcgaaggcatgaatggcattcagaagt

SEQ ID NO: 137380 - DNA, 2298 bp, Homo sapiens
tcttctttctttcttttttgttttttgacacagagtctagctctgtctcccagggtggagtgcagtggtgcaatctcggctcactgcaacctccgcctcctggattcaagtgattctcctgcctcagcctcccaagtagctgggattacaggcgcctgccaccatgcctggctaatttttttttttgtatttttagtagagacagggtttcgccacattggccaggctgatttcaaactcctgacctcaagtgatccacctgcctcggcctcccaaagtgctgggattacaggcatgagccacggccgaccagccttagtctcccgtgttttaaatcttggctcccccatttactgcttctgggacctgaggcaaacctctttgttaggtttccttgtttaaaataggaatgttcagttgttaggattaaatgagttaaaacatgtatagtggttagagaagcacacgatgaatgctattgttagcagcatttctcaaagtcagtcatacatagaatacattttggcaccctcataacacattcccatggaatagtattcttgtaggacaaccattgttatcctacctttcatcaggatttggggagatagatattattttcgtgttctgtattcaccttcttttacctaaggtcatatgatttgcaagtaccggagccaggattcaaacctaaggctgtcagaaccttgaagaatagtcaggatttgggtaaaggatgaacagcaaaggtcaggaagaaacctaagcagggccaggtgtatggggatcaggggttgatgagaaaacagtcacttactccccacccagaagatggggttgtgtcttgctgcttagctactgagcagaggttagaataagcccccagtgagtatcaggaaaagtaccagccatgggattccatctgtcataccatggcttctcagggttttaaactgccccaggacaagatgactaatttagaaggcattagaaggccgggcgtggtggctcacgcctctaatcccagcactttgggaggccaaggcaggtggatcacgaggtcaggagttcaagaccagcctgaccaacatggtgaaaccaagtctctactaaaaatacaaaaatcagccgggcatggtggcttgtgcctgtaattccagctactcaggaggctgaggctggagaatcgcttgaacccaggaggcggaggttgcagtgagccaaggtcgcaccactgcactgcagcctgggcgacagaacgagactgtctcagggaaaaaaaaaaaaaggcattagacttaaggttagaaagatttagtttgatgtcctggtgctgtcttcctcagaaaccaaaatgaggaaaagacagcctactttccaaggccagctgtcagaattcaatgacaaaagtgtcctaaaacatcctgtgtaaactggaaggcaaccatccaaagctccactgttgttacattaccctgaaataatccacagattctcttgaaactagtgaggcagtgactagactagcactatctggatctgcagtagcacctgtggcttttgagcaccttaaatgtggctagcgcaactgaggaaccagattcattattttatttattctgtttaatgtaaatgccatccaatgcaggtcctagaccttgtttcagatgttgctcggtgagtaccactcagtggccagtggtcccctctacttgttctgtatattagttggtgcgtgtggtctagaaagatctaagcagaagggaaattttgaagactttctgactctcttctgtgtgccctccagcctccgatggaaccccacagggggagaaggaaaaggaagaaagaccacctgagttacccctgctcagcgagcagctgagtttggacgagctgtgggacatgcttggggagtgtctaaaggaactagaggaatcccatgaccagcatgcggtgctaggtgagttgtgtcctaaaggcccaggtcccaacccagtggtctgctctggggcccttcctgccagcttgtttttcttccttccaggttactcctctccctcagtgtctctgtaatgagaattcaaaagagaagtgttttttctctgacttcagtataaaaaagattgaccttctcttttaatagttggtgtctttcactttatagacaaggggaatctttataactggttagctatcccatttttctttggcttcaaggaagttcctctgtgacttgattctaccatatttccctgcaagttctcattgtttcttttttttttttttttttttttt

SEQ ID NO: 137381 - DNA, 3076 bp, Homo sapiens
cttggctgccaccatctattccacacctatgggccaggcactgtctaggcactctaccatataattatctcttaattgtcacagcaacgttatgaggttaggcagtaatattcccatcccagtattaatattggttagcaaattgggtaaggggtcaagaaatttgcctgaaaccaccacagaacctcagtaattttgagagatatatgggatttcaaccatggtctgtttagctccagaggagatactgtttctcttctacatgaaactcatttcatgcagattcagcagatccctgtggccataggtaaattggtagtcccaggtgacggttcgtggacacgcataataagctgaacagagcacgattccagctcactctaggttctctgcagctgagcaatgaagagtggcctaagcaggtgtcttagagagatttggcttttagccactttaccaggggagtctctgaacacttgctgactcctctgcctgctcaggtaccctgctggccgagctgcgggaatacaacctcgagcagcagcggcgagcccaatgtgaaaccctctctcctgatggcctgcctgaggagcagccacagaccaccaagctgaagggcaaaatgcagagcaggtgggtggtagccaccctttggctgggggcttgaatctgggatattctggaagatggctcttgctggtttcctggtcttttttatttctctgggtgattttcgtatctttcctatacacacttgacccatttttttctacttcctacttggaagatttccttctgagtttccttacccctctggttgacaccaggaagccttgcttgctttgggtgtttatactttgatgctgtcaatatacgcaagccacctctacactatccaggtttgacatggctgagaatgtggtaattgtggcatctcagaagcgacctttgggtggccgggagctccagctgccttctatgtccatgttgacatccaagacatctacccagaagttcttcttgagggtactacaggtcatcatccagctccgggacgacacgcgccgggctaacaagaaagccaagcagacaggcaggctaggtatggaactagagtgtccagttgaggggaagggttggtggcggtaaagccagattccttggaggtgcaggacttaacggcctgtctccttcctgtttgacctttccaaaaggaaaatgattatccttttttcagaatgttgatggctgcattctacatctcattcaagctatctgcgtaggaaattcattagggggagtgggaattaagggggagtggaaatctggcagggaagttgggggccagccttttgctgaacaagacttaactcactaggtgcatctcctttctgcttccttggtcatttctaactaagccgtggcttgacaaatcattttccctacctctttcctcctgtcccacagaaccctctcgcacaaaaccatccgtctgtctagcatcatgccccctgcccttatctgtaatggtaaatcttagcgcctgatgatgagcactctgaagcttcctgagctaaagctcaaaagacctcagcaagatgccctgtggcagcccaggagataggagagagaatattgggctttccctcttcctatattttatatcttgccttcctctttctctttctcccaggttcctccggtttaggctcagctagcagcatccaggcagctgttcggcagctggaggctgaggctgatgccattatacaaatggtacgtgagggtcaaagggcgcggagacagcaacaagcagcaacggttagcatgatgcctgtggcccctcattcatttgtctctccactcatccccccaccatgtcatcagtggggtttcattgcctttaccttgtatgcttttgcattaagtttgctatatgaatgcttctggacaaaagggttactttctgttggtgttttcctatttgttgattggtttgttggtttgatttgatttaaagcttggccatcataccccactcccagctatccagtcaacagtggcgcttttgcaaactgcctgatgctaagtgttgtctgggttctgaggggttatggggtgaagttttttttcagtcccatggaacaatgcaggtacatcagaaacatctcaggaatcctaccattgaaagtcccccaagcttggtacatatcccacacagccacttctgtctgtggctgctccctccaccctgccctctgcctttattctccataatcccttggcacctaggcactcaggcacttttaggaggaaaccttcaggtacttaagtagccagctcagtgttggggtcccggcattgagtggctgcagtaaaagcctggcatcacatgtgtatgctgtggcactccctcattgttttcctgtccttgcaacatgtaagttacctttccaagatccaagaaaggtatcctaagacccgatatttctttgcgtataattactattatacagtatggttttattgagtaggcagggaaaagccttgaacttaggggcagtgactccaggaaggtagaaagggaaaataaagctgttattctggagtattttttctgccgagtctctttcccattacacgaaaagatgtcggctttttaaataatcccgctcatgagaggttgctctaattctcctattatttccccttttgtgagcaaacagaaacaaagagcagacctaccttccacccatctgaattttttatacacacacacacacacacacacacacacacacacacacacacacacaacagaagaagacttgaagtctatatacaggaggctagttctgactggtcacaggtctggattgtagactgtaggaaatgtaagcatccaaggagctgttgggaaaagcttacaaaacacagtggagaaaagcagaagagttgggaaaggcatccttttgtcctggatagctacagttttccccacccaaatatgggaagcttctttgcaagctcaatgtatgagaagtggaagggccaacctctagcctgtctctaagga

SEQ ID NO: 137382 - DNA, 7700 bp, Homo sapiens
gttttgccatgttggccaggcttatctggaactcctgacctcaggtgatccacccgcctcggcctcccaaagtgcttggattacaggcatgagccactgcgccctaccgaaaccttgtttatttagagaactacagggatatgcacgtgcaagtggtgcctgcagtgaatcaaagtgaaaaaatcccttacccgggctgggcgcggtggctcacacctgtaatccaagcactttgggaggccgaggcaggtggatcatgaggtcaggaattcaagatcagcctggccaagatggtgaaaccccatctctactaaaaatacaaaaaactggccgggcgtggtagcaggtgcctgtaatcccagctcctcaggaggctgaggcagagaattgcttgaacccaggaggcggagattgcagtgagccgagattgtgccactgtactccagcctgggcaacagagtgagactccatccccctgccaaaaaaaaatcccttacctggtttgcctagggaagatgtttcacaggcatgcctggaacacagtaaatgttcaagaattgatagaaagggcttcagctgaaccttagaaatctcaaagtgagattgagagggggacagcaagggagaagtgagaagtctgagctgagatgcccctaaggaagcagccctatcaaagaccttatctgtcattttgccccggttccagatagaaacctaacctctccctgcaacttcttcctagcctcactttccccagagagagctgaggattctgatgcactgacggctgtcagcagtcagctagaaggctctcctatggatacaagcagcctggcttcctgtaccttagaggaggctgtgggtgacacttcagcagctggcagttctgagcagcccagagcaggcagctccactcctggggatgccccaccagctgtggcggaagtgcaaggcaggagtgatgggtcaggggaatctgcccagccacctgaggacaggtaagcatgtgtgggcaaaagaagggtaggatatattggagggtctttcaaagcacatttcatactcgtcaactaatggacatgcttgttatgctggggagataaagctggtttctgtgagaaaggggtattgtagcagtgttttataaacgagaagacataatacagacagcaacctgagcatgatttccctcagctccccacctgcatcctctgagagctcttccaccagagattctgccgtggccatttctggagcagattcccgaggaatcctagaagagccgttgccttcaacaagcagtgaagaagaagatccccttgcgggtgagttccgtgtatgcccaggtcatcctgggattgttttggcttctagtagcccttggcatggaaatgcccaccagccaaacagttccatttagatggagggcatgtatgtgggaggactgacaataagcgggggtgctggtatggcataatgaaacgggtccagccttaggagtcaaactgatcttggctcactcaaattcccccactctgccacttctaccttttacaacctagggtcattatttaatttctgtgatcatgaatgataccgagggggtgatgatatctgcgtggtaggttatttatgaagggtaagtaacagtgcatgcagtctagcaaataacaaaagctgttctgagcccagggaaggtggggtgggccttctctgtgtcccatgtcttgcaagcagtgaagacatatacactggtttccctcaaggagtgacatgggtttattttctccaagtacatattaggcaccaatagaggtgtgagaggctgggcgcggtggctcgtgcctgtaatcctgaaaatttgggaagcagaggtcagaggatcacctgaagccaagagtttaagaccagcctgggcaacatagggagaccccatctctacaaaaatatatatgtaaattagccaggcattttggtgcatgcctgtaatcccagctactcaagatgctgaggcaggaagactcgagcccaggagctcaacactgcagtgaggcaagggttgcaccactacactccagcctgggcaacagaccaagaccccgtctcaagcaattaataaggcgtgaatccctttacatgttatatctcccttcaggtatcagtctccctgaaggtgtggacccctcttttctggctgccctgcctgatgacatccgtcgggaagttctacagaaccagctaggcattcgtccaccaacccggactgccccctccacaaatagctcagcgcctgcagtggtggggaatcctggtgtgactgaagtgagccctgagtttctggctgccctgcctccagccattcaggaggaagtatgtgagcgggaaggtggtggggccaggctgcctggcaggagaaatgccctcattgactttttctgctccataggtactggcacagcagagagctgagcagcagcgacgagaactagcacagaatgccagctcagacacccctatggaccctgtgaccttcatccagactctgccctcagacctgcgccgtagtgtcctagaggatatggaggacagtgtgttagctgtgatgccacctgacattgcagctgaggctcaagccctgagacgagagcaagaagcccggcagcgacagctcatgcatgagcgtctgtttgggcacagtagcacctccgcactctctgctattctccgaagcccgggtacagagggaggcaagtgggagggctctggaaagctttagccagatgaggctatgttttcttacctttgtattacctatatccagtttacaccctctccacaatctcagttttctttttctttccttccagctttcaccagtcgcttaagtggcaaccgtggggtccagtatactcgccttgctgtgcagagaggtggcaccttccagatggggggtagcagcagccataacaggtacctttgtctatttttaccttaccatatcaccactcaagtctattagcccagctcccttagttttataggtggagaagctgaaatcctgacaggcaggatggatggtctctctaagccatttccttgaataagtgagagagccagatctttggactccccattcagaaaactacaccttttggttagtcttgctaccaaagaccacaatcgcaaaagcaggccggcagcaggtgctaactatggttttaacaagaaggaacaccacttgtctcccatgcaagtagtaaaacaactaaccacctgccttgagtttgtaacacctaggctaaggaagtatagaggagtgagttagccaggctaaaacagagtgggcctgacatgccaaaatgtgaaaggagtgattggttcctacaaggccacaaactcctggtagtctagagaaggcagaaactagcattgtctcctagacttaggtatggtcagattttaccagtcgatggatgatacctgggctggaatctctgctgtcttctcagtcgccgtgtgatgtagggcaagtcacttaacctgtttgagcctcttgtttatcatctcaaaaatgggtggttctcggccagttgtcgtggctcacacctataatcccagcactttgggaggctgaggcaggtggatcacttgagtccaggagttcaagaccagcctaggcaacatggcaaacccaatctctactaaaaatacaaaaagtagtcgggtgtggtggcgcgcactagtaatcccagctactcgggaggctgaggcacgagaatcacttgaatcctagggggtggaggttgcagtgagccggtatcacgccactgcactccagcctgggtgacagagcgagactccatctcaacaaaaagctggtgggggtggggggcttcattctctaagctgtacagcagccctgaaaggatgatgtacagtcattgtaaagtgcctggtacatagtagacacctaagagggcagctgttactatgaagagcccttggactggacacccacctttctcaagcctccttggagatacctagctcattcccctcccccattcttatgcctaatcccagagctctagccactgaagtgttacccaaaaaccatgttctgtttccaggccttctggcagtaatgtagatactctcctccgcctccgaggacggctccttctggaccacgaagccctttcttgtctcttggtcctactttttgtggatgagccaaagctcaatactagccgtctacaccgagtactgagaaatctctgctaccatgcccagacccgccactgggtcatccgcagtctgctctccatcttgcagcgcagcagtgagagtgagctatgcattgaaacacccaaactcactacaagtgaggaaaagggcaaaaagtcgagcaagagctgtgggtcaagtagccatgagaaccgtcccctggacctgctacacaagatggagtcaaagagctccaaccagctttcctggctctcagtatccatggatgcagccctaggctgcaggactaatatatttcagatccagcgttcaggggggcgtaaacataccgagaagcatgcaagcggtggctccaccgtccacatccatccccaagctgctcctgttgtctgcagacacgttttggatacactcattcaattggccaaggtgagggtttcaaacccaactcctggggatggaagaagggtggcagcaagagcctgggtgaaagttgaacactaagcaggctagcgtgtctttttgctcttattttaagtgttgagccctgtattgtttctaggggattgtcctatatatttctggggttttttcttcattcttttccatttttatgtatgtcttatttagtcatcaaaacaactgggctgtatgattcctgttttacagatgaagaacctgagattcagaacattttattcattttgtcttatgattagaaagtgatggagctggacctagaatttagtgttctttcaataataagcattgctgccatctatcaaaggcctgccttgtgccaggcactgtgcaaaatacatcatgtcgtttaatctccaacaactttgcaaggaagtgtagttatctccattttataagtgcgagactaaagctcaggaaaagtttgctcgtgagtctgtattgctacaaagccctcattcatttctctaggctgctttactgtctgttggataaaactcttatatgacatatcccccaatatttaccaaaattgtctgaaggagtctgggaaccagttgtcttttccctatcaggaaggctcatcctctgtgaagacgtcctagaccaagccttgtcctccttttcccggcaggtatttcccagccacttcacacagcagcggaccaaagaaacaaactgtgagagtgatcgggaaaggggcaataaggcctgtagcccatgctcctcacagtcctccagcagtggcatttgcacagacttctgggacttattggtaaaactggacaacatgaatgtcagccggaaaggcaagaactccgtgaagtcagtgccagtgagcgctggcggtgagggggaaacctctccatacagcctcgaggcctctccactggggcagctcatgaacatgttgtcacacccagtcatccgccggagctctctcttaactgagaaactcctcagactcctttctctcatctcaattgctctcccagaaaacaaggtgtcagaagcacaggctaattctggcagcggtgcttcctccaccaccactgccacctcaaccacatctaccaccaccaccactgccgcctccaccacgcccacaccccctactgcacccacccctgtcacttctgctccagccctggttgctgccacggctatttccaccattgtcgtagctgcttcgaccacagtgactacccccacgactgctaccactactgtttcaagtaagtgtggatgtagactgggagctgtggggtatatactgtggcacccacttcacccccttttccatccagatagttctccctcagtgatagcaatcagcttggtttgtgtttgtgagaacagaatgtgttcattctcaccctcatctgtcccagttctctcactctgtctcccttcctccatccccgtctctctgtgtctctctctttctctctctcccctgcctctcacacacacactcttttgaaggtcagcaggcattcactgaatgtagcttccctaggctaggcaccagaaggaggaaagaaagttaagttccatcctcagggaattcccagcctttccagttgtgttgagggagccagttctcatgggaaatagttcaagggcgggcaggatacagtgtgattcagagtaaccagatcatcccaggaaataaaggtaatgagccctgccacagattagtaagaaagaattatctgaagaagtaggttttaaagaatagagtgggccatgatggtgggggaatagttggaagaaatgcctggggtttctttttcagcttagaagttacagtcataagagtcctctttgagtttatggtgagacgtgattgtgccactgcattctagcttgggcaacagagcgagaccgtgtctgtaataaaaaataaaaagcctttatcatcccaagtcatttagatttgcctttggtgggtgggttttctttttcagtactttcccattttgaagccctgggcaattcagcgattccttgattttgtcacttagtccctggcttgtgagtttcagagaggcttacagtgttctgtctgtttcctcaaagtttctcccactactaagggcagcaaatctccagcgaaggtgagtgatgggggcagcagcagtacagactttaagatggtgtcctctggcctcactgaaaaccagctacagctctctgtagaggtgagtccaagctcttctgatctgctaagacttggggagaaaggataaacagggtagataatgattttgttctcaggctggggcttactccttctgtcttctttttctcaggtgttgacatcccactcttgttctgaggaaggcttagaggatgcagccaacgtactactgcagctctcccggggggactctgggacccgggacactgttctcaagctgctactgaatggagcccgccatctgggttataccctttgtaaacaaataggtaatagcagaagtaaagcattttctctttctgaaggtttccacttaggtgcttcctctttctggaatcctttcctgaatccccaagctgaatcagatacctccatatccctataacacagcctccatgctccctctgtcgtaacacagattaccctgggttatcatctgttttcctctgctcagttgtttgaaagcaaggctgggtttgtctcctcatccccgctgcccggcacacagtggtgcttaatgaagagaaaagagaacacatgggaacagcagcgcctcctttcttctccatgctgggcactcgtaagagccccataagacagctgaggcagcttcaccccttcaaagtatgtccctacactgcattcagcctcaggaattacagagtcagaatagtactctctgcttttgtgtaattttgagggtataaaaattctaagaacagttacaaattacctcgtttctatcatcttcctccctgttttactgaga

SEQ ID NO: 137383 - DNA, 1052 bp, Homo sapiens
ccgggaggtgaaggctgcagtgagccatgattgtgccactacactccagcctgggcaacagtgagaccctgtctccaaaaaaaacaaatagagttttgaacgaaattctgaccatttcttgctccaaatagatgaagtgggaggatcaataggattttggtagttagattttctgtgtacctataggtcagagacatttagcctcaccctatatggcctgaaatcttcccccttccacctgcagggcacagaaaggattttattcttagaatccacagagtcagagctccagttcttgcattcttgggacagagatagcactgtgccttaaccttcatccttagtataccagaccagagatgttccttggagtatttttgttgtggggatgatcactggctgggtgggatacttatcaggccacatttgctgattggggtggctcccctcatcattggctggttgccccttaaccactattattgttctttccgagaaagatgggacgcctatgcctgacagctacccaacaaccccatcttcaactgatgcagctacatctgagtccaaggagacccttggcactctgcaatcctcacaacagcaaccaacactcccaaccccaccagctttgggagaggttcctcaggagctgcagtctccagctggagaagggggcagctctacacagctattgatgcctgtagagccagaggaattgggtcccacaaggccaagtggggaagcagaaacaactcagatggagttatccccagctcccactataagtgagtagaatttcaacatttggggaggatgaaacaagagggaagaaaggatgtctttgtagcttctctttgctcttttgcttgagagaaatagtaggagttcaacttctcaaataataagatctcgtcttgcgcattcactttcttaagtgaagttgaggtcctgaactggtgatagttgaatgtctaatgatattggtgatgataccaacagttcattgaggcaattactctgtttctgggctatcaccccaggcttattat

SEQ ID NO: 137384 - DNA, 2480 bp, Homo sapiens
gaattatacattacagtgtatcacttgatataaaagggggaaaaactgatagaaatacaaagaaataagacttgagagtgaaagactttagtataccctactcagcagttaaggaatcaggtagattaaaaataagggtagtgaagtgttcagttaaaataacaaggttgatctaacaaatatctttatatagaactttttacctaatacacacattgtttcaaacttgatataggatgaaaaataagtgaacctagcctgtgactgaaaagactagagtggacaaaataaaaaataagccccatgaagggaaaaaatacatagatgaaaccaagaaattcttgctagaatgatcatgatcgtgcccatccctaaggggtttttattatcctttccttccatatttatttccccctcagccccaaacaattcttgaacctgagtatgtatagagaaattggtcatatatttgcacagtgaaatgatcaccttcctttggtcacatggccaaagcattctccattagatcactgaactcctagatggtctgggtggaggatggtgactattacagttgacctctatcttaggtgcttgcaaagtcccacattggtctatcccttctttttgcagtgtactgcatctaagtcaaatgactccactgaacagaatctctcaggtaactctccttccctttctcccttcttactaatcaattggttgcttctttatcctgatagttccgagtagctggcccacataggctgaagatggacactggtgctctgtgggatgaggtagtagattgtatagttttagggtcataccccatcttggagataactatacagtctactgtctttcccacggtggtacacttcttctccgactggctctgttcaggttcttgttctggttattatctactttgttctggcatgggtaatgaggtcatgtgtcttgttcatttcctgactgcaactctgtcctctgaaacagcatgttcatgtacatctttgaagtggctggtcctttgatgaccaccatggtgtggcacttcatgagaataactgatgacagtggttctcaaatgccagtcctctgtggaaacgaacaaaatcaaggagctttaatgcctttttcataaagctgaatttattccatttaaaaggctgtttttgtatttagagatcatattcctaattctgtggtaccaaaatatttttattaaatgatgttgattggatgttttttcttacatggctaaactaaaagttggcaacccctacattagtctctactttttgttctttttttaattaaattttattggtccatggaatctaaaagtctaggaacattgtcttggatagtgtgctgttcatgaaggtagctctctgggcttagtggtatgactgccgtatgtttcctattccctctgatcttcttaacaatggtcagtagccattttgtgattctatcagttggttcatgtgatatcatatgtctcccccacccatatttcctcagaacattcttctgcctccctacacctgtctcctttcgcacttgagttggaaaatgattgtaccaaagcctgcacaatattttttaaagcagtgaagtagggtagatgccttggtacccttaatctagcaaaagatctttaaaagagtctgtcaccatgtaaaatggccttttgcctgctgcccttattagaggattctgctcatgccagggtgaggtagtaagttgtattgttgtggggtagggatattaggccccaattagaagataactatacaacttactactttccctggtgtgtggcatattcacacttagtcttagcagtgttgcctccatcagacaaagttgtagatgttccttggataatttggactggaagaaaagagacatggaaggggacagatggtgtttagggtgaggcagatgtcattataaagtgacttgtctttcattaattggagcatataattattttacctttgggcatgaactcattttgctattcttcaactgtgtaatgattgcattttattagtaatagaacaggaatgtgtgcaagggaatggaaagcatactttaagaattttgggccaggcgcagtggttcatgcctgtaatcccagcatttttgggaggccgaggcgggtggatcacctgaggtcaggagttcgagaccaacctggccaacacggcgaaaccccgcctctactcaaaatacaaaaattagccaggcttggtgacactcgcctgtggtcccagctactcaggaggctgaggcaggagaattgcttgaacccaggaagtggaggcttcagtgagctgagaacacgccactgcactccagcctgggcaacagagcaagactctgtctcaggaaaaaaaaaaaaaaaaaaaagattttgaagggctggacgcagtggctcacgcctgtaatcccagcactttgggagg

SEQ ID NO: 137385 - DNA, 1391 bp, Homo sapiens
ccctacaaagccggggtcgggcccgcctcctggtaggcaacgatgacgtccacatcatcgcccgttctgatgatgagctgctggatgactttttccatgatcagagcacagctaccagccaagcaggcaagtttgtgtggtgaaagggagggtagaatttgtcagattctactttttccctgctgaggaaaagcaagacagtgtctgccctatagaaaacccccattttataggagccagaaccactcagtgacttagccatgggcaacaaaaactttattgtctctaggtacttgttatgttctaaacattgtgatagaccttgggtccttttagggaaatactgcaatttttggatcggtggatcagttaatgcttgacaaggccaagaatctcattcccctttgctgtccctacaggaaccctgtccagcatccccacagccctgacccgctggacagaagaatgcaaagttctcgatgctgagagcatgcatgactgtgtttcaggtgcgtggcagcttggttatcagggcaatagtgagccttccagagctagggcaaacgtgtggagagttgtttccctggttctctgtggctacaagctctgcctcttggcttcctccctgaccccaccagagcagcctttgatttttgcctctttgaaacagtggttaaagtgtccattgtcaatcacctggaattcctgagggatgaggagctggaagaaaggcgagagaagcgcaggaaacaactggctgaggaagaaacaaagataactgataaaggcaaagaagataaggagaacagggatcagagtgcacaggtgattcccaagggctgggaggattcatctttgactgtgtctgccgtaatgtggttttggcatacacatggcaccaggaatcactgaagaatcctagaacgttcacgttgaacctgggaaattttttatttcaaattcaccatacattgacctggtttttaggggaaagaattcaaacctagaggggagatttctcaagtgtcaagggaaaaactggagccagaagcagaatggcttctcactcaacagtcacactgcatagtctctaccgccaaggacagcatcaagacaaggagaaaaaccttatctaagtccatgctcttagtcgcccacttccatttctgtcggtgaactgccagtgtggggaatcttaccgagatgaccccattccgtcatttgagtaagatcagcctaggtgtcagatcagagaaaatgtttgtactctgaaccccatcaccacatgtcattttttctagggctcacatgtataaaatcactaatacaattttggtttagaaggaagttacctacttttttctgaaacttctgggacctcagacagagat

SEQ ID NO: 137386 - DNA, 5404 bp, Homo sapiens
cagcccagtagcctttttggcagcaagagtgcttctagcaagaacaagtctgagcaggatgcccaaggagcctctcaagattccagtagcaaccagcaggacccaggtagggaatcagagccaatggactggagaggtgggagtagttgctttatgggcctgggatcacaactgttctggcttggtggtgtttccctgggaacttgctggccttccagagatctgtcatagtggcgtgggaatctgccccacaaagaattccttcaaaatgcagccttgtttggctatcctcacacgtagccttgtcttttcctttgtcacccattcgtttattctctgagaacttacaaacttgcccaaggaagggaccttattgtctttgcgcttgcctcatggtgcccagcacataggcactctttgattattttgctggttggttgattgtttcaggcgagcctggggaagcagaagtgcaggaggaggatcatgatgtcactcagacagaggtggcagatggggatatcatggatggggaggctgaaaccgactcagtggtgattgctgggcagcctgaggtgctcagttcacaagagatgcaggtagggaggcagatcacccagcatttccctgttgcggcgctgaaccaaacccttgccaggtggtgtgggtgggtgagtactttagatccttgcctcaatgctggctgctttgcagaggagcatgggtgatatgcttagtagatgctcagtaaatgtgtttgtactgtattaaaagaggggtgggggcagggccaggatgccatgtactatgaaatgatatagatcccaaccagaaaacttaggcacaggtgaaatgttgaagtagaaagctgacctgagaccgttgggccccgggtctttgatttactttggctctggtcattattggaagctccttaacaccaccttatgcctatagcaccagctcttgctggggcattaaaacagcagtcttctaaagaccctaaaggaaagcattgtaatttctggagctggtagcattgggtaagaaattgggcctgtggtcctaagctgctggctttaaagagatctattatgtcttcctggacagtataaagacaacccagtatcagataactgggatggacccatttgaaggatagtctggttgtggattggtagcacgtggtagtttctgtgctaattagcaccgaatgtgtggtttcacgtaacatcctctgtcacatgttatcctagaaatgtatgctgctttgctggccttttttagggtttcggtgctagcacaatgatagacttgtgtgcatccatatatatgttctatttctctccaggttgagaatgagctggaggacctgatagatgagttgcttgagagggatggcggatctgggaacagtacaattataggtgagagccccagaactgagtatagcctcttcctttgcctcagtctctcttgggaggaccctttttctcatcatctgcttgctcagctctgcctaagggctcatagccagcctagatcgctgcttgtcttgatgttgacggtcttacagatgagaaattcacaagacgtctacaggcctgtggcagtctaaagtgttgcctgtgtgggggaggtggtgggagtggccattgatacagatgatacatcaagcacatcaaaagagtgtttattcatggaggcctagaggaggctgtagggtgagaaagcgctgcctttcagttcttcaatgaagtccaggggctttctgcccctgagtctcagtagtgtaaaaagaatgatcattccctgagggtggccctttataaatctcagagggaaaatggcaaaggtaccctactgtcacctggctctgagggtgtatgtgttacttgtttttactttgttgatcaaggaaatcaaaggataaatggaagtagacacgtattcttaagttttacaaagcttttttatacccagtatcctctgtggtttcacaattagtgggattggcagggcagatgtgatcatcctgttttacagatgaggaaactgagactcagacaggtaaagtgactggccaagctcacctagctagctgacagcagacaatccaggtcttctccctcatccaaaaaaaagtggatatctgctaggtgtacatagctactttagacgcacccagtctggaaagggaagtcctctgttgttcagtgaaggctctgctctgtaaccttcagtgagcagaagtggagaggatgaatcacaagaggacgtgctgatggatgaagctccttccaacctcagccaagcttccaccttgcaggccaaccgagaaggtgagagtgccgaggccagaaaggcctcccttcttgccctgcacgtctgacagacactacactagggttttcctggaggcagctgcccacatgtgcagaataaggaagcatctgtctgcatgcgctgacatacaccatccactttatcctcagccagtttttcaaataacatgttactactgcttgcccaaagtttgtcacttcttacttggttcgctttcttctcacccacctgctatcatcgctccaggttccctcttgccaacaggatatagtcaatagcaaagtagggctgaaaaggcaagggggcaccagcagacttggccaagtcctagaccatggctcctcaagcaccaccctctagccagcctccacattcagccaccctgctcagtgtgttgatgcattgattggcactctcaggaaatcgggtctggctcactaagtctgtacatcaccccagatctggttcttcctctcatagagtcagatatcccatcaccttcccactcagcctgctggcctgcacagtagcctgttttctagctactcagtttagtcctccaatgtgctccctttgttttagattccatgaatatcctggaccctgaggatgaggaggagcacactcaggaagaggacagcagtggcagtaacgaggatgaggatgatagtcaggatgaagaggaggaggaggaggaagatgaggaagatgatcaggtgaggggggactgcgtttgggttggttcagatgacctcttccatgggaacatagagctgcagaaaaccaacagtctgggttgctagcctcagcgtctccctccctcatgtgcacatgtggccatggcaccaggcttcagaaaacccttacctccagcaattctccatctcctattttcccttaaggaggatgatgaaggtgaagagggagatgaagacgatgacgacgatggctctgagatggaattggatgaggattatcctgatatgaacgcttctcccttggtccgatttgagcgctttgaccgggaggatgatctcatcattgagtttgacaacatgttctccagtgctagtaagatacaggggctcagctgggtttttctctcttgattcttatacccttctctagggtaagccaagcagtggaccaaaccgatccgatacagacagcacttcttttcctatgctgacttcctggggcaagggatatctgaatccatctgtctcattagtgtatacttaggagaaggaatagtgagaggctgcttttgttcccttcacctcagtaaataggcagccattttagagcctggacaacttgatgatttgcttgattaaaaaaaagaaagagaccaaggctgactgcatcaggcacccatgtgcacaccacagtggcagggcaatcaataatccttatgtccataacacaagatcttgagggtttgaatggtcacctttgagcttggctttggggagcagatttgaacatactcactctattcatccaggatgcgtcttttcgggagaacgagtgaatctcttcctcccccatcaccgtgaaacttcccttttagcgtcaagttagaatcgagttcttagaatcaagctgtcttgatagggcaggtcttgacaacttaaatcacaagcatgatgtagcagaaaacactgaactgttctggtctgttttcttggccaattaatctcttacctctttgagcctcagtttgtcacctgtaaatgaaaagttcgagaaaaaaatgggttggattagataactttgaagataacatctatgattattttgcatttttgtgattttcatcagtttcccttagagttgagcctctgtccattcagcaaattgaacaatatttgaggagtgcctactgtatcctaggtactagggatacagcagtaaagaagaaaacagtcctcgttcctcataggagtggtttattaggaatcataactaagcaggcattacattgcactatagtaagagagcacagaggtaaagagttacctaacccaatctgtggaagtcaggcttcacagagaaagtgacatcttaggccaagaagagaagagcaggtaaagaagcgggagaggagtcttcaaggtgaagggagcagcatgtatctgaggggcctagaagcatcactgtgactgtagtgtggaaaatggattgggagaaggtactatttaggaggccgttgcagtatctaagtgagagatgatggcataagctatggtagtgtcagtgattgtagatgagttgtgggaatgagggagaaaggacaaagctcaggtttccgtgtgaggaagtaaggcccaggagacatgattctgcttgaacaaacatggaagaaatttctttttgacactgacccttttacatattgtccttgcagcagacatccccccatccccaggaaatatccctaccacccatccactgatggtgcgccatgcagaccacagttctctgacactgggcagtggctcttcaacaactcgtctcacccagggcatcgggcgcagtcagaggaccctaaggcagctgacggccaatactggccacaccattcatgttcactaccctgggaatcgccagcccaaccctcctcttatactgcagaggtgagttacagagatctgttggattcatcggagctcttgtaagaattttcactgtgctttagcattgtcttaaccttgggggaaatagtccatcacttaatgttcttgtcatacacacaaataaggtatttgttccatttctttgtggattacatgtgtagccttttggggagtgcagccttttggggaataccaaattatgtcaatagttctgcgcatgtatttagcaattattaagtgtctcatgccaagcacttaacactttagatatagacgggacaagatccctgccctcaggcttagagtttagtgagacaaacaatcttaagaagtaaaagaaaggcatataagtgttgtaatggttggtgtacagacgacagagagggtgtagtggaggcaatgtgacctgacgcagtgcc

SEQ ID NO: 137387 - DNA, 1046 bp, Homo sapiens
ctttagggggcttcagattaccgcttatcaaatgagaaaatacttatctatttatagatttgctgtaagtagttctattaaatatcacatgtgaaaatattttaagataggtgcaatagcacatgcctgtagtctcagctacttggaaggctgaggtgtgagaacacacacacaggagtttgagactgtggtgtgcgatgatcatgcctgtgaatagccactgtactctggcctgggcaatatagcaagacctcatcttcttaaaaacattttaataaaaataaagtttttaaaaaatgtttttaaaaatacatgacatctacataacagtgtataagctgtgcagtgggaaatgggtggcatttggaagttttctaaaatctgggtttgctccttacttgcttgtatctttgagccttggcttcttcatctataaagtggacctaataatcactcattgggtgacttaaggaaatactatgtgtgtgtgtatctttggtcctgtgcaaatgatatggcataattgtgcttgtaagtaaatgtcgtgattcatgacttttcaggactgcagtgtgctagcttttgttctggaccacctgctcccacatacccagaatgcagaagacaaggacacccctgccttggcccgcctgttcctcgcaagcctggctgctgcagggagtggcacagatgcccaggtggccctagtgaatgaagtaaaagcagcccttggacgggcactggctatggctgagagtacagagaaacatgccaggtaagattcatacctgtcccagggctaatagccaagaacatccccttattcttcttcttagtccatgggtggttttgcacttgaacaaaacttcttgtcatactggcatcatatactctctggtccgctcaaatagttctggcggttggaaatagccagagcactgattaccattagagtaagtgggtaaacctagagaaaacaaagggaaatgttaagtgtacttttaaggtcttcaaggaagttgagcaggttatttgatcttatattt

SEQ ID NO: 137388 - DNA, 1060 bp, Homo sapiens
ttgtggatcacattgtaattttatggttagtaagtggcaaaagggtctgagagtgagtaggggcactagtgttgccatctttgaaagcaaccgccatttttaaagctattcttactttaatccaagtttaatatacatagaaaaatacacaaatcttaaatagtctgtttttcctaggtaaccactagccaagttaaataaagcattacaagctccctagaagctgccctccttgttctttagtgcatctcctcccacccatttcaccttcactcaagataaccattatcttgagttctcgtgccgtaatttggttttgtagttcatgtaaatggaatctcatagaatgtactctcttttttgcctggcttcttttgcttaacatacttgattcattttgtgtgcaggtgaagtttattttcatctgtataaaattccactgtggaatgtaccatgtaccaaaacaaatacatcttttacccattctactgctaataaacatttgggtaattttgcctttggagctatcacagatagtgctgctatgagcattcttatgaatatatataagttcgtgaactacccaatttctgttgggtagtatatgcctaagagtaagaattgctgagctctagagtatgatagttgttctgctaatgctaaaagttttccagagtggccaggtcagtttatattattaccagcagcatatgggagatcaacagttggtgttttttcattttactgattttaatgggtttgtagtggtattgcattatagttaaaatttacatttccctgttgaccatttttttcatgtctttattggccatttgttcattctcttttgggaaatgtctattcagctcttttactctattttcctattgagtttttaaaatatattctggacataagtcctataaatacataaataggcttcctttttttaagagtctcactttgtctcccaggctagaatgcagtggtacaatcatagctcactgcagctttgaactcccaggctcaagtgatcctcccaccttagcctctcaagtag

SEQ ID NO: 137389 - DNA, 1048 bp, Homo sapiens
tgagctgaactagataaaagtgtgccaggcagacggaagaaagaagtaagggagcaagacaagtttgaagaactgttagtagagtgtttctggagtatgtaaaaggagggaaatggagggagatgcacaaatagttggacaaagcatccctgttgtactgtaaccacataaatctgagacctgagttatcctggttctctgctcttgcactgcagtgtcacgagagcattcagtttgtacaggtggcttaaagtggaggagaaatagcattcttttccacctaagacttgattttgccagtgttccagtgtggaattgaaccagtgtttgacttttctcaacagcttcaactccagaggagtctcgagatgggaagaaagataaagaaggggaccgggcctctgaggaaggcaaacagaaaggcaagggcagcaaacctttaatgcctacctccactatccttcgtcttctggcagagttggtgaggtcctatgttggtattgctaccctgattgccaactacagctacactgtgggccagtctgaactgatcaaagaggtaatatttccaacttctatttaagatgttacactgtacttccatcatttgggtaccgcctgtgtcagacactgctgggaagctgtgcatgctaagtgctaacccaagtaatgagtgagaagaggcatcttcagacatgcaaggccgggtgcggtggctcacgcctgtaatcccagcactttgggaggctgaagcaggcggatcacctgaggttaggagttcgagatcagcctggccaacatggcaaaaccccatctctactcaaaatacaaaaagaaattagccaggcgtggtggcgggcacctgtaattccagctattcgggaggctgaggcaagggaatcacttgaacccaggaggcagagattgcgggaatcacttgaacccaggaggcagagattgcgggaatcacttgaacccaggaggcaaagattgcagtgagccaagatcgcaccatcgtacacctgcctgggtgataagagcaaaactc

SEQ ID NO: 137390 - DNA, 2024 bp, Homo sapiens
atgttttcatactcaagcaaaacctttttattgtctgaagagctggaggcaatattaggaggtgtgtctgagtttcctaactgttgagaccaccacacccatccacctttattcctagttaaggtgcatcttataagcattaggaaagtcatgattgatttgcttggaacataggtttccattatagtaaggtccttctggattttattcaggacatacttatttgataggtccacagaattgccaaaaattgatgaatgctgcctttaataagcaaaagaaatctgagtcttgaccttggtgcttttcatctgtacagaaccctgatccatatagaattccttggttctcctatcaccccagaatctttaccctatctcttatcacctccccgaaatagtttagctatatagctgtggcaaccatttattgacccaccactgcatgagcaatagtgccaggtatgttcacttaaggtttgtagttacagcttaggaaagtgagactaagttaattgcctgtggtcacaagactagtttttgtaattttagggtgaggcactctaacattatctgtaatagcaccatgtaaacagtcatagccacttgatgtgaaattgaccaagactgactagataggccttaacattgtccaattgtagaagaggtttattttgtttttgatggttgttactgttttcctagcagataaatctgatcctaaacctggggttatgacccaagaggttggccagctcctgcaagacatgggtgatgatgtataccagcagtaccggtcacttacgcgtcagagcagtgactttgatacgcagtcaggtttttccattaatgtaagtcaattccaacagcgttttatctttcttctcatttttcaatgcctgtgtggtctcagtatttagggctatccccggggaatttcaaagatattaattgtgatgtatctgtaaattatctgttgcctgtaaagacaaaattggggtgtccctggagacttttttttctctcctaggattagaactgttctttaattttttttcttttccctttccttccccgcctcccccacagtctcccagtcactgtatttataatagcctcccacagattatagtataaaggtgtaaggtggttaaaaggttggccaaagagaatctgtggcattcccagccagtgccctgggaaggagttctgccatttgcagacgggtgcttttgaaattcataatagctcaggagttttcttcttcttcagagtcaggtctttgctgcagatggtgcctccactgagacttccgcatctgggacctcccaaggagagggtaatgatttgcttttctcactaccatgttcttattccttaggaaaacaacttgaaaaaactgtaggtgtcctgtgcagggggtaggagaatacagacttaattattacgtttactggtctaagtgaactttctcaggtgagctcagtgttctgtaataaagggtctctatatgctaaagttaatggaactgtaagttaaccaacctagtaatggttgctgtggtaacatattttagttttactttttaaatcacaccataattatttggggggtttctaaaaactggcttatagagattttatgccagtgatattgttctagctacatgctttacgtggtggatgcctgtcttccagcaatgttaacagagcccattgactactcaccatgaactagaaaaatgtccctgggagtaagtctaatgagacctttaaagagctgcttctccttagataggaaaggtctttgtgatccaatttaggagacattttgtttaaaatcatactagttcctggagataaatttaaaaggctaacattagtgaaataattggttaactcattttactgggtttactggccatatgtagtgtatagcgtggatgatggtgctgattcaagggaagcattacccactatgtggcagactatattggacaccaaaatggatcagatttgttccctg

SEQ ID NO: 137391 - DNA, 1062 bp, Homo sapiens
gcaggctgaggcaggagaatcaggcagggaggttgcagtgagccgagatggcagcagtaccgtccagctttggctcggcatcagagggagaccatggaaggagaccgtggggagagggagggagagggagagggagagggagaggagggagaggagggagagggagtttttttttttttttttttaataaaacgttgggaaggggatgaaattattttggaagttccagctatgtgcctgcccctgtgctgggcatttctcagttatatcctcatttaatcctcaacataaatttggagagtgagaaaattgaggtttgttgaattaacaactggatttcaaaaccagttttctctaactcaagcctttactatttggtactgctatattaaatcctgtggaatttaaggaaagtataaaccaggttttatagtagagtacttgaacattaattgaaaatggtctcctatctcaagccttctatatcatacatgcccccttctgagtctttattagtaacctagtttaggtactgcttcatgattgactggtttttctctctcattttggcttagcttcagatgatgaatttgagaatcttagaattaaaggccctaatgctgtacagctggtgaagaccacccctttgaagccctcacctctgcctgtcatccctgatactatcaaggaagtgatctatgatatgctgaatgctctggctgcataccatgctccagaggaaggtatgtggctagcctacctcaggaggctgggcactagaggatatgttactttgcctgggtcatttcagccaactcatggcttagtgagcactcactatgtgcccatactctggggctcaagatgaataagatacccattgcatgtctgtgaagaagctaatagtcatatagtatgacataccaggatggtggtaagtccttagggtgaggcaccttacctagtgagggtgcacaggtaagaaaatttctttgtgtacatgatttctaaaatgaaccttgaatggatgagattgccagagttctgttatatgagaataca

SEQ ID NO: 137392 - DNA, 1826 bp, Homo sapiens
attttcttcgtgctttcatggatttttccattattaacaagcaattttatgagaagagcagaagcatagctatatgtaagccctgtgttatcaaggcaaacaatatataaatagttcagtatctccagtggctatcattatctcagactgatggttgactttgaggcataaagaaaatatttaattgtgttcctgtacactaagtggattacagtgttacatgtttttgaaccattctggtttaaaattgtgacagcatttggagaggctcaggagctgacattttaatgtggaagttatgtggggtttatagtcttgacacatctcccagtttctataaagatcacatgcagtctggtctaataattgatagttttgagacatgctgcaacttttttataagccaggttttttgaatcaagaagggatgggacgggacttaaaaataaaatgtcattctccccaaaatcaaaagcttttagtcttggtaactcttgactgcagttgtatttttagaaagtagtgtttaatcgacagtgtttctttctctctttactaggttgttcgctcagcagctacaagtggagctggtagcactacctctggtgttgtgtctggcagcctcggctctcgggagatcaactacatccttcgtgtccttgggccagccgcatgccgcaatccagacatattcacagaagtggccaactgctgtatccgcatcgcccttcctgcccctcgaggctcaggaactggtaagtttcgcttgctcctggcctttgatattaagtttgtggcctggtataaatccagaaatttatttatgaggaggtctgtaacttgaagagcctccttaggcaagtattaggacatttgctggctaattgattgtttgggtcaatttattaggtacttcagtagcttctctgggccttgccctgttgtaatccctgccagagacactgaggactcattcattctagtccttcacttcaaagagctcattttggtggggcagtaggctttacatatagttaatggtttacaaatcaagtgataattaagggttaaatggatgtatgtctcgtgtaacacagtgcgaaatagacgtcatctgtgtattcctgccaagaaatgtttgacctgtatttaattatgaggaaacaattagataaatacaaattgtgagatgttctatataagacaactggcctagactcttcaaaaatattaatgttatgaaagaaaaaatacaggatcatttcttatagagaaaagtagactagagagataatcaccaccagccttggttgggctgtggatccagataaaagatttggagaaatttgagtgctatgtattaggtaatgtaattgtatctgttaaatttggggggtattataatggtattgcagttctgtataaaaatacccttgatctcccctctgctgacttttttggtaataaaaaagaaaatatatgtccttgatcttaggagctacaagtagatgtatttaggagtagtcacttggtaattctggatgaaaagtatatagatgtttattatactattcgaacttttctgtaggtttgttggatttgtttttttattttattttttttttttaattttttttttttattgatcattcttgggtgtttctcgcagagggggatttggcagggtcataggacaatagtggagggaaggtcagcagataaacaagtgaacaaaggtctctggttttcctaggcagaggaccctgcggccttccgcagtgtttgtgtccctgggtacttgagattagggagtggtgatgactctt

SEQ ID NO: 137393 - DNA, 2501 bp, Homo sapiens
gaagagcaagaggtgtccaaactcgcttttataaccaacccagtcacaataactaacccagtccgtggataatgacattaatccattcatgaggggcggagtccccatgacctaatattatcttttattaggccccacctcccagcactgttaaattagggattaagttttcaacacctgaactttagaagacatgtttttaagcgtgtagcagagagactaaggaatgtgagagtaaatgcatatgaaaaatgttcttttggtttttaaaatttattgtccagtatatttctttttcctgggtgagttttagcagtgaacactgatgaagttactatttcttctaatcaaccttgaaagaaatacaaagaaactttgtacttttatgtttagtacctgcaatccaacagcaacaactggcgctggtttgatgatcgctctgggcgttggtgtagttacagtgcaagcaacaatagcactattgattctgcctggaaatctggagagacaagcgtgcgattcactgcaggccgaagaagatacacggtccaattcactacaatggtgcaggtacatgctcactcaccaagcttgtctaacccgtggaccacaggccacatatggctcaggatgtctttgaatgcagcccaacaccacacattgaggtttttttgtcgttgttctttttagcttatcaaatatcgttagtgtagtttatgtgtggcccaagacaattcttcttccagtgtggtccagggaagccaaaagattggacacccctactgtaaactttatcaaaaagaggggtatgtgttttggttttcttctttctgaaccagcattcctaacgtgttaggaggaggagagttaccattacctaattaagtatagatttcagaaaatcgagtcttcctaaggtcattgattagaccttgggtctgtagcaatttgatactatccctcttagaaatgattttaagtgtttagtcaagggctagggagtggttagggatggtatttgctctgttggaaggtctacagttcattataaggccttgtgtatgccacttgccttctggggactttcaggttttttctctgtaaatgataaaggtgggataaattgccagagttccttcctgttgtagcattttacctgggagatgtccctcccctcccccacctttataattcatttttggtagaggtttttttaatgtctgtttgaattcctaggttaatgaggaaacagggaaccgacgccctgtgatgctgactctcctcagggtacctcggctgaataaaaattcaaaaaacagcaatggacaggaactagagaagacgctggaagaaagcaaagaaatggatatcaaacgtaaagaaaataaaggcaatggtatgtaccaagagtgttttacctaaagctaatgtgcctttgtggcttaaggtctggccaatttcattgtgagttattttcatcagcttgattaacagattaaagatacgtaggcctcccttatgctttttcatctgatcttaaaattggtatttggcatgcttctcttaataggacccaagtgcttggccaattacttaggagggaggcgtgggaggaaataaacatcaagttaaactgtctaaaactgttattttcccattttatagatacccctttggccctagagagtacaaacactgaaaaggagacaagcctggaggaaacaaaaatcggggagatcctgatccagggcttgacagaagatatggtgactgttttaatccgggcctgcgtgagcatgctgggagtccctgtggacccagatactttgcatgccacccttcgtctctgtctgaggctcacccgggaccacaaatatgccatgatgtttgcagaactgaagagtacccgcatgatcttgaatttgacccagagctcaggcttcaatgggtttactcccctggtcacccttctcttaagacacatcattgaggacccctgtacccttcgtcataccatggaaaaggtgagtgtgttttgtatcagattctggtttagctttacatcatacctatgttctccttggtctgagaacaaatagacttctggttcttcttagggtatatagctagatatgtatactgtatactccacccaacagaattttccaactctatgcttgggagcttgcttaggtatggtaggatgatcctattgctagaaagtcctctccagcaatctggttttcttttttttctttttttctttttttttttttaatctaggtttcattaaccaagccaaaaaccgttagtaaagaactgggataccttcccccaagttcataccttcagaatcattcctttgtaggagtacctctcgggtgttcagccaagagactattctcaaaacactgtattttggaatataaaagtatagttaaagctttttgaatgtttgtaatctgccaggcactgtgatagacacttaacaaatatccatt

SEQ ID NO: 137394 - DNA, 6450 bp, Homo sapiens
gagatggagtctggctctgtcgcccaggctggagtgcagtggcgcaaactcaactcactgcaaggtccgcctcccgggttcatgccattctcctgtctcagcctcccgagtagctgggactacaggcgcccgccaccacgtccagctaatttttgtatatttagtagagacgaggtttcactgtgttagccaggatggtctcgatctcctgacttcgtgatccacccgcctcagcctcccaaagtgctgggattacaggcgtgagccaccgcgcccagctggtttaggtttttaagactctaaaaagtaacggaggagaggcggaacaaaagaaaaaaatagtatagctgaaaactgttggacagattagacgtaatagctctaagaagagggacgtgtagggccaatatagagattggggaccttttagatgtaaaccccccttgccagggtaaaatactaatattctgtctacttttccttatttgaatttagaactttcaactgggctctgtccatgggaggtaaagttcctgtttctgagggattggaacactcagacttgcctgatggcacaggagaattcctagatgcctggcttatgctggtggagaagatggtgaatcccaccacggtgcttgaatctccacattcgctgcctgccaaattgcctggaggtgtccagaactttccccagttcagtgcactgcgcttccttgtggtaactcagaaagtgagtattcagtattctaaaatcaaaaggaatttctcatgctaagtcgttcccactctattttgtcctgcttaatgaaataacatgcttatttaagaaccactggatccaactcccagatagggctgccttacgtaagggaatatagaccatttgagaattttccgtgataaacatttgagctgtaaatttcagattggtacttgcattaggccgttcttgcattgctataaagaaatacctgagactgggtaatttataaagaaaagatatttaagtggcccacagttctgcaagctttggaagcatggtgctagcatctgctgggcttctagggaggcctcaggaagttcacagtcatggcggaaggttaagtgggagcttgcatgtcacatggcaggagccaggaggtggagggggtggtacacactaactcactatcatgaagacaacactaaacaatgagggatccacccccatgacccaaacacctccagcattggggattacaattcagcatgagatttgggcagagcaaatattccaaactgtatcactgcttaaggttgagtaaaatgcctcttctctgtgcctccttagacctcctcatgttggccaattattttgttgctggtactagttgtggaaggactgttccataggtctttaacttaatccttctgagctttgaattgaagcaaaatgattttcacacacttttcaaattacttacaggcagcctttacttgcatcaaaaacttatggaaccggaaacccctgaaggtatatggtggacgaatggctgaatcgatgctggccattctatgccacatcctccgaggagaacctgtgattcgagagagactaagcaaggagaaggaggggtctcgaggagaagaggatacagggcaagaggaaggtggctcccgccgggaacctcaagtcaaccagcaacaactgcaacaggtagggtactggcctcacactccagggtccagactttgcacccaatggagtgtgatgcttacggattttctaagctcacataccactgagtccctggtcacattaaccaggagacagtttagatttcctccttctcttagtatttattttttttctcctgaggaaaactggagtatagtcctgatgctctgcacaggtaatactcctttcaagcatgttgatgagtattctcagtagcctcctgctgcctcagtggaggcaaactgtcctcagttactttctggttaacctgtaaagagaatggatattgtgaaccagatttattctccaacaagagctttctgaaaccttagtcacctacaaaacttttgttttcacttgcaaataaaatgtataaggggcattttaaaaattgggaggccagaaagaggagaggggaaaggcatgtaaagtcctgccacttccatctcaaagagcattttaagattttcttcctggagtttgtatgtatgtgtgtcagcttttatgtctggagtcctgttcaaatctgtctactatatacacttgtcccgttttttatcattaaagtaataaatactctcattaccaaatttggaaaatacaagacttttaaaaggcattcgtaattttatcacacaagatagtcattgtctcctttttcagtcagtcttgtgcctaatttttacgtcgttaacatcaaataatacatatacttgtattgctgttatcaagaacttttttttactaattggtcattcttttattgttggatgctaattttcttacagtttgatgttttaacactgtgttgtatagtttccttacgtaccaatccttacatacatctcatgattattgcctggtagtagattaactaggtcagtttttcaggcacttgctctgttaccagtttgttttccagaaagttgggaccaatttatacttctttgtatgagtctcaatcttttaattataataaccctgttaatcataataaccatgcatccccccctaactttcttagaggatgaaatcgagaatcttcttggctccttacccaatgtgtagcttagaatgctatagaagcaccaaacagaaaggattgttcattttacctaattgccctagctcataaatgctctcagcccagatgaagttagaaaaagttatttccatcttgaaaaggttccttccttttaaaaatgtatttggatttccgttatgtgattctgagcccttgcattctttatgtagctcatggacatgggcttcacaagggaacatgcaatggaggcactgttgaacaccagcaccatggagcaggccacagagtaccttttaacccaccctcctccaatcatgggaggagttgttcgggtaagttggctcagaagcagtgattttccaggatattggtttgactgctgaagtcctttttccccttattattctgtcattggtcttcctttctataaactgcttctcattttcagacatgtccatgccagtattttcttttcataataacagaagttttctgtcccccagcaatacaaattactatactttgtttgcacaagaacccccagtcacaaaacaatagaagaggcacacttttctaagatgtagaatagatgatcacactgtaagcctccttcctatacttagttttacgtgtgattttcctcatctgttcttgtttgtagtaaccacataagcctgatagggtttgacttatacaagagcagcattttgaggcccttcctctctctttagcttgagcacaagatgtctgattgcctgtgagttgcagtggtcttgttgggtttctttgttttgagtgtgtatccttactggatattctcttaacactctaggatctcagcatgtctgaagaggaccagatgatgagagcaattgctatgtctctgggacaggatattccaatggatcaaagggcagagtcacctgaggtaactatggaacactgcatcctaaagggcttggcacatgaatcttagtattctgtgaacattctgctagtattgcaaactaattgatagaattcaaatctaaaggaagacatgagaagagtactaattcatcccagctttgccatccattattgagctaccttgtattgacctgaagctttaagggaggcatatgaagcgttaatctttattgtcaaataagagacccaatgtgtactcagtagtgccattaggccgaacttggctgtatatttctaggtgacagttactttaattttccctgctggcacagaatatagaacagtgtctagaaatgattttgcgggaggtagtatagaatgctacaagtgacttgacagtgaaagttgtttgaagcatccctcccttctaccttccctgtcttgccttaaactttgtggctgccacatcctggatgaaagtatcaaccgcttgaggagaaggttgagggtaatcatatggtagagcaaaaacattctcagagtctctcttatctttcctccttcacctctcctgtgtattattcacacttccttccctgcttccaggaagttgcttgccggaaggaggaagaggaacggaaagctcgggaaaagcaggaggaggaagaggctaaatgtctagagaagttccaggatgctgacccgttggaacaagatgagctccacactttcacagatactatgttgccaggctgcttccaccttcttgatgagctgccagacacagtataccgtgtgtgtgacctgatcatgacagcaatcaaacgtaatggagcagattatcgtgacatgattctgaagcaagtagtcaatcaggtgagctctcaaggggtcagaagaggggagtatgtgaagtggtttgcctgcctgtgtcaaaacctgatttctgaaaaatcagcatattttcattctacctgatatgggtatattctctatttggattctttcgatctggtaatcctgaaacagtgtgttaactacatcgcacacacaaaaatgtctttagaagggaaaaacaaagctctccttttctacttttctcttaaaatgtctaaaatgtgcctcacccttgagtcaggttcgtcccctggactaatactgaataaatgttttttcctatgtaacagccgcttgaacaactgagtccccatcctgatgaatacttgtgacctgatatttgtcctctttttcttttctctcattatgaaattatgctaattatagaagtgggataagaaaggaattaccttaaatccccacacccagatagccagttaacatttcgattgtatttaagttactggaatcttgttttatgtaatgtttcattctagaagcagggaaagaaattaaaaaagggaaaacttttttctgggctttgtaaaatagaactttaatgcacaagaacacaagtaaaggaaaactggataaaacattttttcacagaaagttttagtgtctattttttaacaataattctgagagagagagataaaatgaaagattgctgatggaagtataagttgatagaacctttttggggttgactgtatgcaccaggaagttttaaaatactcatttcctttaacttagattttaggctgcttatagtctagcctaataaagtaattgtttagtggtgatcctttagtagcatacatcttttgatatagattctaaatccctatggtaaatatgttagatttacctacctttctttagtgaatgtgttggaggcagagggagtattttaaaaggttgagaatattttcagaaacctcatcttgctctgcggttccgtgacttaaccctttttttgcttttctaggtgtgggaagctgctgatgtattgatcaaagctgctcttcccctgacaacaagtgacacaaaaaccgtgtcagagtggataagtcagatggccacactgccccaggcctccaatttggctactagaatcttgcttttaacgctactttttgaggtaagatttagatctttggggccttgtaattcattcatgaaagaattatcaaacacttaacatatatgaggcattgaagacgataaagcgaagaataaggcatgagtcctgcatttcatgagcccagtttctgataggctgaaatgcatataattacgtataaaatacagcattctgtgttagaatgataacagttttatctgggtttaggaaagtcatatgcatcactttggattcatgtgagaagggcttctgagaacaagcattaattgaattgagtcagaattgtgaggtggtagtttaaaaaaaaagtatttaaattactaacagagcttggtcatagaatattttttgctcttctgaggaaacctaactggcagccacatagtagagtagggtatgcaaattggatgtggtcaatattgaggtaatagacattagatgaaatcagattcctctctcttttccttgcctatttagtcagcagattatttgaggcaagagagtggtttgggcaagacctgatccaaccaacgtaggaactaggaggcaattgaccttggacaaatgacttcatttgtggctcattatctttaaaacctgaacttaatgaactgaaccctttacatacagcaaactcaggggataaatccaatataagagtcaaactgtgtaacagctgtcttgggggtttcctttatcatggaagtgataactcttactgtagcactttgt

SEQ ID NO: 137395 - DNA, 1144 bp, Homo sapiens
tgtccataatctgcccaattccttaagaagctacttgtaaaaattttcctgcttttcctagtttattttttcctctgggactacatattttttgttgtgatcagactatgtatattgtcagtgatcttttcttatctaagtggctaatcatttttggcattttaaaagttttctgtaggcattttaagtgactttatcatccactagatatcatttaacttaaatatggtttcaatttatgttcctctagcagtatgagtgcttatttgtcttttacatttggtatctgttgagtgccacatatctgtctcctaccgtcaaaagtggcatttgttccttgtgggacttcctttttggattattgaatgtagaacaaatccaagtgttaactaggggttgtaggaggaagtggtgagtcataaaaatatgttaatggtaatatgtctgttgtaattaaaccattctgagaatactgtacagtcttattctgatttctgggtttcagcttcctccagattaggccgagcacttgctgagctatttggacttcttgttaaactttgtgtgggatctcctgtccgccagagaaggagccatcatgctgccagcaccactacagcaccgacacctgccgcgcgatcaacagcctcagctctcactaagctcttgactaaggggttatcttggcagcccccaccatatacacctactccccgattcaggtgaagttcagcttgagattcagggactagaaagttacaataaaaaatatgtaagttgttcctatactacttaaaatggagtgtgagccactgaatttgagaatttggaggtcccttgtttactctagaaaatgaagtgtaagttacttgttttggttgtacctagtacagaacatgggtaatattttaagtatttacagtcaaactgcatttcagtggtcttatataggtagtatcccttatccaaaatgcttggggccagaaagtgttttgaattttggaattttttgggttttggaatatttgcggaatacttatcagttgagcatctctaatctgaaatgctcccatgaacatgtactttgagcgtcacgtcagcaatcagaagtttcagattttggaacattttgaattttctgata

SEQ ID NO: 137396 - DNA, 2372 bp, Homo sapiens
aaattagattcactgtcaaagaattgcctctctaacagatatattttttctagcaatttaacacatttaacaaaaacgactcagcttctccacagtttttctggaatgttaagagaacaacttggtgacttgttttataagtttgcataaagctcattcttagatctaagagcaagcatataccaaagaaaaagacacatgtcacattcatatacataattcttaaatgctaggaaataaaattgtccagtggtaatctgtgatgtctagtttgaacttaacaagctataacattctagtagggcatccacattgacagcattgggtactgtgcacactgtagtccatgtgaatggtaccccctgggttgggctgtgcctacaacagtcttccaaggtagccctgggttaatactattcatatgctgtcatttgaagatgtcagcattaggtacttagaactccagaggagcatatcagtaaaatatttgggtcgtgtttttgtttttcaaatttaggaagccatgggaattgaaagagtaacaaaaaccataggtaatcttgtcagtacttctcaaggaaccaggtaaatgttggctctacattgtcctattgctcccctcttatacatctgtagatggggaacaggatggagcagctggaagtatggatgcttctacccagggcttattagaaggcattgggctagatggtgacacattggctcccatggagacagatgaacctactgcttcagactctaagggcaaatctaaaatcacaccagcaatggctgccagaattaagcaaatcaagcctttgttatcaggtgagtcattctcctttctcctaccttttctggctttcagtcccttagtcttgaaacagattgagttggaaaggctatgttgtttcacctaaggaagtttaaaacttctgtgactcatttttaagtgtcctttgttgagtggctgctatgtgacaggctttgtactagctgctacggatacagacatgacagaatcccttcctgagagccatatctactaccctcccttctttaatttcttcctcctacttactcttcaactattgcatattgttgctgctccttccatttcactgagatgtctcagcaaggcatctacaacgtccttgtcctaagtcccttctcacttgtctgcagcatggtagttgacccaccatctccatctagaaatattcttcctttggtgcttgtgttattaagctatcttgattctcggataactatctggctcttccacctagtcttctctttttgtgttccttgaacataactggcaagagacatagtctgataggtgttttatattaaagtcactttggcagctttattgagactgtattggcagcatacaaaactgcattaatgatttgcactggtctgtttgcccttttttttcccctttaatgtaataccaatgtttgggaacctatttgtgtgttcgtaaattgtcgtcactttctggcaccttaatatagaggaaaatggagacctaacttagaggaatctggggcccttcgtaaaagcaaacagaaaatggcctttggtgtttccatttgttacctcaaattcccattgcattttacattttacttttaattagtttaattctccatttattttaatttgaaagtctaccaacattaccttcaaaggaaaattgaccaagcaagaagatgttcatatttctctctccttgctttgtcatatttctttgatcttggagcattcagaggtttctgtgtgaacccagtccatatactgtttctctttggttactggccttttgccatcctcttgtctttggactacctttaagcactttgctatctgttcacctgaaagcagtggtgagaaagtgtaaacccaatgattggattcattaggttttcaaagtctgggtatacccatatctgtagactattccctaattaggataaagaaatcttaatttggatgtaataggaagaagaaaggactgttttccttgttcctatactgtatacatttgagcttattactaaattttagcaggatatgtaacctaggctcaagtagagcctatttttacacactgagtttatatgtgcatgtatatcctgaaaagacatagatttaacccttgagcaacatgggggttgaggcaactcctccacacagtcagaaatccatgtataacgtttgactccccaaaaacttaactactaatagctatctattgaccagaagccttaccagtaacataaacagtcgatggacacacgttttgtatatgtattatatcctgtattcttaaagtaagctagataaaggaaaatgttaaaatc

SEQ ID NO: 137397 - DNA, 1574 bp, Homo sapiens
aactctaagaaactaaaatgttagtcattacttctaagttttgttcctacgtctttataggtttattatgaaaatttttagttagttctatcatccatagtctagttttcatcctctcactaatttttagtcatttcttccataaaaacatatatacataatggtaaaatttagaaaatgtagttgaaagaattacccgtatttctgccaccaaaaaaaaaaaaaaaacattttggaagtgtctgcccgtcttttttctctgaatacatttgccagtgtcttagataaaaacatttcgtagatctctttcttcacttaatgttaggtaccatataaaggtacacgaattaactattccctgttaagtttctaatatgctatttttaaaaaatgaacatttttgtatctacttttctacaaatgtaaaattgattcctagaaattactgtatcagagggtattaacaaatactttttaatgtggctactagaaaatttaaattatatatgtgtttcatgttatatttctatcgacagtgctgttttataaagaagattgcttttatattatctcatgataaaaattccaaattttggccgggctcggtggctcacgcctgtaatcctagcactttgggaggctgaggcgggtggatcacctgaggtcaggagttcagaccagcctgacgaacatggagaaaccctgtctctactgaaaacacaaaaaattagccgggcgtggtggcacatacctataatcccagctactcgggaggctgaggcaggagaatcgcttgaacctgggaggtggaggttgcagtgagccgaaatcgcgccattgcactccagcctgggcaacaagagcgaaacaccgcctcaggaaaaaaaaaaaaaaaaattccaaatttcagtaagtagaaatcatacacaattttctgactctaatgctacaaacctaaaatgaatacaagcaacttttccagaatgttttttctctggtgttcagtatcaatgaggaaataaaaaaggataaactattaagaaagcaatgaagataattctgtgtataaaaatgcatcaggccaggcacagtggctcacgtctctaatcccaacactttgggaggctgaggcaggtgaatcgtttgagcccaggagttcgagacccgcttgggcaacatgacgaaactctatctctacaaaaaaaatacaaaaattagccggccatggtggtacatgcctgtagtcccagctactagggaggctgaggtgggaggatcgcttgagcccaggaagttgaggctatggtgagccatgagtatacccctgcactcaagcctagatgacagagcgagaccctgtctccaaaaaaaaaaaaaggtatcaggcttaaaacttgtacagaaattactagaaagggaaatttctaaggaactaataaagctgacataggcttagaaccaacaaacaaggacttacatatgacagctggttattgtgagggatgggataacattaataaactataaagaaacctgacaaaatgagaatttcaaatttagtcaaaacatactaa

SEQ ID NO: 137398 - DNA, 8162 bp, Homo sapiens
cttaccacccaccactcatgagcagcttgaaagaaatggactatataaagtctttgtcatctttagaacttgaatagcaattgtctggaatttaaaggcaatgagtgcagagacgcagttgttccctgaaatgtggcccactgggagggctcctttgtcagagtcagctgtctcctcaaaagctggaggaagcacctgaccatccccccatcccaaaaaaccccatatacatcatactatgacactaaattgatatcctcctttacttttgatgggggcatgagctggggctccaccaccataaatactgaaaattgaccagagtttgggaatgtgtgtatgtttggggaaagggagagagacaggaagtttagaaggacttttcttgaaatcagttggtaagttgagtcctgttggaaagagttgatcattttgattattcctgtatggcttcttgggcctgagagccaaaagatgaggggaaggagaaaagtggttactgaacaaatttattcctgaaattatattaagaaccactattggtttgctttctctctgttcttctccccagtttccatgtagcaaatgaagggggcatataggtctcatttgattttactacttaggctctttgccattatatctggcttcttcaaagggttgggtgtctctgggcgggatccacacctgcactccttatcgatagaggtggatctatataggtaattgatataagtaacatggaatgctgcagtggttctgaggaggaacttaaagaaaggtttgtggtcttctcatggaatcatttcagtcttgccttataggtatactccctttctacaaagttcttccccacatttttcattgaggaggttcacaacatcctacccaaacctggttctgggtatttttgtcactgaagtcattcataatgcctctccactctcttttcctgttctatattctgctgccaaatgttcttgtgcctggcaaatctttgtttacattttgtcttgctcaaagatgagaactactagcttcttgccaactttcttgtcttcttcctctacctctccctctgtctctgccccatcccgctctcctgcaccctgtgcccaaatctgtttcaagggcctgtgtccaaaatactccattttctaaagtatttgttccttcctggggtttatcttagaggtatattttgattcatcacaatatactatatgtgtagttttttgcattgagctgcattttctgcagctgtggcatgttgtagccttctcatctgctgtgcaatattgaagcaactgaaaagacaaaagacctgatcagttttttgatagttcaggaactgtcatgctgcaaataccaattgttagggaagggagacctcaggtgtatgaatctttgaactaaattaaattgtatttcctactctccataactttaaacgtgatgcaaaaacatcgtatgatgtttaagtgtttctttgtctagcctctttcttcaagcaaatgttgagtcttttaattgaacttatttttagtgttctcatgtggataaatttccctaacagtagtttgccaaagataggatagcttctcttgtgatgtatactaatgttgagtttttaaaggcttggttgtcccctttatgctttcaaccttggtcaggcttggaaaggtagattcaggattgatttcagctgtttttttcctgcggtatatgagtctaaaggctcatctctaccccataagcctgggaagcaaaggctgcagtgagccatgattgtgccactgcactccagcctgggtgacagcaagaccctgtctcaaaaaaataagcaaataaataaataaatagaaaaaggcctagaattttatacagtgcctcctcctctgttctcttaatattggtattgtgaatttctgtgtaactcactcttttctcccctaacagggttgttggtacagaggaacgtattcctattcccctcatggattacatccttaatgtggtaagattcaacacagggcaaactgagtaaagatgtatatgtgcttttctggaaaatgtgtttcgttatcagagtccagtaattaccgtattcattttaattggaatccaattaagaggggaaagatgtgccacccttttgtttttgttctagactggtttgccagaaattagccaacacaagccccattattttgtattccagatttttttgttcactgttaccattctccattagaatccagacaggaatctgtaacaggttttgttttgccagtctagtacaggctgatcatcccaaatccaaaatgctccaaaatttgaacctttttgagtaccaacataacactgaagggaaatgctcactggagcattttcagcctgtactgtataatgcaaatattcaaaaataaaaatctgaaacactcatggtgcccaagcatttcgaatatgaaatatacaacctgtaatatgttttccaaatgtgtccaacatatattttcccccttttttcccattacttcctgggtatctcaccaaaaaagtgaagagtttgaattttcccagaattgtttaccaataagggagagacctcttagcatttgtttcagcctactaatcacttccaagacttccagagatagtttgtcttgtgcctgtgtgtttattgcccacattttacttttttactcttaaaaaaattctttgtttgaaacaaactcttccagagttcagtgtttcatttgcattatgcgtttcatttgcattataagcacatttgggggaaattttccatgatgtttgcctgcaggagagaggtaggcaaggagcactaaatagcaaattaagagattaaacatgattgtaccactaattcataatgtggccctgagcaagtcacttaacttctctgttatctcgaaatatctgattcttggtgtgcttgaaaatggagattgggcagaaattgtagatattctttacttcctggatgttttagaatccgtatcatacatctggtttatctgaggttttgatactctatagaaaacactaatatcatgactagaaggctaccccatccttattccaggctggccatttagttccacctgtcaggctctaacttctttaaaaaatttttattacctagatgaaatttgtggaatctattctgagcaacaatacaacagatgaccactgccaggaatttgtgaatcagaaaggactgttgcctttggttaccattttgggtcttcccaatctgcccattgactttcccacatctgctgcctgtcaggctgttgcaggtgtctgcaaatccatattggtaagaagcatctggccaaatgttttcatttctttctggaaatcaattttgcgatacttctgtatatatgtttttactatggtctcccttcaactaaaaaataatgaataaatttgtgttatgttgtataagtgaattttgtgactaatatatagtgtgccatgttatttctcattgaaaagtcaaagtattttttctttgttcatcggttgggtatgtagttctacatcattagagtttattggagggaaaagtgtatctccaagaaagcttttctagttgggttttattagtacctctcccttctttgttataggtgcattttaaacacattttatgtttatggttatgtttaaccatgtattttcctcccctttcaagcttggtagtcatgtattttaagcataattgacatgtagttcattgccgatacttaattccccccttttcaagcccgatagtcatgtattttaagcataattgacatggtagttcattgctcatattttgccaaaaatgaagcttctttattttttcatagtggtaaactacacataacatgaaatgtatcatcttaaccattttgaagtgtagagttcagtagtgttatgtgtattcatattgatgtgcagccaatctccagaactcttttcatcttgcaaaaatgaaattctgccattgaacttctcatcctcccctctccccagaccttggcaactaccattctattttttgtctctaaatttgactactctaggtaccttatataagtgggatcataaaatattttgtatgtgcgaccggcttttttcacttagcataatgccctcaaggttcaaccattatgtagcatgtgtcataatttccttcccttgtaaggcctaataatattccattgtgtgtatataccacattttgtttatccattcatctgttgattgacacttgggttgctttctccttttggctgttgtgaataataatgatgctgtgaacatggatgtacatgtaactctttgagactctacttttaattctaattttcccacatcctagccaatacttattttctgttttttgataatagccattctggtgggtaggaagtgtatctcattttgtttttcactggcatttccctaatgcatagtgataatgaacatcttttcatgtgcttgttatccatgtatatatcttctttgtagaaatgtctattcaaattcattgttcttttttaatcgtgttatttgttttgttgagttgtaagagttgtgtattcttgtacacgtattaatacctgatactaatttcttctcaggtatatgatttgcatatatttttcctgttctgtgagttgccttttcttggttgtctttggattcacaaacatttttaatcttgataaagttcagcttctctttttttgtttttgttgcctgtgtaaacacctgtgtttttggtgtcgtgtccacaaaaccattgccaaatccgatgttttgcagctttcccactgtggcttcttctaggagttttataacttagctcttatattcaggtctttaatccattttgattagattttttatatggtaaaagtctgtcctttcctattgcatggtcttggtacctttgtcaaaaatcatttgaccatatatatgtgaagatttaattctgggctctctattctattccattggtctttacgtctgtctttatgccagtatcacagttttgatcactgtaactttgtaatagaaatcaaaaagagtgagacctccaaaaatttttccccaacttgttttggctatttggggtcccttaagatttcatataaattttagaagggatttttctatttctgcaaaaccaaaacaaaaaacagcattggaattttgatagtgattgcattaaatctgtgaaactcctttgttagctgggctgcagagtgataagtaattcctgctgaatgagaaatccatttgcttacagacttggaaagatccataattgtgacgtgacttcatttagtttattttgttttactctttgaaatattgaattaaatgctcttcatcacagagaggggaaaatatcctataagatgctgtggaaggatagatagatttatttaaagccataggaaggcacatgatttctcctatctttgcatggcaagtgatggtgttttattgtcagatttttctccagacttgagaggaaatcacaagggtcgtataatccttgggttgtctgataaaaacaaattgcctacctgattcctatctcagaataatcgcttttgttttaagaagaaaagaacagtgtaatagtgactcacttccatgctttggaactttgcctaacattgtttcctatcgagcaaaatttggaattaatcctatagtgtagaatccttgccgtaacagtattcagtttgaccatcataagcttttaagtgttattggctcaccaagtttgaaagtagtgtgttgctctagaaagagatgttaaggtatgttgtacctgacttcatatttgggttccaccatttaccaggtgagagaccatggccatatccaaaatctgagaggcttccatttaattgtcacttccattgtgactattaaaagacatgatgaatttgaagttcattgtatattaacactttaattattcttcctgtttcagacactgtcacatgaacccaaagtccttcaagagggtctccttcagttggactccatcctctcctccctggagcccttacaccgccccattgaatcccctgggggctcagtgttgttgcgagaactggcttgcgcaggcaatgttgctgatgctaccctctcagcccaggccacacctctgctgcatgcactcactgctgcccatgcctacatcatgatgtttgttcatacttgcagagttggacaggtaaaaataaccttaggggtgaacatattaatttaaaggcagtgaaatatctagggcatacacctagcagggttactatgcttgaaaggaggtctgcctgaggtagcagctaaaagaacagtccaatttaggatgagatttttttgactgtcaaaaagttgagtgactatataacttattatgtgatgaagtggactttcttgagagcgaaacatgttattacagacaaacatcaattgggtattcatctggccttagtactttctaatctttccaccagtccttataggtctgataatgggatggcataggtaggacattttaccaaagaacatttaaatcaatagtaattaacaaattactaaaaattttctacatatcaaacgtttgacctgtaatccataatccatagttccagaaagaaggcattttgtgtatgtcctcacagttttactacatttattcctcagataattgattctaaagatttatggtatcaacattaaacaaaacagggttcaacagccctgttttatgctattgagcaggagtgtgttctctgttaattgtgaatcaatcaaatctgaagtttaaaaaagcacaagtataaaggatttagaaaattaaattacttaacaaagcttagggattgatttttatgacttctttattaaatgaaataaaatgaaaatgaaacattcaaggaattaaataaatctaggtacttactgaagtaaagaaattgaatggaaataataatacccctaccaaataatttagaaagtagttaatgaacctgtaaaaccatttctttgattcagaaaaaaagagtagcctctgatgcctttctttcactttataaaaaacaatgagaacggatgttgtggaaatagtttgtaaatattgtaagaggataccttgtggaactgtcgtcttgagtgtggacattttgatgaggtggataactctgagaatagcaatgaagaaaaatcccttacccttataaaactgttgaaggtcaatttttttttttaagtataattgttcagagaacatcccaaaggtgaaattcttgttatgattgcagagtgaaattcgttccatctccgtaaaccagtggggctctcaattgggtctgagtgttttgagcaagctgagccagttatactgttccctggtgtgggaaagcactgtcctcctctctctgtgtaccccaaacaggtaagagaatggctctctctcttattactttgttatctaagttcggtgagcctggaggattgctttggttggggataggagggtatggaagagagttcagaggcctccttgtccttccctcttcccagcctaggaacttgatgacaaatgctttgtcgtcatggtagatgtttaaaatgtgttcctgttattagccagatacaaaaaattgagttgtggctggacacggtggctcacgcctgtaatctcagcactttgggaggccaaggtaggcaaatcaagaggtcaggtgttcgagaccagcctggccaacatggtgaaaccccatctctactaaaaatacaaaaaattagctgggcgtaatggcgggcgcctgtaatcccagctatttgggaggctgaggcaggagaattgcttgaaccccggaggtggaggttgcagtgagcccaagatcatgccactgcactccagcccaggcgaaagagtgagactgggtctccaaaaaaaaaaaaagaaaaaaaaaagaattggaaagcttgtggggtgctacctcaggaattatagatgctttattacattcagtttaacctgcctgctataggagggatagtgtcagccaagcaaattagagaccatttacaatataagaggtgaattatca

SEQ ID NO: 137399 - DNA, 1322 bp, Homo sapiens
ttatatattatatggacaagcagacatggcttagattaagtttgtaaagcatattaccctttctagtctccgtttgttgatccctgtggctgccccccacccccgccttattagctctgccagtttccttttagaattgttgttgaaattggtatataagttcctggtgcttggtgaattgggacagggagtcaggttcgtcagtcacttatacagccgtgtgacgctcaacaaattatttaagtttgcagcacttctattcccttgtttataaaatgtaattaatgaccatattctgggaattatgtatataacatgtatacaaagtgtttgggcaaatacacaacacatagaaaacgctctaaatatgttagctgtctcctcctccccattccatgattactaataagtaatcttatttcctgtgcctttcagttacttgaagaaatctgtaatcttggaagggaccccaaatacatctgtcagaagccatcaatccagaaggcagatggcactgccactgctcctcccccaaggtctaatcatgccgcagaagaagcctctagtgaggatgaggaggaagaggaagtacaggccatgcagagctttaattctacccagcaaaatgaaactgagcctaatcagcagtaagtgtttacagaacagatcatctagccatataatcgtgggcatgttatcacctctctaagtcttaatgaacactttcatctataaaaagcaagagagttgtattagatcattttaaagttctaaccggttctaagaatgtattagtttttccttttttgacccttgtgtgtcatttgtgctttggtatttaattgtattggttgccttaggaagtgatctttttttaaaaaaattaattaatttttaatttttattgatttttttgagagagagttttgctctcgttgcccatgctggagtgcaatgatgtggtctcggctcattgcaacctccacctcctgggctcaagcagttctcctgcctcagcctcccaagtagctgggattacagacacctaccaccacacttggctaatttttgtatttttagtagagatggggtttcaccatgttgaccaggctaatctcaaactcccgacgtcaggtgatctacccacctcggcttcccaaagtgttaggattacaggcgtgagctaccgcatccggccaggaagtgctcattcttaaaagctgttgatgaaattgaatcagaatttggtccatcaagttaatggactttgcacagagaccttattttccctttgttgatttgatattccacatcgactgctt

SEQ ID NO: 137400 - DNA, 1761 bp, Homo sapiens
agcttgcatttgctttaacccagcaagcccacatcatagattttttttcctgttaaaagcagacaaaaacggatatatgtttaggtttatcattttcacaattgaggactggtttttatacatgtggtacatgcatttagtggaatagtaggcagccattcaaaatgaatgggtcgttgtgtcgggagaggacattatacggtatgacagttgtgggggaaaagcaaaatatataaaacagtgtaacctcatttatgtaaaaatatgcccataaaaatcctgtaagtgtagtcactagattctttatagtattgaatctctgatggagcagtattaggatctttaatttcatagtaagcacaagggtttaaattgctagacattgagtatgtatttttttttaagcttttggtgttttgttttcagtttctgtgaggaatctctcagttttccatattttctcatctttttttagctactgaagtggtgactgtgtttgtatttcaagaaccatcactgctctcctcactccaggacaatggattgacagatgtcatgctgcatgcactgcttatcaaagatgtaagtcttttctgctactctgtaaagaatgtcttagggcgtgaaaatcctatctcttctgtgtgtagtgttgaatctaattgggacctggttgtcaaaattccttctatctcagcttgatacccatggccggattttcctagcatctacactcttttagatgcattcaagctcactttgttttctctttaggttcctgctacccgtgaagtccttggctccctcccaaatgtattcagtgcactctgtttgaatgcccgaggtcttcagtcttttgttcagtgtcagccttttgaacgcctcttcaaagttcttctgtctccagattacctcccagccatgcggaggaggagaagttctgatccccttggtaagttgttaagatttattttatagtagaaaattgatttagtttgcaaggaaactcttccttgatcatctctctcatcgttttactggttaggtgtgctaagtttaatgggaattatcatcatacattctattatacttcagaaggaatacttcagcttctctgctcataatatttccatgcttctcaacagttcaccattgtactttcatggtactggtagaaaataggtattaagaagcagtggtagatttccaggttcaccatctggtctgcagcaatgagaaatatggagtcctgaggtgttcatctggtaatctagtgttctgatgtccaactctctaagataacgacacatggatattttttttttactcagtatacttgagaccagataattgagagattattagcaaaaaggtagggctccagaaagattacagttttcaaaaatgtgctttgtacttttcaaccaccactgtagcatttagacactatcattcttaactggagcagccagagggttaatggtttgtacatctttcttctctctcactctgtaatactagtttagatcttgacagcaaagattgccagagtagagtgcagcacacatagttactttaaaatagtttactaaactgattccttccttttccctagtgatttggggggataggggctgggtgtaaattcattaaagaagttgtggcattagaaaatcacaaccaaaaaaaaaaaataggaaaaaaatatcacaacagcctggcctggcacagtggcacacacctaccattttgggaggccaa

SEQ ID NO: 137401 - DNA, 1045 bp, Homo sapiens
ccctcattgagggcttcttaggcctgaactgtttggttaatgtggtctgtcaggagttacaacatgtctcggtaacctctatgagttgagtctgtgttacagaattggaaatacctaaacttgtgcccgttacaccaaagattctgatgaggcccagaataggtaaaaagtgctcctttttgtggcaagacttgataaaacagctagactttctagttgaatttgaggtgccctgggcactaaatgtccatagtacataggtcagcttgtatgggtagaagggaacaggatcgctgaataaaatgtataaccctgctgagcaggagttgtaacacagaagaatcagtagcccaagaggttggaagttggagtttctagggggcaaacttatatcagggtggacattctcaacaggggggcatcattgtatgtactatcagttggtggcagaggctgggaaagacatgaaatccttaagggggaagtttaatatggaagcacccagtgaggtcacgatgtcctgcttataatttcacactcaaacccactaaatattctgactccttctccctcacgtgtccgacctctggctcttctatgccacttttagccacctgtatttcatttgtagtatcccatttaacttccccaactcccctctcttctttctcacctcctgccttacccctcatgttatctgttcgggtctgtttgtagcctatgctaatgtcatcatgcttatgattgaccacttaaccagagagtgtagcaagttgtcaatatgagtattgaaatcctccaagggagcaagatatagttgtatgagtagttgcctgggctagggtatctgttagtattgctggaggtttagtatgtaggtggcattctctgttactaatacatagatacaatctatcaggttgagtgaggggaagcaggaaatataggtagtgactggaatagtgaaattagagtgtaaatagtgaaagtggagtgtgggctgtcaaagagttgatggggcagtggagttatgatgagttatgtg

SEQ ID NO: 137402 - DNA, 1842 bp, Homo sapiens
ggattgttaatttacacacacacacacacacacacacacacacacacacgtgtatgtatgtacgtattaatacatgcaactagtgatatattttcattttggggttcagtattcctgatcttcatttttatattcatttcacattaatggaagaaattttctcaaacaaaatttttctttttgtggtaccttttattctagtaagtttctttatcataacttgtactttagttgcagatgtggctatggaaagcagtccaggctcatccatctctatggagcacaggctggatgttgaattaagggcatcaggttccagcagcagcactaacatctcttctggccccagccctggtcccagtcccggcaccggccccggccccggccccggccccggccccggccctggccccggccccggccccggtcctggtcccggccctggccccggccctggccctggcccccgtcctggtgcgtacacacatagatgtgcagtctttcagagtggtagagttattaaactattgaagaaggcggctttaggcagaacttaaatggtacatttggaggttagcatcccatgactattcatgctccttcaccattctggtgttccattttcttatattaacatgtctttcatagcattttatacttttccaacaatttgcacattgattatcaaaacagccatgttggagggcagataatatccaaaatgggaactgagtgaggtaaaaaaaaagttgaacctttttactttgtaatttttcttttttactttagacttttagtattggtaaaattaaaagtattagtaatttttccaatttcaaagcttaattaagtattcttcctaacattcagagacctcacttcgaatgtcttctaattttattatagtgtatttggatctcttaaaattttgttttatgtgcttgatcattgtggtttaatggcgaactcagcataattcttttgtctttcttcattgccaggagtccagtgtattccacaacgagcagcacttctgaaatccatgttgaatttcctcaagaaggccatccaagaccctgctttctcagatggcatacgacatggtatttgattccagataactttttttggaggatattttactctctcaaagattggttcttttcatactattctggcacctgttgttttacaaggcagtctttggtaaaggccatgccattttcaatagcttttagttgttttgtgtcacttttcctagatgtaagtgttgcttagctattttcataatgatttaccctttttttccccttttccagctttcgactctgtgcttaattccgtcttattacccctttctgactcttaagtgtttgtgttctttctttttttaacccatgttagaaagcctattgcatggacaaataataaaataggaggagacaactgggggccattagattagaattaacacaggctttgaggaccacagtgtgataatacataacatatcactcaattatccccactcctcacacctttccagactattcgtattctccataatgttcacttttcttttagtgatggatggttctctgcctacctccctgaaacacatcatcagcaatgcagaatactatggcccatcactcttcctcctaggtaagtggagttgatagttggttataacaatttgggataacctggcagagctctctctctctgtatttacttacttacttatttacttatttatttttgagacagagtctcactctattgcccaggctggaatgtagtggcgcaatcttggctcactacaacctctgcctcccgggt

SEQ ID NO: 137403 - DNA, 1385 bp, Homo sapiens
caagtttaaacacgaaattcattgatgtttcgtatacacattatatacgtagtcttaaggcaattgtatacaatatttcaaataattttgtgcattttaactgtgacctgtcacatgagatcaggtgtggaattttccacttctggcatgcaggtattcccaaagttttggatttgggaatatttcagatttttgaatcagggatcctgcattaatgttctctgtatatcaggcttatacttgtttgccttttggtttttcccagagggttagaaagaactcccagtacttccctctttgggtattaaactgcaaaactaacaaatactagattttcattgttgctctcaacagacctccatcccctcaagcagttaccagtagaatgacttatattttaaagtttggatattagcaactggaacttggttcagtcatcttattatatttgacacattatgtgtttaccttctaatttaataggagattaaagcagcttctttacgaacattaacatcaattgtccacttggagagaactcccaaactcagcagtattattgactgtactggaactgcctcctaccatggatttttgccagtgcttgtaaggaactgtatccaggccatgattggtaagttttgatggtgattatcttaggcaagaagaaacatttgccctctgcctttgtctttttaatatcctgcctgcttaacagcaattttgagcttgtttttgttctccctctccccacctcccttgtagatccttccatggatccataccctcaccagtttgccactgctctcttctcttttttataccatctggccagctacgatgctggtggtgaagccttggtctcctgtggaatgatggaagccttattgaaggtgctgtactttttttttttttttttttaaactacatggggaaatcaactaagggtgtagagatgcaagtttggggtgtttcacagtgagggcaaataatataagaaagcttatccagaaaaagttatacttaagtagaaggccagtttggctttctagttatctaattaacaatgtttaagagcagctacttccattattgagacttttatcatagtgtagaatggtcaggaggtcatgggttctggttaaaacattgccacatgttatcatgcctttacacaaccatagggaaaatatatgtcagggtactttgtaagttgtgttgtagtagtaatagcctttactatgtgcagggcaatgagcaccagcttttttctccctaaatatcttacttaatcctgcaaagtaattgatgtccccattacctcagaggttgagtcgcagaagtcatagaactgtcatttggcaggcaccaaaaataaaacacat

SEQ ID NO: 137404 - DNA, 2067 bp, Homo sapiens
tcagaaggctgatgataggtacaaggtttttcgtaggaatgttcttttccattctttagctggtttctgggccctggtatttgttctccatcctttcttggattcttattcattactgcttggcagtcttgcccctcttttcccccttgggaatagccacagtcaaaattgatctcttaaagggaaactggaaatttataagtatgaaatgcagaaggtttgggagctctgggctctgtccttttgattctgtttgaaaagtctcatcctatctgagctctgctctaagacaaacagttaaaggcactgtaggtactgaatgtactgcttattcttctgccacaataagttgaacaagtggctaggactttgagggaagatgtgggggataatgtttataatcagttgaaactcaatgtctgattctttgatgtgctttatacacagaaatatccacccagtgcaactacactacactttgaattctatgcagatcctggggccgaggtcaaaattgagaaaagggtgagtctgattcagatttgttctgacaaagtctacaatttactgtaactgggattgcctcttctagaactcctcagttaaatgaataaatggttttgagctacactgctgccctcgcaaactataaatatacctagcagctcctcaggagtgttaattgcatccccaactctgatagggttgggtcttatgttgggagctgccaaaagatgcaagtcccatccattatgaggcactgctatgacctatgtgcttttcccacagtctctgagaattccaacatgtagtatagtagtttggatggtgatggctcaggtttctctaattaggaagcctgcaaaagtctttatgtattgtggatagtgtcctgcttaaattatctggtcattttgtattgtttgaggaggtactaaagagtttggtttagaagtagcttagtgaaaatacaatttctcttctacctatactattcaataaataaataatctttctagcttaattgccttgaaagcaactctaatacatattcagagagaaaatattttcatgaatttggtctttgctattaatactgctatggatattaagtcagtggagggttaaaaaaggacaaagaagaatatgaaatgtgcctggctatgtgcattatagtttgatactactggttttaaaggagctttcctaagaatattctacatataagatggatgttttggaagattctcaatttaccttgattttaagagcattcacttaggcttcagcctattaggtgacatcttggttttcagacagccctttggagctctatggaaggggaagctagagtgttcagtgactccttacagctctcttgtcttttttaattttagacaactagtaacacactacattatattcacatagagcaacttgacaaggtaagaggaatctttgactcttggctcgtttcttaatgtttggttcactttttgttcctaactatatctttttttttaatgtagatttcagaaagcccttctgaaatcatggaatctcttaccaaaatgtacagcattcctaaggataagcaggtatgatgtggctttaaaacatccacaggatgtggttgttatctaaatagattaatgatatgtactggggtgggagattgcatagcagaaagaatgtcagctttggagtcagaccatgggcaaattgttagcttctctgagccttagtttccttgtcttttatgaggttaacacttaataacttcctaggccttatgagagtttgaggaaaacataaactacctcaccgtgagcaggtaataagtggtggtagctttctgaacacttcggatatcaaaggagaaaacgtttagttgtgttgttttttgagttagccctcataaagaatattcacctttttcattgatgtttttaaaatgtatgtcttatctctctacagatgctgttatttacacacatacgactggcccatggcttttctaatcacaggaagcgattgcaggcagttcaggccagactgcatgcaata

SEQ ID NO: 137405 - DNA, 1186 bp, Homo sapiens
tagaatctgctttgtaactcagctcatgtcaaaaagagaggaactggaaagcatgatttcctccctagtgctttcctccctagtgcggaaggtgagtaggcagagcctcaggcaaggcctgataggacaggagggacctgtcagcacacgtgactacaggggtatggaatataatggctggcagttgctgcttgagttcttcctaggagcatcctcactgaacagtgaaattgatctcattgaagaaatcacctttaggcagaccatcttgccttgattcttaagttcttatttctgttcgttttttcctcttgtttgactttcacattggatgtcttctcaacattatgttccaagcagccacacactcttaaatatatatatgtatgtgtatatacatagagagaaagagagataaggtctcactctgttgcctaggctggagtgcagtggcgcaaagtcaccataagcactgtcttaacactatctttttcctttttcaagagctggggtggaaaggagaatggctttggacttgcagaatgttgcagagacttgcatatgatggtaagtaactctttgggatatgggtgtcttttgacagagctgtggcctctctgtgaaccttactttacaatgaattgtggtatatgaagtgacgccttcacatcgagacctttgaggaacctaagatcagttcagacatagctgaaccacgtctataggaagcagtctagcagtgcttgggctcttgatgtgctggtggtagataaaaaaatctgagaaatagagtgtgtgttcatacccagttcttgagtaggtagctgtatttgttgaattaattttaatgtgattttttttaaatcccagaaagtatgttcgcttgcattctcacactggaactattgtatcagaactctggacagtgtggtgtgatttaggaatggctgcttggagagcagttctaccattaggtttattgagaacttataatgttttatgtgctttccttgtttatctctctgcctttcacccatgtttaagttatgagctcaggccatcctcctttctgctttgatatgttgctgtggagctacaaaacacaatttgattttcaataattattttgcatctggaagcaactatattttccacgtgggatttgtcttgtcagtttgtcgtgttt

SEQ ID NO: 137406 - DNA, 1621 bp, Homo sapiens
aaaaagtaccctagaatcttaacatttaatatgttgattttgttggcagcgaaacaaacttgtcttcctgataaaaataggtgcttggtgttttatgtatgcaacaaaatttatcataattgtgtatctactcattttggtatattttcttagtctttatctgatgaatatttcttcacaagaaacatttctttatatttcatataatgttactagttcataaatataacaacagcacagactttcgtgagtcacgtttgagttggcagggttttttaaggatctcagcttaccaaaactttctaattaaaggtgcttgttttttatcaagttgcaaaagttggcaagaaggattttgtggtgacactaataaaagtattctgaaacaattagttggaataacagaagaaacaaaaggaaaataattgtgtagatacacagcctttcaagcttattctgccttgcagattcagacttttggtttgacttacctgtctgttctctgtagcatcaagcctttataccctcatccttactttatggttttcagcaaattgcatgtgtcttcgtcttcactagatgtcctgggaagagccaagaaaatattgaaaatgtaatgaagtacttattaggtattaaaccattttataaagctatagtaatttaaatagtgtggtaattaagagtggaattgaccaatcagtaggttccagaagcagatccaatgtgtaagaatcgaatttatggttaagatggcatttcagattagcagaaaaagaatggattattcaaataagatggtgttgtaaaaactggcttactctttgggaggcaattaaggtagattctacctcatcaaagtaaaattaagatgtaataaaaagctgaaatgttaaaaacatgaagttatacaagcattgaaagaaagtataactgcatggttgtatgctgcttgaagtggcaagatattttcaagaatgagactaatgccatgaaagaagaaattgattccattacagtatgattttataccttctgtctgtgaatattttaggtactgtcaattgtgccatctatggttatctcaatttacttcacagttttcttcttacttaggtaatttccagtatttttctgtggtaaataatgctacagtgaatatctttaatacgtgactatttggccatatttagcaccaggtgtttgttaccttttttggggtctcactctgttgcccaggctggagtgcagtggtgcaatttcagctcactgcaacctctgcctcccgggttcaggccatcctcccacctcagcctccctagtagctgggaccacaggcatgcaccacatgcctggctaattttgtatttttagtagagacggggtttcaccatgttgggcaagctggtgtcgaactcctgacctcaggtgatctgcccgcctcgggctcccactggctgagtgctgggattacaggcatgagccaccgcacctggccgtctgttaaacatcttaatgaatgtcgaaccttgtattttacagattcttgtctcattgccttaaacttccctagttgttttaaacttctgattattttttagagttctgatagacttgaatt

SEQ ID NO: 137407 - DNA, 2000 bp, Homo sapiens
tgcgtgcctgtagtcctagctactcgggagacttcggtgagaggattgcttgaacccaggaggtcaaggctgcagggagctatgatcatgcctttgcactccagcctgggcaacagagagaccccgtctccaaacagcaacaacaacaaaatccagagtagtcactcaggttccttatgagcatatactgtactgtaacacttatatgttatataattgccacgagctgttatcgatatctttagcttctatatgaaggaccctgttttaattaatttcaattttatgtttgtcataaaggatacagaagagaacataaaatatctttctttcacaatacttttagtccagttagagacttaatgttcttcttgagtcccacatgtgtatttgtctcttttccttcctgtgggaaaacctgcgcaattttgaaccactatttacgttttttacttttattgcactttatagctaactgccagattttaagctccttggggataaggttgcatgttgtagattatcaaatacatatatatatatatatatatatatatatattttttttttttttttttctttttttgagacagagtctccctctgttgcccaggctggagtgcagtggcgtgatctcggctcactgcaagctccgcctcccgggttcacaccattctcctgcctcagcctcccgagtacaaatacttatatattttttgtattgttgtgactaaacttcttgatagctttgtaaatgttgacaagtacattttgttttgttttcaaggccagttgtgcctgataccttgagctttgcccttttttgtccctttagcatttgacaactttattggcttcctctgatatgcaagtggtgctggcagtcctcaatctcctatatgtatttagcaaaagatcaaactacatcactcgtctgggatctgacaagaggaccccgctgctaactcggctacaacatttggcagaggtgagtcttgggtgaagagttggaggggtgcaaaaattggagcatatggttcctttcaacaggtgtttcttggagtgttaaaatatattagaatccctaagttaacttcactggcctaattgagttagaactattggtgccctgttttaaaacctaagtattctcagttattaagtaattttgaaggaattctttaatctctgctcaccaaacaaaatctctctgttcaaaagtggcaatttcacttctgaaaggaaagttcaaaattagattcaattctgtgtgagaaggaagtataatgcaataataagatctagatttgagtcctggccctgcttactagcgccgacactggtttcctcttctgggaatttaacatatctacttcagggttgatttagaatgaaatgaattgtggggtactcagtgctgtgatcagtaagtcgtagtgattgtaattgaagccagaagctctcatataaaagttcagctctaccaaactattgtccagtgttcccagaggcaacttcttaatacatacttagctttgagaggtaacccactgttggaaagctttcttagaagaaaagtgttatggctggctttttaaaagcatatttaatgcttacctcaaagtaattcaagttttcaggctaattcaggtgccatgattacttataaattagttttgtataattataaatataacatgtattctgaaaattctaggaaaatgtagacaaaatgtcaatcacctataattcatccctatgagacctcccttaaagttggagcatttttttcttgcatttggaaacacatgtatacatgcatgtgacctgttttcttaagatactgtaaatatttcctcttactattaaaaaccacaaggaggtttaacattggattcccaagtccacagttaaaaggaaaaaggaactattactcaatagatgcttccaaagcactcgataaaatttatctcattaacaaaagcttcatataaacttta

SEQ ID NO: 137408 - DNA, 2538 bp, Homo sapiens
gttagtttattttgcagaagaggatgctgagattcaaagaggtagcttaccaactacctgattccaagggtcatactctttttaatagtatgctgtctctgaatatttaagctcctgtaatgggagataagtattttatgtatgtggcagacgtttgagtttcatatttgtgaggtagctattaggtctgtttttctgataagagagctgtggcttagaggttagacttgctcatgatcaaacagcttagtaaacatgaagttaaaaagtgaatccagacttgtttggttccagacctctggtccattcccaggatgctgtactgcctttatggagttaaagaacaagtgtaataatcacttctcccagctgccattcattaacggaaggcttctctctcccagcccctatccctttccctccttccactttcagaaacttgactataaatgctcaatccactccttgttacctgacaaatggacccattcatcagtagaagagagcagaaatgtatggaaataggaaccccaagaaagaatggagtcctagttttacgaagttcggaagctgtttaccatcttacaagtgaaggattttatgtaacagaaaaatatagctagtgctaatcttcacctttaattgtgaattcactaggacttttcagtctctgattcaatataacctaccaggcattctggttaactttcagaccatggtatagattccttaattgtttttttttttttttttagatgtttaacttattattgtttttgttgtcagcacctttccaaatagtttgtctgcatctacctttatccaaatccaaggtgggtttttgttttgttttttgtttttttttgtttttttttgttttttaagcccaggtggattgttgggggaataaaagcattttctcatgaggtttccattttaatcccaagagattgtctggcacatctcgttttcttaagtagtaaatcctagcaaaaggaaaattgctgtgtgagcttaagggttccttttctgattctccttatttgcaactccctcattccaaaacatcttttgtgaatacttttcttttctcagcctgcagactgcagagccttaatagacaaactcaaagtttgtaatgatgagcaacttctcttggaactgcagcagatcaaaacatggaacattggaaaggtatgtgaagtcaagctcccaaaagacaggactcaccatactaatacatcattttgtatgctctgatatggaataagaaaccacaatgggatagcctcattcagcaattaataagcatctagcatgtgccatgtgcctaacacagctttaaaccagtggcaaggaaaattttgctggctgaggatggagaattgatttcacaggtgatgcttaagaatctcaatcacagaattcctgtggtttgacaatataagtttgagataatttctggatttttagtttagaagaatttttattagataactctaaaaatgaatttttctgataaaatggattctggcaaggatagttctcttgtcttcgtagatcttagaatgtaaccggagttctccatctaaagacctagctctaggggttttatggtgtctattggtgttagcacatatatctagatgggtatgacaatgaactacagcacttttagctcagagtatgatctttctcatatgggcaagggtgggacgtgaacttgtctaggtgtcatgctcagcaatctcttgtaacaaagctcagttagaaagcacccatgcggcgcttctaccttattcttacatcctctttttcctcccctctccagtgcgagttatatcactgggtggacctgttggaccgcttcgatggaatactggcagatgctggacagacagtggagaatatgtcatggatgctcgtatgtgataggccagaaagagagcaactgaaaatgcttctcttggctgtgttgaacttcacagccttgctcattgagtacagcttttcccggcatctgtacagttccatagaggtaggggaggttaaagcctgtgtaccctgttcttgactagaattgtgtacatccagaaataaggaaattgctatttctattgcttctttccttttcattgtggagctctgggtttttcattgtcaaagataatagtagaatgtttcttggatatagatactatccttcatagggttgatgggaagattctgtactatcacctttgctttgccttttcaagattcaagaaatgaatgagaaatgttatatatgtattaaagtatttaaggaaatttgcatgaattgatttttgccctaggttgttagagcagccccacattacttttaaattcctagaaatagtttgattttctcatcacattaatgtacttactactcctctaagtgttagtgtgctgctttaaagtctctctgtactctgccacacccatcccaaaatatatattcatagcatcctttgtgtccttgaagagtaaggtaggtgcagcaatcagtgagct

SEQ ID NO: 137409 - DNA, 1775 bp, Homo sapiens
acatttgcagatggaaccaactggatagtaaatatttgggggaaaaaacaataaaaaagaacaatacaaaagtaaaaatagaaattttgaagcaatgcagtgtaacagctatttacatcgaattcagtattgtaatactagagatggtttaaagtatataggaggatgtgtataggttatatacaaataccattgccattttatacaaaggatgagcagcatagattttggtattcatgggggtcctagaatcaatccccagtggatacagagggactactctacttaaaaatttgttacgagggtagatctcacgttaagtattcttaccacacacaatcatgcacacacacgtagggacacaaggaaacttggaggtgatggatatgtttattacctggattgtggtgatggcaacgtgagtgtatacatacatccaaactcacccagttgtatgcatgaattacgtgcagtttttttgtataccatttaccccttaataagctcaggtggggtgggggagggggaagacacatgacaagctggggaaaatatttgtaacccagtgtagttaatattttcagtagctaaatcaggagaaatgaatatcccaatgacaaaatgggcatagggcatttaagaaaagaacaaacccagtaaacgtccagcaagattcaacttagcgggtaattggagaaatgcaaattaaaaaacaatttttaacctagtggattgtaaggggttgctcttggagtcatatactgatttctggctcttatttcctagttactagcaagttacttagcataaactcctagaagtggaatttttatgtcactggttatggacatttttaagacttgagttgtctattttccttgagcagcatacatgattgcccccatttcccatactgtggtcaatgctaggtactattatgaaaggcttttattgatcactttgtgtatcagtagctgtgcaaaggattttttccccagatttggtatctattgaaataaatcactgtaaaccctggcaattgttattgagctatcgaactggcaaatgctttcttatatcttaacgttgtgcttgctgctttctcctgcaaaatgcaagggaccttgatagtctgataaaacagagaccatagtactggtacattaaattgatgccattatgctaactggatcttgtgagcagaaaacacaagcacaccttagatgcctcagacatatttgtgccagagagtcagaaacaaaccttgtggaagcttgagggccttttcacattaggaaagtttctagtggccccagggtttgggaaatattgggatatcccttctaaagtgagagggaagttgctgtaccttgtaccacacactgtgaagaaagaggaacaatgtgtgatgcgtttggattttggagccaacatattggttggtcacatttaggcatgctattttgacctatttactggataacctctaacacatttagtggggaaccactaaagtgttagtaaggtttggatctagaaaagactctgcaaaaggtccaggctatgatacaagttgccctatcacttggacattatgacctagtagacccaggtgactgacttaggtgtcagctaaagatgccatgttgtgcttttggcaagccccaatagaattacaagtaagacccctagattcttggctgtgctgtcctctgccaccagctattctacattcacaaaagcagcttctggcttgctactgggccttggtaaag

SEQ ID NO: 137410 - DNA, 1391 bp, Homo sapiens
ttttagccttgtgatggaacagtaggtctttttcagtcttttactattatacatggtcatgcagtatggattcttgtggttaaatatttgtgtacatctttacgactttctttggattaattcctagaaatggaagttatcaggaaactgcagggctatggtgaatttttccatcctgagatgtgttgcaaacattgtacactcttattttcaattaagagtttgagatgcttgtaaaagagaaaaaattttcattttgacctgatttggtttcagtcttgtgcaacatagggatgtgggccagtttgatctggagagattctttacctctctctacctgatagctgtgcctctgagttggcatagcatcataactccagtgtttttactttaagcattttgcattgctcttcattctgtattgtctgtgtccaagcttgtagagctcaagattgtagctttaagttctcacttcttttgggattttcttttttcagatcgtaaagctgaaaattgaaatcatgaaagtagacaggactaaactgaagaagacacctactgaggctgtaagtatccaaaagtttactttgcttattttttcttcattaaaaaataaaaaaatatttgtgaacagttcatccatgctcttcaaatctcatcacccatatatacaaaaggcagtaaaacaacaacttgtctagaaacagtaagattttcttttgaacttccctggatcaaaaaaatggatagccaagagaccagtggaaagtgaacaccgatcagttagttcttcgtagctgtgtgtgcctgaagtcagctctcaggctgctgtgcaattccttcctatgcagaaaggatgtgtggtataatggaaagagcagatatgggttcagatttttaatgtacttctgggatcttgcaattttgttttttagaaaatgaaagtggtaacatctttcttactagtttttttgttaaggccagtgttttagcttgtctttattactgattcttaatcacacaattcagcttaacttgtgtattgggtggtcatatcaattaaccctttgtcgacagtagaaatcccagctttaatctagtaatattccaccagctagcttgaactgctttctaaggttgaggaagtggtattgcattgtgatagtcctgttgaccccttgtgcttagttcagagagcacaagctttgaaattagacctaggtttgaatcttaccagacttttgtggctgagaggttattaacttgcctggtttccacagctgcaaaatggggctgaaaattttttccttcttgatgtgaggcaattgcttagcatagtatctggcacataagttagttcatatcgtaaatacaagccacttggttttcaa

SEQ ID NO: 137411 - DNA, 1466 bp, Homo sapiens
ggtgtgagccactgcgcctgcctggcctttgtttttttaagatggagtctcgctctgttgcccaggctggagtgcagtgagccactgcgcccatcctctgggaggcttttaaaatagatttcttgggttttctatgtggatgatcctttgacatctgcaaatagggaccatttttattttttcttttcttatctgtgtgcctgttatttctttttcttactgtattatattggctagaactttcagcagtatgttgaataaaagtcatgataacagacatctttgccttgttcctaatcttagagggaaagcatcagttatttgagttgtattgaggctggctgctacgtcttgcagcaggggcagtttaatagcctccctgcaaatgactgaagcgacaatagtgtgacagccacttgcgtaagacgtttatgagaaaaggggaggaaaaaagccttgagagtaagcgtacaaatagctcagcttatagtttccaccacatggacaggattgttgccagaatcctgttggcttcatttgagatattttgaggttgttggcatcaggcattttgttcattttgtattgatactgagataactttttaaaaagtaatctggaattacacaccctaaatatcaaccatagaaaacattttttcttcttaaggaatggtctctgcagaaatgttttagaacgtattctgaatttttcacaaactcttccttgaatgcctgctgattgaatggatacaggtcgtacaggcaaatacacgctatttccatagtactgagtatattggactaaatctaggcaaaaagctgcctaaaatttatactgtaattggtcagctttatattatggcagccttctcgggggaggaacattgatttctagtgactgccactgagttaaatacattgttaatagcagaatcttttgtgtgtaaagagcctgcaacccacttctacctctgtgcatgtgtcttagttgctaacaggagaaacttatttcttcttgtgctttggaggacttgtctgccatcaaagatctagggattatacagtggatctgatcaggctgttgtctgcttttgagccttccaaattacatggcttaataaaatgattgttttctgtgctcagaatatttctgttgtgatccttatacttcattttctagttgaaaaaagtgttgttttgcctttgctcttatgatacaactaatacatttttattggtaggaacagtaaaaggtgcataggtaaaacagtcatacttaatccttttggttaacaatgaattaatattctgatgcctagcacctctaagctgttttctttagacataagttttataccgtatgttctgtgttgtaatctttttatttcatcatgaacatctttgtgtattacatagtttgcaatatttttaacagttgtgtgacattccattttaaaccagtcg

SEQ ID NO: 137412 - DNA, 3463 bp, Homo sapiens
attgaaagtcattatttttaaatattatcaactggaggtgattactatagaatatgagtcacgctttgagtggcttccctcaggatattttagttgtgtacacttgttctgcaggtaaactgtacaaaaccaagattcaaacctcaggggtgtaaggaaaggttgggggaataaggaagtgaaaaaaaatattagataaaagtattgaagtaatggtaatagatatggatggtgattcatagtaattcacttgttttcttttaagttggctatctttctaacctaagtttaggaagcaatgtttattatatatagagattgcttggtgccctgagttctggttctgacccaacaaaggcagtaggccatttctaggaatttgtttcaaactaacttatttttatggaaggatttttttttaaatgtaatagggttttcacctgattaacttctaagaggtagaactcattccccagttactgttcctttcattagtgaaattacagcatctcagcttctcatcttgggccctagtttcctctcttggagtaattttttcaaacaaataggattcagcagtctagaagaatctgtcacaaatttttattcttatctgccaatattttgtagtaataaaactggttttaaaaaaaggtgaggctgggtgccgtggctcacgcctgtaatcccagcactttgggaagccgaggcgggcggatcacaacgtcaggagatcgagaccatcctggctaacacagtgaaactctgtctctactaaaaatacaaaaaattagctgggtgtggtggcgggcgcctgtagtcccagctactcgggaggctgaggcaggagaatggcgtgaacccgggaggcggagcttgcagtgagccgagattgcgccactgcactccagcctgggcgacagagcaagactccatctcaaaaaaaaaaaaaaaaaagtgaatcgcatgttattaaagcatggacttggtagtcagacctggatttagatcttggtgctaacatttactgaccaagaaaggtactttttttctctcttacttcagttttctatctgtaaatagaggcaaaacttgacttgagtggtgaggactgtatgaaaaaatatcatatgaattccctaggtagcatgtctcaaactgtattctttggaatacttcaattggactttgagtagatgccacttgagaaaatggttctgtgcgctaataagcctcctttacctaagatgtcttagagccattaataatgtcaattagctatgtgactgccctagtggaagagaaattctgtctataacatttcccaaattacaggattcttgtctccctttatagagcaagacattctaacacactttggggaactccagtctcagtattgtctggcttgtaatggacactcagtatactaacgttcccccctcccactgttgaaaccagttttagaaatatgagaacacaacaacttctaaatttttaaagttgatgtctcatggacagtgatgtcttggttttttaaactacaaatgtttcttgcagtagaattatagacaccaaggtaggactgcacttgttatgggaacatttgtgtgtgtgcattcatattggctctgttattttattgggtgcatcaaatgcttacacttgggacttagagtctagcgccactcatgcaaataacctgagatgatttagaattatgccaccagcatagtttctaggcatccagagtcttgtgttggcagcagaagtaccccaagctaagctgtttccgtggggggtctggctgtagttccaggctccctagcttccttggttcctcttagttttctgcacgtggagctctagccttctgtcagttctgtgagctatcagatactctccagtaaattacttggctgcattaattatccagtctttctgtagttacagacacttgactagtatagtacactaggtcaaaacagcattagagcaagttgcttatttgtttgaagattcatcagtgactcatctgcattaaaaaagtaaaatggttgtgatttgcttatttcagtgcataagttactctgtgctcttgttttggaggattgtttttttaaaatagactttatttttagagtagttttacattcccagcaaaatcgagcagaaggtacagaaatttcccatatactgcctgcctccacacaggcatagcctcccttgttatcaacatctcccactagagtggtacacttgttacaattgattaatctacattgatacatcattatcactcaaaggccatagttaacattagggtttactcatggtgtatacttttggggtttagacacataataacatgtgtccaccattgtagtatcatacagagtagtttcactggccaaaaaatcctctgcgctccacctcttcattcttccctccccactaaccctcctcaaccactgatctttttactgtctctatagttttttcttttctagaatgtcatgtggttggaatcatacagtatgtagcctttttgtactgatttctttcacttactaatatgcatttaggtttcctccatgtttgttcatggcttgatagctcgtttctttttagtactgaataatactccattgtctggatgtaccacagtttatccattcacctaccaaaggacattgtggtttcttccaagttttgacaatagtgaatgaaggtactataaacatccatgtgcaggtttttgtgtggacataagttttcaactcctttgggtaaataccagggagtattgattgctgggtcatgtggtaagagtagttttgtaagaaattgctgaactgacttccaaagtggctgtactattttgcattcccaccagcaatgaatgaatgttccacttgctccacatcctcacaagcatttggtgttgtcagtgttctgggttttggccgtagtgatatatcatcatggttttaatttgcatttccatgatgccgtatgatgtggagtatcttttcatatgtttatttgccatctgtctgtctgtggtgaggtgtatgttaaggtctttggcccattggcccatttttaaatcagcttgttttcttactgttgagttttaagagttctttgtgtatcttgggtaacagtcctttgtatgtcttttgcaaatattttctgtcagtctggcttgtccacttattcttttgacagtgtcttttacagagcagaatattttacatttaggtctgtgatccattttgacttaatttttgtgaaacatgtaatttcggtttagattttttttttcgcatgtatgtatcgagttgttccagcaccatttgttgaaaaaactatcttttgtccattatattgactttgcttctttgtcaaagatcatcggttgacaatatttatgtgggtctacttctgggctccctaattc

SEQ ID NO: 137413 - DNA, 1070 bp, Homo sapiens
ctaacgcctgtaatctcagcactttgggaggctgaggccaggaggattgttttaactcaggacttcgagaccaccctggacaacatggcgaaaaccctgtctgtacaagaaatataaaaattagccaggcgtggtagagtgtgcctgtggtcccagctactctggaggctgaggtgagaggattgcttgagcctgggaggttgaggctgcagtgagccaagatcatgccgctgcactccagcctaggtgacagaatgagaccctgtttctttaaaaaaacaaattacaaaaggaaatctgattataaatggatccatgatttataggaaatttggaaggattagaaaagcatgaagcataaataaaactatgtgttaccctgccagctagaggcaaccattaaaggccaactactaataatgtgtatttcttcccttcccaggtttttttttttttttaactttcccaccctgtggcagacattttctcataaatagggaagtgataggtacagagtacaatgtaatcacatatggtgggatatccagtcaagatttgaggggttcgggagaagattgtccaaattctggatatcattctgttcaaacctgcataagtgcttattatattacagtgaaatagaggctaaatggtcccctacccccaattttcaaagggattcttacagttactccgtcttttcaagacagtttgcagccacttgagaacataagctagtgtctttatttaccttttcctctacatttcagtgaccccataattctctgcttccatttacagcctatatatatattttttcccccgagatggagtttcactcttgttgcccagactggagtgcaatggtgcaatctcggctcactgcaacctccgcctcccgggtttaagcgattctcctgcctcagcctccgaagtagctgggattacagacatgcgccaccacacccggctaatttttttgtatttagtagagacggggtttcaccatgttggtcaggctggtctcaaactcctgaccttgggtgatccacccgcctcggcctcccaga

SEQ ID NO: 137414 - DNA, 2391 bp, Homo sapiens
tctgtacacctggctatctgagtattcatctcaatgccctgcatatagtatgtttataattgttgaatggaaagatgaaggttaaatgaatctaaattgtttttttcagttcaccaagagtttaatgtgacttggattttttttagttttgttaagcatttactggatagttattcatttattaatctgctattaataaatgacagttcatatgctggtacaggaatgcaaagataaatatgatacagtcccactcttgcagaactcagcaagcatagtggggagactgtcaggtaagtaaagaggtgtgctgattgaggatcaatatgcaggatatagttggggctaaataaagcatgtggggagctgagggaaatattatgtaatatcatagcactggtaagagaggtaagcagggaccaggtcctagaggtcttggatgctggtttaaataaggagtttgtacttgatgtaggtaggttttgagttttagggagattgctctggcaacaatgtggaggatagaatggatggatccagcaggaaaaagtctcactttaaaataacttcaatttatgagacttttcaaaacatatacaaaaatagaaaaaagcataatgaacacccatgtaactgtcacccagcttgaacagtgatcaacacagggctattgttctatttataccccgctcctcccctctatttttattaaagcaagttcctaagtcacagaatggcaaagcatatattgaataataatctaatgccatggctctcaaggctggcctgtgctgccaaatcacctgtacagcttgaaaaaaataatccccacttcagacctactgaattagatagctttgaaatgcctgtgtggtcaggcatttttagttttcaaaataagtctcgggtgaagtaagttatttttaagataattttaaaataacttctgacaaatgaaaatactttcctgaactcattgaatgctgcctgtggcccttctgggtgaaattcacctattcgatacaggcaggcttttcttataaatttttatttattttttgtagagacggaggtctcactctgtggcccaggctggtctcgggaaaactcctggcctcaagtgatcctcccacctcaggcttatcctcccacctcaggcttccaaagtgctgggattacaggcatgcagccagaaactgacaattcttaaggtgtagactaggaatattccagagtaccaatttaaaatgtgtagacaaggagtctgttcctctcctgcttaatttgcttaacttacacttaggcattgctgtttttattttttgttgagaataccaagaagggctccttagcatgctgtcatttcctctgtattggtaaaattgataatctgcaactttggtgagccatgtttggttgcctagttcttctgatgccagtttctctaagtaattgggagtatccgggaaggataactcccagatctgcagcttccccagactgtttgaatagaggatgtggcaggagatgtgttctcagatactattctcacgttcaaagtcaacattggaggtttcagattcctctttcttagtatccctccctgcccatattttccttgcttaagcataactgcagtgcagagaaacacccagagccagcataaactcttaatctgaggtatagtgtgttttcagattttaaatgagagactccttcaaggtatttctgcaaataatttccagatttgtcttgggtgagtaaaggctatttttcagttgctttattatgacactttactgtcagtgcccagtaaaacctaggtcagcagttctcagggcacttgagagtcatgttttatgtggctaaggatagggagactggtgtctgtaggagaggggcgtagcaaggtgggctgtgcatatagacattatgtgcaatgtagagttgtggaacagatttgggtttgaatccacgttttaccacttaataggtatgtggccactctcagtaaactgggcacagtcttcatctccaaggattaaagataatgcacaataggtatagagtaagtgttagctatttttttatgatcataaatgtttttcacaatatttgttgagtggatattaatgtattaatagataatcagaaactagataggatggaaaggcctgacaattatgtggtgtcccctttaacaaatcataatcagtgacacctattcctctataatcaaatagtgaatagcaggctggatttcaagatgcatcttactgcttgttgacatgaagaatgctcagggcagctctcacctgaatttactttcagagactataaggcaaaaggaaatcgttgcaaggcaaaaaataaagtattttgctttgtggt

SEQ ID NO: 137415 - DNA, 1318 bp, Homo sapiens
ccttgcatttttcactgtgatatgtttagtatatgatccatcatgatttacaatattgtagcacatcaggataagccttgataaatcagaagagtataaatctggatatagccagtatcgttgtagatggctcactgcatatatacacgtatatacatatacgtacgtacacgtatatacatagacatatacatatctgctgccatatttttccaggggctagtttgactcttctactttggagggctttgcagtttgttaacccaatctggagtccaggccccggcttcttacatttctttaaatatcttggtgagaccagccttaaaaggaagtatagtctggagagatgcagacatcactagaagatatccttttacgtagagaattttagatttttgcttttaaaaagtaaagacaggctgcttttatgggtgaattcagatctctccctctagcaaattaccaacagctttaaaagggtagtcttcatgtccaacagaaaagctggatgataccctatatttcctattatccatatcaaactccttattttataggcccagttgtaggagtaataacatatccatggtaacatggctggatagtggtgaaattgagcatcaaacccaggttacctagtccagtattgttttcactatgttttatctctccttaaaactgaactttatttctaaatgtgccatctggtgtcatctgtagaaatacaaagtaagtggtcctcttcctatgagaaagttactccccaaataggggaattttaaagtagaaagtcaacgtgagaaaggcaaaaatccaaagaaagctcagtttctttgcccttttaaccgtagttactactttctgacatgagatcaacttggagctctttcatggaacagttcgatttggccatgtgttttcatgcatttatggatgctataaatcagtagatgagactgaatttcctgcttgtaaaactttttcaaattaaagggctgctttctaagtccatcttattttcccttccttttttcaactgttttaaactataacatgtttgctatttttaaaaagattgaaacaaaataatagtttacaccttttagcattatagttaagtattactgtgttaagtatatacttatgttaagtatttttatactatgttaagctttttatgctgaagtaatggtgtgaagtaggtgtgtacttttattttcatccaaatggttagccagtagctcctgtttttcttcctggcaaagtctatttgatctttaaaaatattcttagcttaaaagtgaattatttgcag

SEQ ID NO: 137416 - DNA, 2238 bp, Homo sapiens
gagttaaggtggaaaggtttgagaagccttgataatcataggaagatcatggagcccaggcagttccggatttggggcctggccacttactaggtctgtcagtttgggcaagttaacctatatcagttatgatgtggggaaataccttattcatatggttattggaattaaagagaaaatgtaaggtgttagtacatggtaggtgatcagtagatggtaatttatttaatgtactattttacttaactccttcaacagctcagaggtgggcagtcagggtggtgaaaataatggccatttaacaaaatgtgtctggaccctttaggtctgtgtgggatcatcagtggtgaggcaggatagggtttgttcttgagttattttgggtctgagactttggccagtgataactgaatgttccatagagtagtttttcactttggaactccttaggagtcacatttataccctctgaagggtcttagctagttctgtaatgtgtattacattggttaccttgatctctctccgtctatactggcccctcctattcaaggtgttcaaggttctgttgtaaccttagtaacctataataagtattcctaatagtcatcagtatcaccactgttaacacatttgggcagcaccatgcatggcaggtcagcaaacaggtaaatcttatttttttaaacattacacataatatctaaagtatagtatgtggcatgtaataagtgctgctgaataaatggaagtcattgttcagtttttagcttaatatatctttttttttcttttaacataacatttactgaatgttgctaagtataaggagtaagggacataaaatgaatgagacttggtctctgcccttgagaaactcacagtcgagttaaggactgtgaaatcatgtttaaagttccttagccttttcctttgtgtcatcatttcttcccctgcactgtctatgcatgatatagcctgtccattgtttctcacagctttcctaattctgtgtgcctccccagcctttgagactgctgatatgtgagaaagccaacaattgtcttctattaatacagggtaatatcaagaaaaacctttgggccaatattggatttcagagtggcatgtgcagttgacattacaataccagtttatggtctttagatgggcctgtacacctgggctccagcctctttcctgtgcctttaaactgccttacttccatctttcctcccctataccctacccttaatgtacttggtacataaaaatagaggctcccatacccaggtagtgatcaagtacaatgtaaagaaacagctgtacttcatataaactaggattcgagtgggcctagggtatatcactaaatttccattcttatctataaaacagtaatcggaaagcctatttcataggttgctgtgagcattaaagcgagatgatgtatttttaaatgcttgtaaagtacgaagataaggtcattataatttatataaaatacttagtagctatgttacttggggcaaattacctcatcactgagccagtttcctcatcctttaaatgaagatggtgatattcatttaacaaatatttattgaggacgtagtcattgcagctacatcctgggaatacaaagataagtgactggagaatgtaggacagtgtggtctaggggaaggagacttgcaaatcacacaaaagggtcagtatggtaatatgaggaatgaacaaaatgtgctatagcagtttacaagaaggcatcagagaatgtcacagagttttgttagggttaagcaagataaatgaaaagtacttcatgaattcaaaaatgctatacaaataagttagttaaacgtaccccaaatgaatcaatagtctcaaaccattattgtttcatttcttcacaagacttactctttagatgcatttatttctttgagctagattttatgacctccttaagggtaacctgtagtagagtatcctgaaagttaatgcttttgtctaaaaggatttttttcatccattttatcattttctagtttttaatcactgaattcaggaaaaactagaaaatgtgtgcatatttggggagaggatatacataattccaccacaatgtttagtcactgttaacattttggtgtattcacatcttaatgataagggtagtgtttaaggaataagaaaagaaatctagtaggaaattttaaggataggcatttccca

SEQ ID NO: 137417 - DNA, 7798 bp, Homo sapiens
aagcgtgagaataaacaggttgactttttaaattttcctcaagcactaggctctagacacctagatcgggggcggaggcagttttcaggacatggccgagatttggcgctgagctgtgtcatcgcgaggtttggcagccagctccgcagtgggtcggaaacctcgtggtaggcgagatccctgcaggacgggagggttcctcccttcccccgaaaaactcccagtcattttcatgaagctccgcctttctcctttttaggagtgtgcaccaggtctcgcgatatctcatgtttcctaaaggcgaggcgcgggcggcatcctgcggtgaattaagaaggtctcgccgaggctaaagcgtaatatcgcgatagttctcaacgcatgcgggagccggccgtggtaggttggctccgcccctcactgcttcgttaggttgtgcgtcatttgcttttcgcttcgcgtagggtgaagctgtagctacttcggctttggtgggagggaggaggggtctggaaagggctgggctcaggcttttcccgtccggtagaggttctcgcgggatcgcgcggaggcggcggtggctcggttactgactgcagtagccgcggaggcggcggcaaggtcttcggctcgtgccgttctaagccggagaattctcgcgggagcagggttacgtcctcgtgggattcgttggcggtggctgaggtagctcgcgggtggggggtgggggggcagtgactagggtcggtccgcctgctgttaagatggcggcggaggctgatgtctgtccggccaggacccagcacagaggtgttggctatctgcctttatgacgcctctgaggtgcccagcgttaaggaggtgacgattggcgaaacgccggggtgccggtaaactagacctgaggcgaagaccacctcgtttcttgtccgttgaggcgacaccatttcctgggcctcggccgcgtgtgggcccgcctttgccccaccgatcggtcaacgcctccgttgtcgccgccgcagtgggcggattgggaagggtgggaggggagtctggagttcgctggggagtggggttgggggttaaattgaacggtgggaaagaggagcaaccaatgaagagtggcccctttcccctaccttttctgccggccaacctccgttctcagcacctccgacgacccggatgaataccctggtttttctcgaggtggggtcatcttcgccaactctcgcggttttagagctaaggcttagggttcaagcagtagtgtcactggtgtactcctcctcctctccccacacccctcctaattctgtcgtcccatctaatcttcatctacgtggatagttgaggctggtatttaagggaggggggagtcaaagcttttccctgtgactccttccccagttctaaattcgagtttagcctaagtcctctagcccgctctgtctcccccttccattggtccccttggcgcaggcgttgaatagagcttatcctgttgcctgcatttactccatctttgtggatggtgccatagtagccttccatttccttaagtcttcatgtttgtatgactctgatccggatttcttagctctgcatgctgctaaaccactattaagcgaaactatgaacgggtcggtgtttggatattgcagtttaagtggccttttcgtttacggccattagccttgccttcctcattcctccccctcagaaggctgtagaggataactctccagtaaacccgctttctgtcttccctgcctcttccatttcccctgcaagcctgggaaccgccccttttccctgccttgctctgagtttctggagcctcttggtctgtggacatctatttttgctgctgagcacctcttacctgcttctcacttcttaatctttctatcccccactccccatactccttttccaggagctgaatcccttagaaggaagataaccctcctctcaggctccactacattttaccccttccatttactagaaaacagcattgattgtcctgccccccagtctgccctgttctttatttcctcttccccccatgccaccgttactataggcagttaattccctatcatttgtttctcctttgtagattacatgttcagcattgttttcttttagccccagtgttgcatagattgaggagataccaacattccccagtcataggcggcggtctggtatggtgaaattaatagtgtgtgttttgggtgtgttttgggttcacattgaaccttgtgaccttgggcaaattttcagattctcagttcatctatataatgggaatagttgtgcttacattagaggattgttgctagaattagttaaaataaaataaaataaaatgtttagctcatggtaggcacataataaattaggattactttttggtgtaagaatgcattggtagatgtacctgtgtcatatgctaattttatgacctgggaaagagtaagagatttttgtttctttaactgtacattcttggtgtatttctaggccagatctataacgtttatattttttttcctcataggccaaactttttatctccagtggttcatgatgtttgaacgtgattcccactctttgtttccttctaatggtctaggaatttcagtgcgtaatcactatcctggaatgaccaccagccataatgttcctgtcaagaaccacacccaagtgttctaccttttggaaggggtgcctcatgccctgcctactcatttcttccactccttcaaaggcagtctgtcctgtcattcactctacaaaagtaatttggtgtcatgcatttcacagtggtaaaaggaacttctgttagctagttttgaagtattcatgctacttttcacctccctcatttgtttggttcctcagatcagtgtggggatctgctatttggcatcttcttacctgagcaagataattcctgtccgagagagaaagatcatttggaatacccagcttcttttccatagcaaattactgctggctctttaatacactacttcctgttgtgttattgccattttatattttctaacgtacttattaaacagatgtgactatttgacttggagaaagttttccttacttttttttttttttttttaagatggagtcttgctctcgccaggctggagtgcagtggcgcgatctcggctcactgcaacctccgcctcctgggttcaagcgatttacctgcctcagcctcccgagtagctgggactacaggcgcgcgccaccatgcccagctaatttttgtatttttagtaaagacggagtttcaccacgttggccaggatggtctcgatctcctgacctcgtgatccgcccgcctcggcctcccaaagtgctgagattacaggcttccttactgttaatatattgattagaccaatattaaagtgtagcattttacaattttttttttaactaattctagcaacaaccctttaatacaagcacaactatccccattattttacttcggctgggtgatgggaattgaagtagaaacgtggtgaaaagtttactaggatttaaaatttacaggaggtaaccatcccacaattagctgtatgtggactctagtttcgaacttcagggtctgctttatttaatttgaagtgctttgtaggtaataaaattttcttccattttcattggagggcaggaaatcactttctgttttgagattttgcattggtgcattttaccgtgggttaagcagtgatcacaaatttattaaacctcaatttcaatttgacccttattgagcaatagaataaatctgggaatgataatctaggtgtgacctaaaagtttaacttattctaggtagatctctgagaagagaggaaggagtgacaataccaaataaaaactttgtctaaggttcaatggcaaagttcaacctgagttgccaggatgtttatcgtttgtctcccaatatggccaaaaagcatgtatgaaggtgaagaataatttttatatgtacagttgttgttttttttcacagaaacaatgaaacaaatacgtccttagtgtttatattgagggtataaacttgtctaaaaaataaactgtcttctataatttcatttgggttgagaactcagttttcaggaatgttgtctaagcgttagaagtattagagttgttggttctgaattcctcagttacttctcaaagcaggtcctaaaaaatgcaaatagatatgtaaggactattgctttagaaataataactagttatgtttgaacataatagaatggttaaccctcctcacacaccctaataaatgtgttgtgtatctcactcctctcccccaactttttttttgtaggtcctccagcagcctgacctgagtgggttagtgatccagagaaaccagcaggccaacttggtcaggaaggttcgggaagctgttggagcagtgtggggaatttcccaccaggatgagtatgattggctgtgattttaggttagtttttgtaaatcttgtgggaagtatttgtattttacttcctggaatggagatagtaggggtggatgtattcccattctgtaatggagctactttggtttcttccattctctggatctgatgtggtactggttgcttctttttttaaagtggagctcattactgaattaaagggaattgtttaaatgaatgatgtctgtacatgattttttaaatcaccctaggcatcgttcaaaaaataaaattgcaagtcattatgtctaaccagttcttattaaagttacgaaaaatttcaaacatgcaaacattgaatagtataataatccccccacttacccatcaccagctttaatagtatcaacttgcacattctatttcatctatacttctgtttgtttggttttttttaatttttttaaattgagatggggtttcatcgtgttgcctagactggtcacaaactcctgggctcaagccatcctcccttcttggcctcccaaagtgttgggattacaggcgtgagccaccaggcccagcctgtttcatctatacttctaaccactgcccccctcaatggattatattggaataaatccctgtcatatttatttgtaaaatacttgtttgtatttctaaaaggcaagggctctttaaatataagatcaaaactattatcacaactgaaaaaattaacagatatttaaaaatatcaaatataaaatgttcagatttctgatttttttttaagctttgttttttttcttttacagtttgtttgaatcaggatcctgagaaagcacatttattgcaaagcattgatacagctgttaaatctattttaatctgcaggttctgtcttttgttttttttttcttccaatttatttgttgaagaaattgtcctatatatagtttcccgccccccatatttggggattacagcccagtagtggtgtctaacccattcttgctcaattaaagaccctggaggacccattataatggaacaatggctataatctcctgtatcctagttggagttgatagtgctgtcataggcactatcctaaaataactagtcatggattcctttttctgtggcaaagtctgatttgatacctgacttcagttccatgtcttggccttgctcattgctccacatgaaaagtaggcctcctggtggaagaagctagtgtttcctaatgacctgattgtgcctttggggtttttcatgcatggtttcaatttccttaggtgatttagttatttttatactactttataatgttgctttttattcttttgatgttagtgtctcagctgttctgacccataacttctaagctattaagacctaataatgagttcctggctgtcatacagttcttgaaatggcaatactaaaacagtttttgagagcttctacttacatgttgattttcagctattatacacaaccttagttttcctactgtgatttttcatttcatttcatctgaaatttatgtttccttagcataaagtcctttaaggacttttaggctgctttatgatgatctcactatctataaggttgatattcataagtacttgggcttttggtgttttgctgtattattcgttgtttcctcaacgactggttactagatgtttatatatgttaatgtcaggaataactcaacttttaagtcgtttgatgtttcataggtggtgttgttaaaacttgatgtacttgttgaccagcttggtcttctggatatagaaatcctttcaggtagtgaagaagtggctctatgagtaaaacaactgtaggttttgtttgggctgttaacctgagcattttcaacttttaagttctctttaaaagtttttagtcatttggctttaaaaattacagttggtggcatagaatgatcccataatgtgattttacagaaagttggaatgttttaatttattatgaatgtaccattacgtggagattgggattgtagatctgattcagtctggattgctgattgaactagatgaatgttaaaattcttcaactctgagattctgatggtataatcttaggtattgaaagacagcagtttttcctttcagtagtcattaagtaaatggtgactaaaagtagggagatgaattattctggaatgacctttcactataaccatttagatttaaaagattgatgagtctgaggatactgtcatgaatttatgtaccacctttagcacaatccaggttttaggtccttgtgattagatatcagagataattgccccagaagtgcgtgggtatattacatttggtggctgttaatgttttggaatgattttggaagattactttgggtacattatttgctatgattattttcttatattcctgtctattttatagtgaggcatgtttctcctggtctttgctttttttttttttttttttaaacttccaatattctttattacggcattctgacaattgagttcttacaggtggaaagacctttcagcacagcgattaagaacatggactctggagctagattcacagagttcaagttctgactcccatttcttaccaggtgtgtcatgttgtgcaaattacttaactgctttgtgccacacggtccttcatctgtaaaatgatgataatactgcctgccttatagagttctgaagaaatttagctgagttaatgcatataaagtgcttagaacaatggttctgaaactttagggaacatcagaatcacctagaggacttcctaaaagattggctggtccccactcccagagtttctgattctgtagatctaggaggggccccagattttgcatttctgataagttcccaggtgatacttctctatttcctgcaaattggcagctggatccagagacttgataaatttcaggttcgttccctttggcaaatatattgcgggggggtggggtgggggggtgttcattcacaacattgattatgttacgatgacttgaattttttggatccattaatttgttggggggctacaaaatggtgacgttctgatgctatcattttgttttcatctgttagctggaataattttgtttcccctcatcttttatttggttactcagcaatatagtttatataggaagagcaggataaatactcaattttttaaaacattgctttcaagatgatgaattggtcccctgtcatcttcaaaaggttacacatataagtgtatatataactatgcatccatagatgtaaacatt

SEQ ID NO: 137418 - DNA, 1111 bp, Homo sapiens
gcgagagtgcctatttttccacagttatgccaacacgtattatcaatctttgtaattttagccaatttaaagggcaaaaaaatcgtatgtcattgttttcatttgcatttccctgattactggcgaaattgatcatatttttgtttgtaaataggcaaatatcaatagtttatataggcagttttcctatctataagcaataagcattttgaaattttaataataaaaaacctgttcgcaatagcaagagaaacgaataaaaatacctagaagtaaactataaaactttattgacgaataccataaaagaacatctgcatgaaaagagaaggaatactatgcttctgaataagaaggctcaatattttagtgatgtccatttttcctatattggtttatacagttgatgcaatttcaataaatataccaagtttttttggaacttactatgattctaaagttcatccgggggaaaaaaatggctaagaataactgaaaaaaaatattttaaaacgtaagtaaagatagggatatttgtactactggctattaaaatgtactctaaaggaactatttaaattagaacggacagaacaatgcattagaatggaaaagcccacaaatcaagccagattggatcccaagatttattggagaaacactgttggctagacgtggaaaaactgccatattaaaagcttcaggcatttccccccatccccgaagcttgaatattcctttgagggcagactcctttgtttggagaaaaccactttattggatctttttggttatgccaaggtaaagcttcagtagttaaaattggtggctttggaactagaactaatgatatggcctttagttagattaagatggattcaggttagcctgcagtgcggcgagggaaggagtctggataatgtaggtttaaaaatttttttccctatctaatgggcaaaaaatgttatgtcattgttttcatttgcatttgtgtgcttactgtgagattgaacgtcttttaaatgttagtccaggataatatgttattcctggagacaggtaacaatgggggactctttgctccgcttccagaatggagtttggctaattg

SEQ ID NO: 137419 - DNA, 1072 bp, Homo sapiens
agaaagggtgcaataattcaaaggggcctaacaagttcaatgggagggctttccagagactgctttttcaagtgtgtcctctttctgtgaatgtgggattttttttttctttccctctctcttccatgcacttgttgtgcaatctggacttgattactgtgcttagggccagtacatgggttagaagaatataattatcagagcttgttttcacgattatcgcacttgttttcttgtgccaggcactgctcttaatactttattgattcatttcatcctcaccaacaccctcatcctgccagcgaagaaacaaagtaaccttcctgtatcatacatgaaaattctgggaccaacctggttccagaatgtgtattcttaccactctgttctaccacttctcactgataaacactaccattatattaagtgccttttgggtgccaggcattgggctagggattttacttagggatatctcatttaatcctcactgaaaaaccccatgaggatattcgtcctatttaacagtttaaggagactgaagtttgccagtggtctgcagcaggatctgcctgattccaaaacttatgttctttgccttcaccatattagaaaatcttctgaggctcaagcacccaacagatctttattaagcctctgttatgtgcaagatgcagaattgagagttatctcctaaggagagctcccagggtgatcttgggagcctcagtttcaaattcaccaccaccctgactctgtgggtgagccagggcaggctgcttactgtctgtgggtcatctattaaagtattttgaacccagtcaagatttacttcctcctggagattctgcttctgtgggtctggagtgaggctgtctggttttggcacctactggttaaatgacctcctccagttctcacagtctgtctcaggagtaggtggggttttgataatgttcatgtctgaagcatagagaactgtatttcctggtagaaaggaaacaggaaagaagggctttaaagcctttgcaggaatgatgggctgggttatttttgtcaccaattcccaccc

SEQ ID NO: 137420 - DNA, 1046 bp, Homo sapiens
ggtatgaaggagcctgagccatgaagtgggaagcccagtgcttgacactttctgcaactctagccctatatccagaagcctgcccacctccacccattctgtttgccccatttccccagtccagtggacatgccccacctccagacttgctcatgggagaaggctgtggtctctgccccctcttgccaaatgcttcatggaaatgaagaggaaggcctagagcctccttcctgccccactgtgggccatttccagaagtggcctagaaatgccaacttcacttacctttcaaaagaaaggtgattcctatcacttgtcaaggtagggagaggtcagatgcccaagcctttgaccacggttttgtagcctgttggaggaagctacttttagctggctacacatgaggccacttgttttagggtgagctccagggatttgcctggattttgaaatcatgtagaacattatccacgtggctgtggctgtggctgtggctgggccctggcaggtggaaaaccatctcccagaaacctgaaagcacctgccaatgacgcagataaccctggccctacagcctgcttgctccgcctataccacagagcacagcctggacattatggagggtgtggcgggacggcccacacctgggtcctccatcgggaacttttcatgcttctttctccacctgaggtcttggtctgaagaagacctcaggactcacatcttcactcctgggcctttgcacttccagacgacaggtcatcgttcaagcagaatgcagacaggccattcacgagcccaagttgaagagaagagacgcccatccgtgaaggagcagaccatccatccgatcctccccttcccctgtccttccttcgtggattgtctccattgtccagacagtgcccccacctcccaccgccttgcctcactggcaatctggactcgatggagaacatccccccacctccatttggcactacccaagtggagtgtacccttgccctttccacctgtaccacccactccaacctcaccccagcttg

SEQ ID NO: 137421 - DNA, 1025 bp, Homo sapiens
tgccagagggaatggagaggaaggagatgaactgatcaaatatggaggcagtcaaataggacatgggaggggatttaatgtggggagacagagacaacaaagagttagaggactgaagccttcctttccctcactttggtcctcaaagcccagtccctagagtacgcagctcaagggcatggaggttggtgtgatgttgaaggctgatgaagatgagagtttctaatgaagcaaggccctagggatggcaacttcagggacactgagctctaatcactaaccaggcacttgtccagtcctggtgggtaggataagagggtatggaagtacatttacctccctgcaggatcttggaaggaaaatgattgggaccagagtaatcagtggagaaaaagaactagacaaactgtaatcagggagtcttgctgctacaggaggtcataggaggaagagtcaaagcatgtggtgttggttggaagtagttaaggagggcttcctgcccaatatggtctaaggatggagaaactttgtgggtagagaaacaggaaggggaggtggcctgagggcagttggtgccagatttgatgttgaagcccttgccaaagcccttgcttacttttcccttcccccacaggaaagcgtcccaaaaagggcctggccacagcaaagcagagactcggccgtatcctgaaaatccacagaaatggcaaactacttctgtgagccctcctgtgtcccacccctcacccctttacccccattgccttctccattgtcaactcttggggcactcctggatcctatctgccctggacaaggtgctgaggtgcattgtcctgctttcttgggacttaccaaaggcacggacccctccaccgactccttctagttcccttccccactttcactagagcatcctgcctgccttctccactgaggagcaggtaaatgggagaggtttccagctgactagaaccctcttttctactcgtccaaaccactcccgtcacctgccttgtctgttc

SEQ ID NO: 137422 - DNA, 1837 bp, Homo sapiens
gatctagatatgaagaggtaattctggatttaagtgagagaaaaagggacagaaatgcagttcctggtatggttagaatagcagtttggctgagggaagagattctgaagccaaatggcttggatgtgaatcccagtttgaccacttactggtcctgtaaccttagggaaatgacttagcctctctgtgccacagtttcttcatccttcaaatgggattataattcttacttcttgggtatttacaagtattaaatgagtaattatagaagagtggttgacatgtattactaatattgttattattgtaccccagaaatgcccgtggtagccacagcctgtgagatcttccgaaggcaggattaggcttgtgttgccaagagaaggcaaaaaaatgtgatcactgagttggtttgtgtggctgtgtagcatttcagaaggtgaagtgatttacatgctctcagcaccacctttccaggttctcagggctccagatgcccactatacaagtgtccaccatgcagtggatagtagatccatagggcagtggatggttgaaatacaaggtattgggagaagtgacacaactccttatttgtcattcccatccccaaagtgaggtttttagacccagtgacctggaggattgtcaagcccactgttaaaagaaaaagaccagcaagaggaagtgaagccattataagagatgaagatagaataataattaaccacttgtcgaatatctactatgtgctgtgtatttttatgtcatcacttaatcttttcaaaaatcctaaaaagcagatattattttacctgttttatagatgaggtagctgagattcagaaaggttagtcagtttgaccatagtcatccaatttagggacacaagcctggatttgaaccagatttatctcattccaaaactaataatctttctaatctttctacgctcagattttccactttgagaagtttgcaaggtgtctcttcagatagacctggttagatagtggtcccaactacttttcagctgtgaggctttgggctcaagttacttaatatccctgcacttccattttctcatatgtaaaattaggattttttcttcttagagctgttatgaggattaaatgagataaagtatataaagtgtctcagctgctgatgtaaatttagttattatcattagacgtgtccaaggtctacctcattagtggcaacactaggaccaaaatcctagtctccaaattcatttacagctttcttggcactgtactaataagtgacagtggtgacttaaggatggatggtaacaaagagatgatctcaggtattggaaggcctgttatgtgctgtgtgtacatccaggctagacttggtgcaggtaagggagagggtggcaggttgcacaaccatattggacattgtctagttagttcctttcctgggaacttgtcttcttcactccttaatctctcctcctacttggcttgtgtttcaggagctacagaaggcccaaaagaagaaatatatcaagaagaagcctttgctgaaggaggtagaacagcctcgccctcaagactccaatctcagtctgacagtaccagcccccactgtggctgccacaccacaacttgtcacctcctcctcacccctgcctcctcctgagcctaaacaagaggccctgtcaggaagtctcgctgaccatgagtacaccgctcgtcccaatgcctttggcatggcccaggcaaaccgcagcaccacacctatggcccccggtgtcttcttgacccagcggcgcccttcagttggctcccagagcaatcaggcagga

SEQ ID NO: 137423 - DNA, 1112 bp, Homo sapiens
gcccaggctggagtgcagtggtacaatcgtagctcactgtaacctcaaactcctgggctcaagcaatcctcccacttcagcctcccaagtagctaggactacaggcacatgccaccacacctggctaactttttaattttttgtagtgacagggtcccacctcaccctcccagagcaatgggattacaggcatgaaccatcatgcccagccaaaggaggttcacattttttttctttttccctctgggaggtttacctttatcctttaatcagtgtgtgctttgagcattggtgaattaggttcttatgtgatggcaagcaaaatctggcttcataaaaagctagaagcaggaagaccaatgagagtacctttggagagcttggaggtagggaatatggctagccttcggataaatgtcttagtgacaccttctcatcctgtttcccttgcagcccgcgtgaccccaactctgccgaagcaggaccgtcctgtgcgtgaggggacccgggtagcctctattgagacaggtttggctgcagcagctgcaaagctggcccagcaggtaggtgctgacaccccaggtcaccctgcaactaatagcagtttgacttagagcctcaacacttagacctgcaggctgataggatcccacctttgtctcaatggggattgagtaacctttgatctttatccttggcagtatcccagccccctcttaaatccctcttatcccaactcaatgataagctacttccacaggttacacagttgacatgattcaggatgaaagaaaatattaggccagagaaaaacccacttaccttttttggtgtgtaaaaacctctcagatgagaaggaccagatccttcctttgctctcatatgaagccctgagggggtgactcagctgagtacgctcaagttctcagccacccaccagtattggaatttggttgattagaaatttttcttgtcctctttatgaaataatattatcttaatcttcacccacaaattttttttttgtcctaaagagtgatcttcactagaatcaaattcatctcctagcattacatctaaaagttctttaatgtgcgtaatgtgcttaggag

SEQ ID NO: 137424 - DNA, 1010 bp, Homo sapiens
aataccatataacagcttcagtagagggatgcacaggaagctatggagagccaagtaggaggcatctcaatcatgattaggagagggagggaagagttcttgtggaaagtaaatctaaagctgaattttgaagggtgagtaagtaaagtaactcatgaagttattcactaaatggatgttgggtgaatgaatcagaattaggtgaatctaggagaaggacatttgctgcaaggatgcaaagtagaagggcatgaaatgtatgtggtacattcagagactcttggagttgagtatggattaagtaaaaggtacatttgtaggggaagggcaggagctggagtaggtgtcattctatcttcaccctttggatgaaatctcattttaccctgttttcccttctccctgcagtctatccttcactggagtctgatgatgatgaccctgctttgaaatctcgacccaagaaaaagaagaattcagatgatgctccatggagtcctaaaggtaatctagtattttgtcccttaaactctgtaggggtggtcaggaggaaatagacaaggtaggtgggatatttaatatcagaagacctgattcagtcactcatttgtttattcagcaaacatttgttgagtgtctgctgtgtgtcaggcactgtgttaggttctggagctaaaatgactaataagacacagagtttatgtaattagtccaataaaatcagaggtaatggagcatattgcatttgatattatatggtttgaggtgaaaggaagaccttgaacagattttagcaagcagtctgaggcttctgagaacgttctgataccatcatcccagtactctggtagttttgttgtcaaggagggaaattctgctgactgttgagctctataaggcccaagattatcacctatactgagaggccatctctgaggagggaagaatgaccactgagttgaacatggagtttagaggataatggaagaattttcttcgtctccttggct

SEQ ID NO: 137425 - DNA, 1007 bp, Homo sapiens
tttgttttttttgagacagaatctccctcattaacccagggtggagtgcagtggtgccatctcagctcactgccacctccgcctcctgggttcaagcaattctcgtgcctcagcctcccgagtagttgggattacaggcgtgtactatcacgcctggctaatttttgtatttttactagagacaaggttttgtcatgttggctagggtgatctcgaattcctggcctcaagtgatctgcccgcctgccttggcgtcccaaagtgctgggattataggcgtgagccatcgcgcccggccattgttttaatatttcaaaagttatacaaatatggttaatgcttattgaccaaaattagaagaagatggagaaagcaaaaattctttttgactaacactgtttcctctctgaacccaaagataacctttgtcatcattttcatgtataccttttattttgttgtgtttacattcatatgtagacagaagtgtagttttagtgtgtgtggttctgcaacttgcttagttttctttcaatgtcagtgcagagatataccttatcaatacagagatctatctgctgcatagtgttctgtaatatagaaatatatcatatgtttaatcattccctactgattgacatttaagttgttcctaagtttttacttttactaacaatgctgcaatgaaaattcttacagtaaccttttgtacctgtgtgccagttaatatttttctaggggggatagacctgttgagttgaagggtatgtagaagacaaatgttaataaatagtgccaaatttccctccaaaagggccagtacatgatcagtgtatgaaacatacctgtttacccatagtcttaccagcaatggatactatcagcctttttaatttttgccaaccttatggcaaaagatggtgtcttgtttgttttacgtgtttattgactcttctttattccttttctgtgaattttccattcagtctttcacccatttttctgtt

SEQ ID NO: 137426 - DNA, 1041 bp, Homo sapiens
aggacccagaagagctttttattatgtggtttatatttatcaatttttaccatataaattaaaatagaaaatttaaaagtacttgttaacttattaaaaaataattataagcccattacatgttagcataaataaaattttttttatgaaaactgttttcaaaaatgtttagtgggaagaatgacattgttttacatctttgcaaatctctataatatctaggttaatcaaaaattgttagaaccccagatctgcttttgctttcattctgttggatgtcacatcatgtacttcctggaaaactccactgtatacccatgagaataagggtgaaaaaggcaaagaacatcataatattctcatgaatatagttctgagtggcatctcagcttctctcaaagagtctcagggagcctaaggattccttggaccacaccttgagaacatctggtgttgggaagccagtttggaggctaactgctcttaaggagttgggtttgagatgagtaggtagtggagataatcagaggaagaaaggccctcttccagctttgattttgccttgttacactgcagggtggatccatgctgtgctgacgcctgtggactgccttgcctttggagggaacttcttacacagccttaacatcgagatgcagctcaagtgagtactgaaactgtggtgattctatgttggccattcctgtctgctagagtgaggagtataatgtagaaggaggggacatggccagaaaggaatggttcctcgttcctgatcatgttcagctgaagattaacaccttttctgcacttagtagttatttgactttgggcaagttatataacctttgaacccaagtttcctaatgtgtaaagtcagatcttgcagagtcattttgaggattagagatacaaagcatccagaacaaaacctgattcatagtaggtgctcagtaaatgaatccttgtttttgttgttggtgtttcctccttctagagcctatgagattgagaagcggctgagcacagcagacctcttca

SEQ ID NO: 137427 - DNA, 1022 bp, Homo sapiens
tgtcacactatgttgcccaggctgatctccaactactgggctcaagcgatctttctgcctcggcctcccaactgggattacaggcgtgagccaccacgcccagccccttctccttttaatagtccataaaaccccaggttgagctccgttttttacctgggaagttctagggatcattgtctgtcttctgttgaaatgagaaagcttttgactgttgttctcacatgccacttgttgtctgggcatgagtttctggggagaggaagagaagaaatggagaagcaaggcccaggcagatggactactatgtgtgaggctgtgtgtctggtagttccattgccctagcagggcacatagatctaaggaaagtgcgatgggttccttcccctgccccccaaacaaacacacacatatatgtacagtgtcagtggagagaagctttgagtgtaaggccattctagggactgatgaggggacaagagagtcttccacagtccctgagactacttggtgcagaacctatctctttactccaggttctgacaaagagattgatgtgattgatgtgacccgccaggctgactgcaagatgaagcttggtgattttgtgaaatactattacagcgggaagagggagaaagtcctcaatgtcattagtttggaattctctgataccaggtaagaggtgcaggaataacaaaaaaacctgacaaagtgcctgaaacttgtgtgatatatctagtgtatattcgtgtttctctctctttttttttttttttgagacagagtcttgctctgtcgcccaggctggagtacagtggcacgatcttggctcactgcaacctccgcctcttgggttcaagcaattctcctgcctcagcctcctgagtagctaggattacaggcgcccgccaccatgcctggctaatttttgtatgtttagtagagatggggtttcaccatgttggccaggctggtctcgaactccctacctcaggtgatctgcccgccttggcctccca

SEQ ID NO: 137428 - DNA, 1024 bp, Homo sapiens
tttttttttttagtctttttcgtttaataaagtatctcaagtttaaaaattaggttataaggctgggcgtggtggctcacacctataatcctagcacttcgggaggcagaggcaggtggatcacttgaactcaggagtttgagaccagcctggccaatgtggtgaaacctcgtctctactaaaaatacaaaaaattagccaggcatggtggcacatgcctataatcccagctaattgggaggctgaggcaggagaatcacttgaacccaggaggcagaggttgcagtgagccatgatcacaccactgcctaatacagtaacccctaaccacatgtggctgctgagcgcttgaaattttaaattttatttaattttaatggatttaaacataaatagccacatgtacttaatagctgttctactggacagcactgttctagacctcataaaaaataaaatttccataaaccttggctgtttttctctttttcagttgtgttggtgttgaagaggagaaggctgctgacattgacctctaccactgccccaactgtgaagtcttgcatgggccctccattagtaagtagatcttagggtttcctagagaagacaatccagaggagagacaaaggaaaggaaatttgggggagtgattgcttttgcctgagcacttgtgattcttcttcctcaggaaatagcagaagcctatgcaggctccacaggccagcacctatctcactaagaggacagaagttcataacttcacctccctcccttcctaaggcttatctagagaaagtacccatccatcttcaccaggaactttcctgaatctgtgagggcctcattgactccagatgctccaaggggtggttagattggaagagaaggatctgctgaggcctttgttcttggtatcatagctcatgaccgttctgactcacaatctctcatgtttttctggcttagtgaaaaaacgccgtggatcttcaaaggggcatgatacacacaaggggaaaccagt

SEQ ID NO: 137429 - DNA, 1048 bp, Homo sapiens
gatgcagaaaggtgaagtataaattgcttaagttcacatagctagtgagtggcagaggtgagattcaaacccaggcagtttggctcctaagcctgtactttaaacctctgcttctgtgtttaatgtctgtgaatgttgtacggaaggccctgatttgttgtggagattaaatgtgataatatgtgaagttcatagctcagtttttttctcagtgccttttatgctaacttcaaattcattcactcactatcctgttaccttgctttactgactttatagcacttacgaaactgttttgacactgcctctctgtctcccgctctaaaatgtccagtccatgagggcagtgtctgctcaatcaatatttgttgaatttatgcactcatttacttaacaaatactgcttaccgtgtgcttggctttgcagtataccatggggataactcatcttaatcacaagacctggtgctataataattatcctcttgactaaggaagctactcagagcaaatcagcatttaccacccttggtcccaggtggtaactatcgagacagtgcagccagaagcccgatttttcatttgtctgcctccctgatatgaggagttgtctagcacgttgatgtttgttgaataataagtaaggcaagactgagagatgggaaaggtgaggacttttggtaaataagatacactatctggcaaatgtagtggggacagacagcaggtaagtgagcaattccaaggcctcgtggtgaaggctgaaatagggatagtgttgtgggggtgccacagcagcagggaaaaggaagagcaggaatgttccaggtagaaggagatacctgtgatgaaacccagaggctagagctagacagagtatggcaccgagagtccgctggctttttagagcagagctggcttcatgggtgtgcaatcgttatagtcacatggtgccccatgcctgaggtttaatgttctgtggtggttgtcttgaaattcttaataattttgcctttgattttgtgattggtatgtgatggaacaatgg

SEQ ID NO: 137430 - DNA, 1326 bp, Homo sapiens
tatttcaggtggtgagaggagggtcttgtcttgagatacccccagcctcatttttgacgctgtggtttgcgtcataatagagggagccctgtgaaacaggggtcagctaggggagggttcagtgagagatgaaagaagcttcccgaaaaggcttcaggtattttcttgaaacccggaaagaagttatcactgacaacggggccgaagaaggtggggggtggggagtggagagtgtgggggcggtgggaagcctggaaggttgagctccgttctttacgtgtgaaagaaattctaagggccgggtggactttctctggttgccccctacagccgcaccagctgtgttgcatcccggcggcggtaactctattggagaactgagggttggtgcaagggggtggggggcgggggctgattcactctgtaaaaagtgttatttgtgcctagctatcgtccagagaggacgcgtgctgccgcctcccgcccctcttgacacgacgaacctggccggccgcagaacgctccagggccgagcgaagatggcctcggtgccggtgtattgcctctgccggctgccttacgatgtgacccgcttcatgatcgagtgtgacatgtgccaggactggtttcatggcaggtaaggagggcaggccaggctacacagggtgcggtggccaggtgtgttcacttgctctctcttcctttctcagctctgtttttagattccggctcaggaccccctctcccagactcaggttctgccatctctccttgcagaacaggacctagctgacattagcctctggtttctccttttcctgtgttttcccctatgtatttcttctttgcacttttcttttgagtgtttttttagatttataagacccccccccccttttctttcctgttacaaagaatcatttttatattcttctctattttattttttattttgttttatttttttcgagacggagtttcgctcgttgcccaggctggagtgcaatggcgcgatctcggctcacagcaacctctgcctcccaggttcaagcgattttcctgccccagcctccaagtagctgagattacaggcatgcaccaccacacccagctgattttgtatttttagtagagacggtgtttttccatgttgatcaggctggtctggaactcccgacctctggagatctgcctgcctcggcctcccaaagtgctgggattacaggcgtgagccaccgtgcccggtcatcatttttatagtctgacaattatgttctgcctcacacactggcttttgggaaaacagtgttgcttatttgaggtagt

SEQ ID NO: 137431 - DNA, 2231 bp, Homo sapiens
ttctggagccacagagggatgaatcctttggagctctaaaagcaaccagtatcactgagctgtgagatacctatatctccattttctaataggaagcacttggacttaaaattgctaagatattttttgcagttgctatttctgtgcatcttgaatctatctgacacaatcaaatgacagtattgttaactctcacaccattaagaaaatttcttattttgtaggcattcactgtgagaggtaaaattgctgctttggcaggtatgattccagtttgccaaacggcttttcttccttccacaacctctttttcccctagcccagggtgaaacaagtgggtcatctccaaccttgatttttatttggattcagcattttgggtttggaaggttacaagaaggaaccataaatggccatattcctagatttttatttatctgacaaaatacacaacttaaaagccaggaaaactaaggttcattacagggagatgaactttttctaattggaggacaaattgtggaaggtggggtctgatctttgcttcaccacttgaagagactgtcatccttcacctgaggttccatttctagcttttatgtgacctctcttgaacaaagtcatttgggaacccccagaaatgacccctttacattgtaggaccataagcaaaacactggttgtgtatagtcactgatccccaaggacttgcagttttttatttctgctggtgtgtcttgggatcagcttataactcctactcttacttagtcagtgaccagtccagtctggtctggaccaggcctgacaaacttctgctcacttgcatcattttcattctgagccagtaggactttgggtagactttaaagcccaagaattggtactcgctttggctagtgacatttgatttttgtctccatcttgatttctgacatcattggccaagtcacattaactttttttgatcactgagaaaaacagtcgaacaaggcattacagagggtggttaaggtagagggtggggggcaggaatgcttatgtaggatagaaagaatgtgggggtagctgtttggttatggtgatccagtcctttggaaccttacaaggctcctgtgggcatgtcaatgttaccattacagcctctacgacccacccacctttgaaaagtcagtacaagtagaccacagtttaaagtagttagtataattctactaaggtttaatcattatacttgttcacttcctggtgcatatttcctaaatatgcttggggtgtggggtggggggttgagttttcactgttccattgcgtgtcatcttatatttttctccatcctgtgactttggcatcttactcgactttctattttcttttcccttggcttattgcagtagtctgctggtgcaggtagagagctcagtgcacctattcccctgttactgctaattatcttgaatattgtcagaggttattttgatgttctaagaatataaagtcattttttacaaaatcatcttttccaagttaaaagcaaaataaaaaaatcccctgtgctagggtgcccatttcagcttttgacattgcccctgtacttttatagatgctctttttgtccgtgttggtagtaactaatgactagtgaattttcatgtaaatgaagcaaaataaatatttcagattttattaatctctcataacccagccaaatctgatgacttcattttaattgcttcccagaaagcacttcccctcctaccttctattctattctattctattctattctattctattctattctattctattctattctgttctattctgttctattctgtttttagaataacacactaggtaaagaaactttaactgcaaggagtcagtgacttttagtgctccctgataaatgatgttattgacaaaagtaaaaaattatttcattgtttttttcctgtattactatctcctctcctgtgcttttgacagtgtgtttagtggatggataatatgtatttctctttcccactcccagattccaaattccctgcctttttggcccacctcaccacaaaagctccatagtttattaatgtaagtttgaatggatgcttctttggggaaacttcaggagttaatggaagagtttcagaaaggaatgagaatgcctcaggagttgttctgtgatggaaattggtctgttgttctgttaatgctgatggaaagaa

SEQ ID NO: 137432 - DNA, 1057 bp, Homo sapiens
ggtttgtgagaccccttgggtccagaacaggcatcttaagtaggaatatctttatcaatctcccttttctgtttgacactgtctttctacattttttagtcatatcacagaagcatttcatcaccagcctgagtggggaaatcccaatcgtgacagagggtcctgggcacagcctgttgatactggagtttcagaagcgagcctaggtgatggtgagccccacatcccatctctgctgtctatgtctacaaggaaccacatggatatcaccattccacccttacctccagtagctccagaagtcttgagagttgctgaacacagacaccggaggggtcttatgtacccatatatctaccatgtcctcactaaggtgaggcagcacatcagcacctacctccctgctcttaacactgtacttcctacttcctaggactgtaagttacagagaacattctggtcactggtatatgaagttagaaaaagaaggccacatgtggtgggcccctcatcctactaaggccttaggtgaggccagactagcaggagttgggactgtgtggtaaatgagtcccctagaagagaagtgtaattgtgagattttgaagtagataatgcaccaagttggtctggttctagggatggacacagtctaagaggctttatgcccttttccttatttctttttctacttccacaaagctgttcccctcctctggtcttatacatgtccatcctcgagcaaaatgcctaaggtggactttccccattcattagctatagtcattgttgagactttattttattttattttgttttattttttgagacagagtctcgctctgttgcccaagctggagtgctgtactcttctgcctccgaggttcaagcaattctccggcctcagccctcctgagtagctgggactacaggcacctgccaccacacctggctaacttttgtatttttagtagaaacggggtttcacctggtctagaactcctgacctcaggtgatccacccgcctcagcctctcaaagtgctgggattacaggca

SEQ ID NO: 137433 - DNA, 1164 bp, Homo sapiens
tgactgaagtatagctctttctcttggcttcaggttttcggaataataggcttggaaatcctccccttccacgaaatcaagtgggcaccatttctgctggaaagccaatggtaagcatcctttaagaagcctgagatagcattagactcaggttgcttcctgatttttataatctgaggagttagggtgattcagtgttattagactgtcagggctatatatactatattaccttctcaacttaaggctggaagactatgcaaaaaaagcatccaaatcagtaaccactagtcattgtgaaaatagattagctaatatcagagaatagttctaggagacttcaactgttcattgtcctgtctgtggaggattctgttcatacatcatttctcattattctcattaggtgctttgtatctcaacaatctccactgctggcatcatccactgtgtcacaacttctgagggagccaccttggagccttataaaatgttaaatagcttttctgtctgttttatcgtttagttttctcatcaagtgccccagaaagtgaaatatccaccaccattcccagtgggacccaactcatctcttctcttctcctcccatgctttgggggaatcccatgctttttctgaggatcccatgctgcagaacagcccctttgccaattgggctgtctcctatgactcttctgcatcccagtttcccaattacctgccttctaaagcctcacctcctttgggaccagactcttcccactcctcttcctctgatggtgatgagccaaatggagctagctctgagtaagtatctctgtagacacctaaggaagtagatttctgaggcatctgtattattttgcttgttagatgggtggagggtgtgggaaagtgtattcctgggtttcctctgtagtgttttgctcttaggaaagcaaagtaggaaaacgttttctatgcttgcccacttcatgcttatttggccctgtgcagatggtaattttcaaacacccaggccactgaagtaaaaggcagcataggagctgattaaggaagccttggtatgggtattgtggctgtcatttcttaatttgtgaggagggcagattaaatgtcaaaaaaagaaaagcatttatagagtggaaatagtggaatcgttga

SEQ ID NO: 137434 - DNA, 1031 bp, Homo sapiens
atagcaaaaaagccaaaatgtctcatgaaaggaagcctgattaattgtgacagtgtcatatacagtagttatctctgcaggaagatggatgatatgtttttattgctttatacttttccatcttttccaagtgttctgtactgagaatgaaggggcaaaactatttttaaagaaaatattttaactgtctctctgtggatttaccaaatgtgaattccatatctcccctcaacttcactctttttcttagtgatccatctttgatgtcagtgtcccttgcttatcttgcctttctaggttcgagctcatcagctggttcttcctccctgtgacgtggtgatcaaggctgtttctgagtatgtcagttccatcaaagatccctcaaacctggatgtagttgggaaggatgttttcaaacagtctcaggtaagttagcattccccttcctaagagtcctccgttttcttaccttcttcagcaacaccagcaggtccctgatcttttctgtgacacctaagttttcctagctgcttgtcttctccatgcttacaaatgagagctccaaaatttcctttaaaaaacattacacagcctggattgaaagtgccctttacctttttttctactgatgattaaagtaatataagcccattctagtccgggcacggtggctcacacctgtactcccagcactttgggaggccaaggtgggtggatcacttgaggtcagaagttcaagaccagcctggccaacatgatgaaatcccatctctactagaaatacaaaaaattagctgggtttggtgaagcagaagaattgattgaacccaggaggcggaggttgcagtgagccgagattgcgccgctgcactccaacctgggtgacagagtgaaacttcgtcttaaaaaaaaataaatcggtaaagtaatataagcccattctagaaaatttagaaaatgaaaacaaattacataaaatatcattacccataaacaacttgctatagttaccactctgacatatgtctttc

SEQ ID NO: 137435 - DNA, 1070 bp, Homo sapiens
tgtgaggggggtttggaacagtgcctggtacatagtaggtacttaattgatacctaatactactttgctactcgagcttggatagcttgcaatctagtgacttcactacatctgctgtagaagttaaacgctgagatgatagtgccctctcatttgccagagctgtttttgtttttaacaatctcactaggcctttctttactattctgtaccaatcaactcctgttctctgtcctttctagttggaaggacatggttagaaccatggagataaaagagtaagatagaacctgtgaccttaaaacttgaagatgatggtattgtcaaattagttctgtgactgtgtcatctgtctctgtgctataagagtgaagaggaggggaattatcaaggaatttgtccaagaggtggcaggcctatggaaagtattcagaacattgggaaagagaggcagtaaggcattctaggcagggaaaccaagtgagcaaagacagggaaggaggagtaatcttggaaatgggtagttaggaaattagcctgttaggagagaggtattgcggaattgtgagaggaattcatgagattcttactctattgtttttcattacctactccagaatatttagtgaaagaagtcctatacctggaatcatgagacttttgttctaatcttggttcggctgcaattagctaggtcaagtcatttatcccctctaggcctcagttgcctatgtgataaaatgaataattggattagttcagtgattcttaattggaggtgtgcatgagaacctactggaaactgttttgaaatgtaggtgtttggatcacactcaagacattgttccaggctgggtacagtggctcacgcctgtaatcccagcactttgggaggccaaggccggtggatcacctggggtcaggagtttgagaccagcctggccaacatggtgaaaccccgtctctactaaaaatacaaaaattagccaggtgtggtggcatgcgcccgtagccccggctactcaggaggctgaggcaggagaattgcttgaacctgggacatggaggtt

SEQ ID NO: 137436 - DNA, 2486 bp, Homo sapiens
attacctcatcatcctcgcaataacctatgaaagcagtattatccctgttttccaaatgaggaaactgaggcacgggcttagaaacttgcccaaagtcacccagagataagtggcagggctgagatttgtgcctatgtggtcttcctccaaagctcatactctaaacaacagtgctgctctaaaatgaatctttctaaagtgccactgtgattagatcatttccccactcagctaaactcttccttggctcctgggtaaagacgtgttcaggtcattcacttacttttttatttgagtgcttgctgtaggctaagtactagctgcttgctgaggactgagaggtaaataaggggatcccgtcctcaaggaggacaaggtttagtgaaagagataataaattgcagatactgtgggctaattgcaagtgatgaaaaatgtggcccctatagggggcatggttaattttgagtaagggagtgaaagttggggaaggcttcaccgatggtgctaagccatgaagagggctgtagatagttcagatagcggacaagggtgtggagacccgaatagccagttatgagctctgaatagattttgattggaggttggcaggagagttgaacacttgagtatgggtttgtggtttccaaagttttttttgtttatataccccatcagtcaaaatctttagagaagcagcccttagtatatttttgtcatacttcactacacagtctcatttttaaaatcccagcagttaataaaaaagatggattgaatagatggatatgtgataaatcaggtatagtaaaaatagtagaatctcagtcacgggtattcagatgttcactgtaaaattatctcaactttgccatgtgtttgaagtttttcataataaaatgttggggaaaaattcccagcagtcctctttagtccttagaagcactcttggggaatgtataaatcttattccctgtgctagattataaacaaactctgatctttttgtattctccataatgtcctgtgtactttgggtgcagggtacattgtttttttccatagtgaataggtcaatgatcctaagagaatggattgtagaagtgactttttaagagtgtagtgtggctcttaatataatggatttaagaccagctccaaaattgcatatctaaagtgtctgtcgatgttactaatgagtgaagttctctctcggttctggtcagtgacttttttgttgttactggagtgataaagaactccctggattgtagcacagacttgaaagtattgattaataaccgattgtggtttcccttttcagaggagtgttctactgtcttgaaggtgggaatttttcacttggatgatctgcatgcctactatttcttttgactgaatgtcagtgcctcagaacaaaacccactactgtatctctcccctctttggttttgttcttcaggctagaccacaagatgggcctttattcccagtctcattttcatttgtgatacagaaagtagaggtggaaggattaaataatagataaattgctgggttgtctgtttagctttagacaacttcggacttcccatgaaaagatccagtgtgtattgctgggatgaattttttgatttggttggtttcatttatatgctctgcaaagctttgtaaatgataatcagtagaaggaaaattaagtaaacccacaaattgcttgcctgattgcttcctaagggtctcagaaataaagcaacctaaagcagttttagattgtgattcaggagataatttagggtgattaagggaatgaatgctttgttttaatggttactgtgtaattagaaaaaaatgatcagcacatcagactcaccatttcacagctatacttttttagaatgattatgattacataaaatgagttgatttaaagaaagctattaagttgcagtacgtggatatggcagaaatcatgttggtggcatatgaataaccagactttgagaacagataccattttgtgctttggttctctagaatacgataaagcaatggctgctatgcctcctgattgtttacttaccattagtcatagacattctgaaaagtcattgacttttctagatgctctagtcgttggaaaataatcaaaataataattacttcttaggcaacaagttgtatattaaaagcttttaaaatatctcatttaatcctcaagagcttgcaaggtgcatggtattctccccattttacagttgagtaactgaggtaaccaagaggtaaaataatttttctttgttctaagtactagtaagtggtggataaaaattattgttctaggtttatattgctcaaagtttacacaatcccaccatcctgtttccttcattttatacattcttgtgtatgatcgtacactgttattggctagacaatatgcatagaagacaatcataagtagattttttgagcacttagtttg

SEQ ID NO: 137437 - DNA, 1972 bp, Homo sapiens
acggtctcgcgccagcagcagcagcagcacttgcaccgccagctgccgccgactgcagccctagcgcccggggctccacgcgccgccaggggctccgtgcctctgcaaccgccgcttccgcccgctgccttgggtgcctactccgggggcgcggggccgattcggcaccatcaccccgctcaccacttccaccatcatggccaagcgcagcccgggctgcaccctccgctgccgccgccgccgccccctcagctgcccggggcccgggtgctggtggacgccggctcggcgctgccgcggctctatggcggctaccagacggattgggtgtgtggcggccaatggaacgccatgctgggctacttgtcagcgctgtgccaggcttgtgcctatcctggcggcgacggcctggagctcgtggtcatgttcccggggggcctgggcaaggaccggctggccgagtggggccgtcggtgccaggccgagcggcagacagcgcaactgatcgtgggacacgtgggcaacaagggcacccctccaccgcgggcctggttcctgccaccggcctgcctgagccactgcgtgaggctagcactcatccgcttccgggtcaaggtgagggaggggccggatcttaaataataagccccacacctattccctcccaactaaatacctaaccacctacccacttacccactaccctacctcccatctacccacccacctacccgcccaacagctaacctacctgcctaactaccctctaccattttatccatttacctcccccttcataccaccccctacggattcactcacctacatggccatatctctactcatgtcatcccagtagctccctttagcttcccttatccaattggcctaccactaggtttcagcagaatctagtcagaatttcttttgtagcctcatctttctcctggtgtcttctgcctcaaactgaaatgcctttaccctgcttttgccagttgacatctctctcctgtatctctttccaacctcgcagtaaatcacttaagcaggtgtgaactgaacacctttcttctacattgtttttccgtcttcacccactgctgcttttttacccatctgtgtccattcagcctttttcatttcaacatgcatcttcttcctcctgccttagcctaaacacataaaaacccactgattcagtcactgttcagcaagtattaactcactgagtgtaagggttttaaagacatgtgagacactgctcatgcccttggaaagttaaatgtatacacatgaaacatttaattatagcaatgtgtatgtgattatgccttatggtccagacagtaagtacagttcctgttttctgtatgtgggagtggtgggatatctttggactaaagtggtcaggggaggcttccctgaagaagtcggacctcacctgggtcttcaaaggtggattggatttgaatgagtcacaagcttgggaggaggctgctttaagtgggaggaagaaaatgagcagaagcaaaaaggaatattaagtgtgcaaggccccataggcagttaagtccaatctgcatgtagttgggtcactgcatatggggcctggggaacagcttggcagcatccccagttcttggcaccactgctgctgctctgttgctttcccatactcttaggtttcaagttcctacgtgtagagaatagcaaggcttgggaagtaaaggaggtgggcaggaagaagaaaaagaaaagtagtacagggttgggtagaaagaaaccgcaaacctatttccccaaccaaggttcttgggggttgtccttacagttagacagaacaggggattgtgggaatcacttaagaagtggtgtcggctggagtaatgaggaggaaagaaattttagctcagagactaaaagacctaaacagagaagcttgcagtggttatagagcttgtggctagagtcc

SEQ ID NO: 137438 - DNA, 1062 bp, Homo sapiens
agcaattctcctgcctcagccttcccagtagctgggattacaagtgtgcaccaccatgcctggctagtttttttgtatttttaatagacatggggtttcaccatgttggcctggctggtctcgaactcctgacctcaggtgatccacctgcctgggcctcccaaagtgctgggattacaggcgggagccaccaagcctggcctgcttccctttcttagggcatttagtaaaaaagggcttagtattgtaaatccttcctctgttcctttgagatgtttatgtatttcctacaaactacagagtgtttgtttctcaagggcctggaagccagtcctttgaaatgtagggtagggcctctgtctcccagtctctgggaggataaaaatctaacttcagtaattgccaggtagcagacacagctggcctaatcacatttatactgagaaaccctctgtaatttttcacttccatgacgctactgagtccctgcttgctttccttccctactccctcattttccctctaaaatgcccagtcacctctgtgcaaatcagaatgaagctcaactctttcctcttctgtcagtagttactgaataaaatctgtcttcactgctttaactaatgttacttaaaccacagatttctggccccacactcagagtttctgatcctggaggtctgaagtgaagcctgaaaatgtacatttctaatagtttgcaggtgatgctgatgtgcttgctccagagacatacttttgagaatcactgctctggtcaggcacggtggctcatgcctgtaatgccagcactttgggaggccaaggtgggcagattacttgaggccaggagttcgagaccaccctggccaacatggtaaaaccctgtctctactaaaaatacaaaaattagccaggcgtggtggcgcatgcctgtagtcccagctacttgggaggctgaggcagaagaatcacctgattgcttgaacctgggaggtgtaggttgcagtgagccgagatcgcgccactgtactccagcctggacgatagagtgagactccatct

SEQ ID NO: 137439 - DNA, 2069 bp, Homo sapiens
agcctactatataaaaagggccttcctttccaaaaaacacacaaacctgtccttttcattttccttcttgtagaggagaaaatggttgtacttaaccatcctgcttgtaaagtttattcagaggatagtctgtatgtccagccaccatgtttacttctcaaagtgcaagtctgatgaatagtactgtatctccatatgtggtaatgtgagcatttcatcatgaagtacctgctgctatgtctgtgaagttgggtgtaacatcataagaatatgaaaccagtattggtgtaaatctaatgaaaataaccctatgtatatttgtagcagtcttgaatctctatttaaggtaatttgctgtaatataacaaatattcattctgtttttcatcccttccttgccagttttatatcaagcatgaattccaatggtttgacagcaaaattatctgtgaaagtttaaaaggcacttttctgctgtgatttttggattgagtgtggagtgttatgtacagtttgatgggatatatcattttagaaccccagatttaattctagtccaattaattttgtttaactacctcgttttcagtgctgttttgggtgcacaagtaaacactacctgtgaaacttgcttttttgccttgattctcagtattctttcagattataaatctggtctgcctcttttttcccagtgctagccaacagtttgagatgagagggatcatcactctcatctgtgtttaagtggagagccatgtgcttctgtgaaatatgctttggggatttgggggtggagagcagaagaataattgaaattggtggcaatataggatttaggtgtaggagttagttataaaataaacaaatggtaagaaagtacctgaattagacaatccagtgcctataactttgcattttttattagagatgcatttctcgtctgtgtgcctaaagggcaatgggttgaaattgctttaactaccacagcgaaatatttgacaaatccttcagcaatggcctatcattcaacatatattagcacagtgctaggtatttgcagtggtattttgttaccttaaaacggccaaatgcatttagttgaaatgtagttgatagtaagggttttatataactttatccaatctctaaagtttatggaagcattgactttcttctttgctgtcttttctgagtgatgaaaatgatgcattccttttttttccttgaaaactcagcaaatgtttgtaaccagatgttccttgtttcacatgtttactgtgtaacactacagcatatttaatattggtaaatactgtatttcagtcattatgcataagtacattcctgaggtatatttgccatcattttgggattcagttattttatcttctgtttgggtcagaaaaacttgaactatctgaggtggtatgcaggccattttctagaagattgttttttgaatctgtagtttatcaaggacttgttccccccctccctttgtttagaagaggaatcagaaaaggggggtggtgtgtagaaaaggcctttgatttgataggtgtaatttctaagattgaaattttaaaaatgcagatcgtaagatagtaacactcaaacttgataaaatcctttgaattgaaattagtatgaaatttttatggaaccaaatgccttcaggtcaccctggaaatagtctttgtatgtgaaagatcaacacaaacattggtcaggaaccctgacagccaatatatgaaggagcctgggatagtaactaggttacactaaagttattttcaactaagatagctagacgagtgtacaaaccaatagctcctattctggaaggttttctttttattaaaaaaaattcaaacaaggttaaaagtcaagcaagaagggaagagagaaactgggttctgagaaaaaaatgtgccagtataaaataaactcctaaatgcgtgcttgtcatcctctagtttttttttaagttgaatttcttttccactgtaacttaagatttgagattgaggtttgcggtccagaacataccctcagcagatacagtg

SEQ ID NO: 137440 - DNA, 1030 bp, Homo sapiens
gtattcttctaaaaattataccccatgggcttgccaggtaatgacgaaaacttaatgggtgtacttttttttttttttgcacagtctactttgtgacattaagtacctcttttccaaaaaaaaaaaaaaatgtgttttatgttgcttacctgaggatcacatccattatcaagaagattctgtcgctataatttgaggcatctagggcagcattttgagaattgctgttgataagatccactgtttcttttcatagaacatgatctgttttgtatgagtctttccaaatgttaagtacagattcttcaaatttcttgtacagtattggtttgcagtttaaagtgattttaggacattagtgtaatgcaaatgcttgcattgcactgttttccatatgtataaaaacaatgctcctaaaatccctaattctttaaaactgcctgtgtttcattataaaaagttggctttgtgtaattacaccgagccatacaacctataaagtgaaaatactgcagattttaggaccccttcttctctagtcacaatcattttaaacagtgtaccccaggatgaaaaaagctccatggctgacatgtacaattacatgtattaatgactgctctacatcctatgttctgcctttggccaccacctctattccacatataattcatcattcttgtttgcctgcagactcttgcagtgccttgtaatatttacaatcttttcaggtttttgctggaaagaaaagtagtcttctaaagtttgaagatggtgaatagtgtactgctgtctccatgctgactgcagtaaccgggttatcatatatgttatgtatacattatgtatatataacatgtgtacatttaaaaatacagaaaaaagtgagcttgtgcagaaatggagaaaacaatgttattctcatcactgtggggttttattaaaattattttttcccatgacttacatgtttggttcagattatagtcactttgactgtaaatactggctagttttctatccagggctt

SEQ ID NO: 137441 - DNA, 1061 bp, Homo sapiens
ccaccatgcctggctaatttttgtatttttagtagagacagggtttcaccatgttggccaggctggtcttgaactcctgacctcgtgatccacccgcctcggcctcccaaagtgttgagattacaggtgtgagccactgcgcccagccaagaggaaacttttgagagtgaaagggagtactgttagcaattactccaggacaacagctttaaaccaggacgacgcaggtaaactagagtgtgtgttcaccctaattgcaccccatgtgtggctctgttaactgctttgttggccaaagagttatctgattatcagttttaattctttttcatggtttccctgttgttgttttttttgtcttatagatccactgtgtgtggagagtaatgcagcatcatgccaacagtctccagccagtaaaaaagggatgttcacagatgacttacacaagctggtggatgactggacaaaggaagcagtaggaaattctcttattaagccaagtttaaaccaacttaaacaaagtcaacacaaactagagacagaaaactggaataaagtatctgaagtaagttgtttatacccaattcactttgtttacaagaactaaaaccataaaaattgatgcgcttaggcctatagttacagtcactatgagagagtagtatgacttgataacatagagacttttatccttttttagattcattatgtctttgagcaaattatattttagaccatgagtcagtaaacttttggggggaaggagccagttagttaatattttaggcttttcaagctatactattacaactacttaactctgttatagtgcaaaagcagccatagagaatatgtaaccaaatgggcatggctttgttccattaaaaccttatttacaaaaagaggtggtgggctgtggtttgccgacccttgttttagactgttctatttttttaaaaaaatccagcaagtatcaaagaagaaagcgtctggaatgaaggttaattcagtccagtgtttcaagaagagtttgggttttaaggaaaagttttcctgtg

SEQ ID NO: 137442 - DNA, 1063 bp, Homo sapiens
cctttagaatctcagcaactctaattgtggaattttatttgagcaatatgatgcccactctctttacccaaggggcctgattgaaagagtgaatttgggggtatagattaaatttttaagttttgctagtatcaatacatatacatcacagcagagcatctacttgtctgtgctatgctaaccacttttacgtttttatatctcaggtgattacaattcctcagcagcagtcagcaaaaatgacatcttttggaatagaacacatatcagtgttcagtgagacaaaccattctagtgaagaagcctttattaaaacagcaaagtctcagttggtagaaatagaacctgccacacaaaatccaaaaacttcgttttcttatgagaagttacaagctcttcaggaaacctgtaaagaaaataaaggagttcccaaacaaggtgacaacttcttatctttcagcgcagcttgtgagactgatgtatcttcagtgaccccagaaaaggaatttgaagaaacttcagccacaggaagtagcatgcagtctggatctgaactgttgcttaaagagagagagatattgactgctgggaaacagcctagctctgatagtgaattttcagccagtcttgctggcagtggaaagtcagtggcaaagactggtccagagagtaatcagtgcttaccacaccacgaagaacaagcttatgctcaaacacagagttcactcttctattcgccatcttccccaatgagcagtgatgatgaatcagaaatagaggatgaggacttgaaggtggagcttcaaagattacgagaaaagtaaggactgtttctcttttgtcacaaatctggttgccctaggttttatagaacttagtattggattggtaactaatttaggattggtgacattttaatgattgaaaactacaaagaatgctaatgctaaacatttatgaatgagaaaaagttcttatatataaaatgttttcatagtctcaagactattacagttgcttatttaccaatatgatttaactactctttttgctaacctttaca

SEQ ID NO: 137443 - DNA, 1116 bp, Homo sapiens
ctcatcgctttacatctattcaaagccctagtatcagctgtggactcccgtgtcagaggaatgggatcaggagcaattgctgatctcatctcttctgtttccactgcaagttttgccaaattgtaagtaaaaaagagaaaattgtttgttaagactaaatttgtttacattaccaaaaatgaagaaaagtagaaaaagcttaactcctgctagacaattaaaaggtgttaatgtaataagcaacattgtattaagtccctaagtctaaatcagacattgcaagatttatcccaagacttagtatctatatgaaatgaataaccggaaaaccaaattagttacaaaaggaaaaaataaaatggcaatgacattaatgggacatgtcacatacatgggctatgtggaaaaagtggcaagatttgtatatgaacaacaaaaaaaataagtaaatgaaaagtgatgttacctagtctatgtccctgactgtaagcacactaccttgacggacttttgatctcttgaaaaagctggttgactgccgtagcctgtatgcccagctttttaatttgcgagtccaggatttcttgctaataggatttttgagactaggacaagtaaagcttaggccaaaatatccacctcctgtctgcagatgaatggctccaccgcttgacacagcagcaggataggcctctggatcccctggaagtgaagcatctgaggacatctcctaatggagacaaaacaaaacaaaacaaaacaaaacaaaacaaaacaaaacaaaacaaccgagaaaaaccaaagtggtaataatttaggtaaggtgaagcttttaaaaaaaaaaaaaaacggaatttcttgtatagactaatctttaacccaaaatagagtattacgtatatagttgcattaatagtagcatatcagactgaacccaaagtactcaatttataaaaagccttgtttctttaaaaatattatttagactttagtaaataaaagagaagattattaatcttctaccccagaatatttttcatcattatacaaactttgaaaactgaaaatcaaattaaaatttccttcatatgtgccagtttactaaaaaggttacta

SEQ ID NO: 137444 - DNA, 1014 bp, Homo sapiens
ctgtctgtaagtgttttatgtaattaccgtaactttccttcagtaattgtgggaaaggtatgggacatgctccctggcactgtattttgtaacttatctctaatgctgcctggagggtggcccagtagctagtctccaaatgtaggagggcttacctttcttcctggatgtcgtctccttcctacatcgttgacctctttcttggccacaaaaccttttcctcttactgctcttatttgggggcgcatgcctctgctgccctttgcttggtctggaggtggggagagaagggacagaactgcctgcctgttccttctttgttatcccaaccagttcattcttccattcagtaaatatctctttagcagtgaataagtcaaaacctctgtttttgtggagtttacatctagtagaagaaaatggatactaaacctatatatggtagtcagggaaagacttgtatgtgatggtgacagtcataggcagagatctgttcaaggaaccaaaaggcggccagtaaacaggagagcattaagagataacattgaaagagacagaagatagatctgatagagttttgtaagcattctagcctaccactcatctttttagttggccagggttctctcctgctgcccgtatcagccactcaggtttgcagcattttgaaacaattcctacatatgtcatggtctactttttcctctgtcagtcatatatgcatgtgtctatgtatattttcctgttgtgtctgtaaatttggattgataaggaaggctagaacaaatatttaatttgccatcttgatccagttactacatattaaaattcttttctgtaatttcagtgggaccaatgtaacattttctaaattgtaatactgatttttttcttctcatgaaactaattattactagtttaaaatgagacttcagaaagtaaaaactgattgcttacaattttatttttaatatgtcctgacctgccataagtttgtgtttgtttttttgtttt

SEQ ID NO: 137445 - DNA, 1038 bp, Homo sapiens
ctgcggttcctggccgacatccacttcctagtaagcttttcttctctgccagctttgtccagactcaaaggatgggatgcaaaatacatatgatatctttaactggtttccatgggaattttatgcttatgagaattttcataagcttttttgaagacattaatattaggatacaacttaagccatttcctatttaatatttatgagaaaaaaggaaaacattatttcccttgacaggttgaattctgtgttttgagtcttatttacgagagtactttcacacaggttctcatttgcccctttgtcctcctgttccttttgacttagggtactagtctgtgctttgtactcgtcagtacgtgcttagccattctttattattgttccaggtccaaaaaacacaagtaataaggaaatatcacgggacacattgctcactatagaaaataatccatgccaccgtgcacttttcacctccaaatcagaacacaaggatgtggttgatggtaagatttctgaatgtgctagtgtagaaaccaagcagccagctatactttatcaagtggaagataacaggcagataatggcaccagttactaatagttccagttactctactacttcagttcgtgcagttccagctgaatgtgagggactcaccaaacaagcaagcatattcatacctgtgtatccatgtcaccaaactgccagtcaggctgatgcacttatgtcccatcctggcgaatcaactcagacttctggtaactctcttacaactctggcatttgatcaaaagcctcaaaccttatcagtacagcagccagctatggatgcagagtttatttctcaagaaggagaaactacagtgaacactgaagcaagttctcctaagacagtcattcccactcagacccctggccttgaaccaactacccttcaacccactactgtcctggaatcagatggagaaagacctccaaaactggagtttgcagacaaccgaattaaaactctggatgaaaaattaagaaacttgct

SEQ ID NO: 137446 - DNA, 1026 bp, Homo sapiens
ctgattatttccttattagatccataggagacggattcatggatcagaatatgaagatttttaaagtttctagatacatgttgctagattgctgtccataaagattggtccaggttacatttccatttgcagtgcctcttcttttgcttagagtcaatttatagattaagataattttggaaatgaattattaaatttaaatctttgcattgcagatagctctagtgactattataactttttttgctttcttataaaagttgtattgttttctttaccacaggatcacatttataacttattttttactgagtaacttgaacctgttagtttagtcatagaatggctgtttagatggtattccaccaagggaaaacattctgaactatttaagccattttccacatatattgtacgtgaactagtgtagatgttccttgcacaatttgcaaaaagaagacagtgattgactcttaaaccggtaaaatgtttgtactcaggtatcaacctctggagataacatggtagagtgtcagctggagacacacaacaacaagatggtcaccttcaagtttgatgttgatggtgatgcgccagaggatattgcagactatatggtaagtgcagtaagaccaaattatcttcccttcagcattctgtcttttttcccctataattctgtctccatttattttgagccattgttttttagagtacgattagttttaaaattttgtacagaggtaaattgggttatcatcaagtgtaagtcactgcatctcctccggtttcagtatatttaactggaaaatatgcagaggtttcatttagagataatatagctaaatggctcttatctctgattgcatgtgaaaatcacctgacaagctttttaaaaacaattgtattgcctggtcccttgattaaatcagaatatttggaggtgaggcccaagcatcaatagtttgtaaagctccccaggtaattcttttttttttagtttattttttgctgggcacagtggct

SEQ ID NO: 137447 - DNA, 1108 bp, Homo sapiens
cattacataaacaagtatattttgagtgataatttgttttggttttagaagttttgtttgaagatattaataaagtaaccaaacaaacaagataaaactgatcaagagcaccctataataaaaggctccacagaggtctatcactggcaatatttttctttcattctcatcactgtgagatggtttgctaaatgctaaataaatacagtgtgaccttgatttttcagctttttaagaaagctttattgaaatataattcacataccatataattcactcatttaaagtgtgtaatttaatggcttttagtatattcacagagttgtgcagtcataacttttaaaaagattgtagtattaatttttcttaaattcattatttatagttttataattgggagtttttcttagaattttactgtcaagactggaatgagttacttttttaaaaatattactagcttgaatcaagatgtggcaactacgaaggaaaacgtcagtagccctgataacccaagtggaaatggcaaacaggatcggatcaaacagagaagagcttcctgtccccgaccagagaaggggactaaatttcagcttaccgtccttcaggtcagtttgtaaatatggtttggttaagagtacatatagaggtctggagggtcagagaggggcagtgctgcagaagtgagttgtagaatattgcgagaccctctctaaactaaccttttctccgttacagactttccaatgtgagtattatgtgttcgttgttaaacttaggaaatataagaaagaaaataaaatctacttttaaccaccattcagagatagctcctattaatgttttagtttgtttttctctccttttcctgtatgtacatgtagtgttttacattattgaggttgtaatagtactagtaatcgcagcaaaaatctattgagttcttttgtggtaggcaccctaaatgttatccatgcattttaccatttaatccttcaataaccctgtatgataggtcatagtatatactcatctttacaaatgaagatactaaagatcagaggagtgagccgggcgcagtggctcacgcctgtaatcccaacacttt

SEQ ID NO: 137448 - DNA, 1046 bp, Homo sapiens
ataaatatgtaaacaaataggcgcggctgtgttccaataaacatttgctcacaaaaacaggtggtgtgccagatttggcctgaaggctgtggcttgcccacctgatagagaatattgccattactccagaaagttccctcatgccccttcccagtgagttttctccacacccgttagagtcaatcgctgttgattatttgttgttgttttttgagacaaggtcttcctcttttgcccaggctggagtgtagtggtgcaaacacagctcactgcagccctgacctcctggctcaagccatccttgcacctcagcctcctgagtagctgggaccacaggtgcgcaccactccgcctggctaagtttttgatttttttatagagacggggtcttgccatgttgcccaggctggtcttgaactcctaggctcatagggtcttcccacgttggcttcccaaagtgctggaattacagatgtaagtcaccatgcctagccaattttttcaccatagattagcttagcctgttctagaccttcatataaatggaacaatataatatatattcttgtgtaaggcttctctgattcaacatgtttttgagattgatccatgttgtgtatgtatcagtagctttttttttttcttttttgagacggagttcgttcttgttgctcaggctggagtgcaatggcttgatctcggctcactgcaacctccacctcctgggttcaagtgattctcctgcctcagcctcccaagtagctgggagtacaggcatgagccaccacgcccggctaattttgtatttttagtagagacggggtttctccgtgttggtcaggctggtctggaactcctgacctcaggtgatctgccagcctcagcctcccaaactgctgggattataggcacaagccaccatgcccagccagctcattcttttttgtaactgcagaataatgttccattttatggatataccaaatttgtttatctatcctattcacagacacctaagtgatttctggttttgggctattgtgaat

SEQ ID NO: 137449 - DNA, 1006 bp, Homo sapiens
ttctgtaaagtactttgactagattattgttaatggagacagtgacttctatttataacattcgtaaaaagagtttgaatttttaacgtactttagagtttataaatctgcaagtttttggttccctttgctgagaatctactgtttgagtctgagtaacttaagccagtggcttagggaaatttgcctaacatgtactaagctacttctccagttctcactaggcataattttgtgtatgttaaactttgttatttagatgtattacttgtaagaattcatttttaattgaagtcactccgtatgcatgttagttgggatttctttgcatccctggtaataaattggatataagatttattgttgtttttgcttccacaggatctgttaaagagatttggtttttataacaaggcagattaatgattaaattgatagaaaatttcaaataagttttttgcttttatacaattaatttttagtaattaaagggtcttgctatgattggaagaactgataatgagatatatgttttgtttattaggttgtctatcagggacctattaaaccatgcattttttgctgaggatacaggactgagggtggagttagcagaagaagatgattgctcaaattcatcccttgctttaagactctgggttgaagaccctaaaaaattgaaaggcaaacacaaagacaatgaagctattgaatttagtttcaacttagaaacagatacacctgaggaagtagcatatgaaatggtaagttaatcataccactattcccctcacctcttattgtatcagagttcattccttgctccttctcattgctttctttcctctcattttctccttttttttgagacagagtctcgctctgtcacccaggctggagtgcagtggtgcgatctcggctcactgcaagctccgcctcctgggttcatgccaatctcctgcctcagcctcctgagtagctgggactacaggagcccgccaccacg

SEQ ID NO: 137450 - DNA, 1043 bp, Homo sapiens
ttaaataaattatttcagtgctttatgtagatatagcaaatattcaacaaattgtatacttaaaaatttgcggccaggcatggtggcccacgcctgtaatcccagcactttgggagcctgaggcgggtggatcacgaggtcaggagttcgagaccagcctggccaacatggtgaaaccccgtctctactaaaaatacaaaaattagccaggcatggtggcaggcgcttgtaatcccagctacccgggaggctgaggcaggagaatcacttgaacccgggtggcagaggttgcagtgagctgagatggcaccactgcactccagcctgggcaacagagcaagactatgtctcaaaaaaaaaaaagaaatttgctttgggggagtagaaattaacacagataatccttataggaaaggggatgtgatcttggtggatacgtttttctcttctataagaatgtggtggtggtgttattttgtaggaactcctgagtttatggctccagagatgtatgaagaacactatgatgaatccgtagatgtttatgcttttggaatgtgtatgctggaaatggccacatcggagtatccttattctgagtgtcagaatgcagctcaaatataccggaaagtaactagtgtaggtataacttttttctttttactttatcagttgccacgtttcatgttgaaattagttaagtttgacttactcaaaactaattttggtttagctctaggtaacagtattaaaattaacaattgtaatgcaacaagccttagatttataccatatgactatgcttcattggagtcatataaaatgctctgtattagtatctttgggaaaatgtacaggtatatcatctatatatatttgtttgtaaggaatttttagttatctattagatggatcttatttttcaaagctgaataatagagaccgactacatggtttcttctaggtctaaaagcctttttatgaaagggcattcaaaatatagttcaatagatacagtatttgggtccctgctatgagtaaat

SEQ ID NO: 137451 - DNA, 1076 bp, Homo sapiens
aaaaatggcacaatagagtatagcaggttgacacgttgagtgagcattctaatatactttcattatagtaatgaatatactcaaagcaatgcagtggaagtaacagcttaaaaatccatacttccacacctgaagcatctatcaaaattgtggaagaacttatttctattttattttcattcatcatctaagtatactttggggaaaactatattttgagacattagccctattacatttgattgtgaaattagaattagatacgaaaacagttgaatttccaataaaggaaaaagtaatttaaaaagatgctagaatttctgtttctgaatatagttgtttacagtattcgcactgggacatttaattttgctccccaaatatttttatgtccctcttggaaatgtttctggattctgtttagccgtgtaagaaagtgcttcattacattataggcacacgccaaatagtctgattcagtttgatttcccactctcttcatcagatccagccctaaaagtagaattcagtcatggacaaagcgtgattacattgaagggaggagggatagagcttgcttaaatatacatgttctcatctctgtttaaaaactagtcacgaactttattaaatataaaccaaaggcaaatgcttttacaaaatgacaaagggtgggagtggcaggagatagcctttgtctgggaaatagcattaatttccccagttagttgagtgagttagttttgagctaattatttgcttgatagatttaaaaaattgatacatgtggtaagctgaaaatagccccccaaagatgtccatgtcctaatccctggaacctgtgaatatgtcatcttacatttcaaaaaggactttgcagatgcgattaacttaaagatctagggattggaagattaccctggattatctgggtggacccagtgtaatcacaagggtccttataagagggaggcagaatggccatagtcagaggaggagatctgatgatggaagcagaggctggagtgatgcagttgctgacaatgagccaacgaatgtggacagtctccagaagc

SEQ ID NO: 137452 - DNA, 1072 bp, Homo sapiens
ttgttttacttactgtgtttgtcacattgtggctaagtgaactcagggtttgggtactcattttgaatttgatggattgacagatggagctgagaactaggtttctaaccaatattcatgcaatatgaagacagattgagctatatactaagtagtctgctagacactgaggactaatggtaaacaagataagacacagtccctagagtctgctggttcctaagattggacagaaaaaagaataaacttcttattaaggaaaaagggattaaaaaatcaggtgatttgttttctccttaatgatttcctttgtagggtgattttaaaatatctttttcccccccttcaggttgctatggaaatacatgaccacgcaaaaggaagtccattctgataattctgatacctgagatgtaactggactgaagagtagaaacaggaaaaattttagtgccaactttaattacaatggccactgattcaggggatccagccagcacagaagattctgagaaacctgatggaatttcatttgaaaacagagttccccaggtcgctgcaactttgacagtagaagctagactaaaggagaaaaacagtaccttctctgcttctggggaaactgtagaaaggaagagatttttccgaaagagtgttgaaatgacggaagatgacaaagttgccgaatcatcccccaaagatgagagaattaaggctgcaatgaatattccaagagtagataagcttccttcaaatgtgttgagaggtggacaagaagttaaatatgaacagtgttcaaagtcaacctcagaaatctcaaaagattgtttcaaggagaaaaatgaaaaggaaatggaagaagaagcagaaatgaaggctgtagctacttctcctagtggcagattcctgaaatttgacatagaactaggaagaggagcatttaaaacagtatataaaggactggacactgaaacatgggttgaggttgcttggtgtgagctgcaggtaggtatataatcttcttggttataataaattcaagttttagctggcctggccttctgtgtgattc

SEQ ID NO: 137453 - DNA, 1032 bp, Homo sapiens
gagacagggtttctccatgttggtcaggctggtctccaactcctgacctcaggtgatccgcctgtcttgacttcccaaagagctgggattacaagtatgagccactgcgcctggccccattttaaccattttaaagtgtacagttgtacagtggcattaggtaacttcacaatgttgtgcagctaacaccacctcaaaaggaaattctgttcccagtaagcagtcactccccattgtcccttcctccaagtcccaggtgaccattaatgtttgtctattctgcatatttcacataaatggaatcatataatatatgaccttttgtgtctggctttcactcagcatgtttttgagattcatctgtgttatggcatgtaacattactttattcctttttatggctgagtattattcctttgtatggatataccgtattttgtttatccatttatcagttcatagatatttgggatgtttccaccttttggcttttgtgaatagtgctgctatgaatatttgtatacaagtttttgtttgaatacctgttttcatttattttgggtatacctaggagcgcaactgctaggtcatatataatcctatgttatgttttgttttgagacagggctctgttgcccaggctggagtacagtggcatgatcatggcttagtgcagtttcaaccacccaggctgaggcaatcttcccacctcagcctcctgagtagctgggactataggtgtgtgtcaccacgccccacaccaggctaattttttacatttggtagagacaaggtctccctgtgttgcctgggctggtcataaactcctgagctcaagtgatcctcctgccttagcctctcaaagtatgggggttacaggcatgaaccactgtgcctggccctatgtttaacttgttgagaaaccaccaaaccgttttccatagcagttgcaccaattttcattgccatcagccatgtatgagggttccatttctccacatcctcaccaacacttgttgctttctgtttttt

SEQ ID NO: 137454 - DNA, 1065 bp, Homo sapiens
aggctcaaggagattctgaggtgttatttgggaaggggtggtgtgtgttgtgtgactgacaggttggggatggggaggagatggtatgataggtgaggatgaaagtggtgaggtggcttcactgtactgaaagaggttttgtttgactagttaaaagtggtgaaacatttatataatggggtgggggtggaaatcctgcacgtgagtatctccgtatcttgggggttgagagactgttaaaatgagactgaaccctcaaaacagatgcgaatagtatggctattttttcttaagagttactgttgattgagacaattatatgaataaaacagcttttgagttgtgaaaatcttctgcatagtagtgattgtatccaatttttggagataccgttatctgtttttcatctatagtaagttgtaataccaagagaacttttgaagaggtcttagtatgtgacagagcagcgggtgtcttttaagacggtctctatcctttggattgatgagtttaaaaattgtttaaactcgacagctcaagggaaagataccttgcattaaaggatagcaaaaatgcactaaagcttagccgggcgtggtggagcgtgcctgtaatcccagctacttgggaggctgaggcagaagaatctcttgaacctgggaggcagaggttgcagctagccaagattgtgccactgcactctagcctgggcgacagagcgagactctgtcttaaaaaatccactaaagctgactttgaactaaaataattgtacattttttttggtcattacgaatttatctttgaaaattggcactcgctttttggtgtgagtttaaattacaacagattacgtgaacattttgttctctgaatacttatcttctgataaggatgtcttgtcctggtctcattctgttctgggtcaagattaacggttatggattttaatcttttgtgattattttttacacattttactgatatatatttagttttcttggaaatgttgcaaacttgagaacattcccatgctgtttttcttttattctgctttgatattgg

SEQ ID NO: 137455 - DNA, 1065 bp, Homo sapiens
ttggacttttcttcttcttcttcttctctgaggggagagggtagagcagctgagagagagcgagagcgcttcggaacacacaggagatgtcgcgcgtgcttcctctaagagattttctctttggaatggggagaagcctttctcctcgacgcgcatccctctctcccgcggcgccgaggggggcgggaggcgtgcgcgcactctagttggctggccactcggcacctcgctgcgataggggcggttccgagttggggctgctccgttggctttctccgcccctccccctcttctgttctcccctcccttccccgccccccctccgcccctctctcctacccgtccgaattccctggctggagtacgcgtgcgtctgctcagctccgggccgagcgcgagcttgggctcgtaccccgctcccctctctccgcccgctctttacctaccggccgtagctggcccggtgggctcgcggggagacgctcgcgcgcgcaagcgcacacgacgcggagcggagctcgagacatcgaggagaggagtaagaagcatcggaggaggcgatcgaggaggaggcggtgtgtgtgtatgtgtctattctacggtgtggctcgtcgtggggcgagaggaggctcgagagagggcgagggagaagcgaaaagagtaagagagtcttcctttgcgagagcctctaatctggtgagggtcccgggccggccggggcgctaggagagagggaggaggccggggggcgtgtctgggatcgggctgagagatgaatgggccagggatgaatggagggaggcagcggcggccaagagtctgttaggagtaagcgccctagcggggggcggcttgaccgaagcagggtgagtgccttcaccagtcggtaccggacgaggccgggctccgggctaaggggctgtcgaaactgctgaataggcggagaggaaaatgaacagggggaaagtggggaagggcaggtttgaggctgaggtgcgttttttgttttgttttcttttttgtttttgattttttttttggttgttgttgaggggtgacaacttt

SEQ ID NO: 137456 - DNA, 1047 bp, Homo sapiens
ggaggatcccttgaggccaggagttcgagacgggcctgggcaacacagagtcttcatctctttaaaaaaaaaaaaaaaaaaagcaaagactgcatgattccacgtatatgaggtacgtagaataatcaaaattatagagatagaaagtagaatggtggttaccagggactggggggagggaagaatggggagttgtttaatgggcacaaaatttcagttttataagaggaagacagttctggagatggttgcacaacaatgtgaatgcacttaatgccattgaactgtacacttaaaaatggttaaggtggggagtatatattcaggacaatttgaatctatgctcccatgaaaaaaaatttacagaaaaaaatggttaaaatggtagcttttatattatgtgtattttatcacaattaaaaaaatttttaaagaagggctgacctacaaagccacttctggcccttgccacctctctagcctcatttgacctcctccccctcactttgttccccaacaatcagggaacaatctgttcccctgggcgtattgttcacctctggaccttgataagatgttctttctgcctcgaatgctcctcccacccttttgcctaatgtcgaatgtccctttctcagggcaaacctttcctgacactaaagaccagcttggggcccaactgtacatcatcatggtatcctgtactttttcttcctagcatttattgcagttaaatacttgtacaattgattatttaatgtttatatctccaactagaatgtcagttccacaaagacagggactgtgtctattttgtttactgctatattctgttagaacagttagatactcagtaaacatttgctgactgtctgaatagatgacctacttattgctggttcaagctcctcacattctataatccagagcctgtgagcctcagccttgtggatccagaaacctgactttgaagaacacacagagctgattcaactcagagctgggccacatgagcaaactgtacacttgattactccacaaagcata

SEQ ID NO: 137457 - DNA, 1884 bp, Homo sapiens
ttggacagcaaagatctacactgtaggctcgtcttgagggatatacaagaacaagaggcccagtagagggcctgttgcatagtatggtttttaaaaaaatcttcattcaatttctagctttggagatgacattaggcagagtcatctctctcaagaaagtatactatccattgaggatccacacacgtaaatagttacaacattgatagattttctgataaagaggagctcagggtgcatggggtaacaggatggggagacagcttcttagtggaggtggtgaattgggctgggtcttagtgagaaggagttaactaggtgggggaagcagagagagcaacactcaagttctgtggcatgagggtataatgtgttatatttggaaagtagcagggagctcagtattggagtatgggcgtgtgtgcgtggggggtggaggagtggtagagaatgaagctggggtgtgggaagcccccttgaaaagcataagacatggaagcccttatgtgcctttgattttatcatttaggccagtgtttgccaaaattcatgctaactagttctgttagatgttcagtgaagaagcttctccagttaccttatgtaagaaaaactcttgttctgctcccactgaaaagtcttaacactcatgaacatattaaaggcttgggtaagaataagaaccactaaaaaacctgtttgcttttgtttctcattagctttctatggatagtgtcccttaagacccagcagaacagatatttctcaaaggcaaactgtgaaacactgcagtggctggtaaaaattcgtgggcaggttctagggtgagaaataggatgggatttgctggctagaaagttcaggaaataatcagtatgaagcataacctggagagggaaagactgatgagaacgctgtttttgtctagaaactgatgaggcctgaagtaggacagtggcaacaggcatggaaaagaaggggtggaatagggccttggagattggttggctgtagacagggagggaaaaagaggcaagttcctggtttgagttgatgggtggattaggtgtcttttctcggagtagaggaaccctggaggatgcgaagcaggtttaaagagtaaggtgatgagtctggctttagatatggaagatctgcggcatctgtgaaacgtccaggcacagagtagtctcagttggagataaattcgggggatattaagtttgagtggtagggaaagccaagagtgtggatgagctctcccagagaaagcacatagaggggagagggctaggagctttgtgggagactttcttgagttactgtctaattcagaaaaagtagagcataggcccataggtaactgaagcccagagaggaaggtggctcagtcagagtcacacagtaggatgtcagtgtcaaggctatgatgatttcatcattggaattactatgtccatttcttcttaactatcccattggtctgtggcttcttttatcagtggaaccacagttgtgaaggttctcttcacttcaaaaacttcagcttttgcatgatagaaattaacatggatcatggatcttcactgtgctaggcattgtgttggatggttcctcataacagacctttgaggaggccaccattagccccactttacagatgagaaaactgaggctcagaaagaagtagcttgctcaaggtctcatagaggggaggctagttagaatagtccagatgaaagagggtgagtgtagggctgggagttgtggaaagaggccttggtaggatggaagagattggaaatgaggtattaatatttagtggttctttaaaaaattatgttaaaacctggaatgcagaacactttagcagataaaaggcag

SEQ ID NO: 137458 - DNA, 1064 bp, Homo sapiens
acccagggggcacccacttcacctccatctcttccacactgtccacatcatcttcatcctcatcagtctctctagctgtcttaagtgcagtggctgtgaccttgcattttctctgagtgatgcaggaggccatctccctcagagcagccccatcacccctctggaagtggtggaacatggtctgcagttgctggctcacctaccaagaaaatattcaaccagtttggattttccagatatctactatacaaacagcacgtgtttgaagcaacagtggggagtaggttggatttttccagaagagaacagagctctttcctccccaaggaattaaccaatgaagcaaccacatatgaagggctcaaatgaaggcctaaagcatcaaaagagagcctaactagcagggaatcctctagaactgggctttgaaagaaataagatgtaaaagggaaggtaatcttattggggagcaatggtaaccagagcgggggtgaaaatggacctggactggcctgacctgcccttgggatggggctgaggaacaggcctggatgggaatgatgtatagaaataaagaaaaggcagggtttggaaaggctacactttttcctctaggcaacagagtcatagtcaagagtcttggcccaaaacagacagctggggagaagaaagactacaggtagggagactgcagttgtgcccgtgataagctcacctggggcagactcccgtcttccacaactgtatcaaactcgttggtcaacagctctccaaggaagtcttccacctcatctagctccaagtcagctaagtagaaaaggacagggcccttgggtcaaagaccagccaacttcatcacccctgcccactgctcttcaatatctacttggtggatctgcaactgggtgggtaaaggcacagtgagccttttatctgctaaagtgttctgcattccaggttttaacaattttttaagaaccactaaaaatacctcatttccaatctcttccatcctgccttttatctgctaaagtgttctgcattccaggttttaacataatttt

SEQ ID NO: 137459 - DNA, 1967 bp, Homo sapiens
aggtgagccagcaactgcagaccatgttccaccacttccagaggggtgatggggctgctctgagggagatggcctcctgcatcactcagagaaaatgcaaggtcacagccactgcacttaagacagctagagagactgatgaggatgaagatgatgtggacagtgtggaagagatggaggtgaagtgggtgccccctgggttgggggatacagatgttttcaattttctggaagagcagctagattcacagggaagtgataaggggatggtggtggttggtggtagtagtattatccagagagggcagggaactttcctaaagttacacagccaatcctggaaaagctggagcagagcctgggtctccagtggtcagtgtattcagctctcttttaaatctcccctccaggtcacagctacgaatgatggggctgctacagatggggtctgcccccagcctgaaccctctgatccagacgctcagactattaaggaagaggatatagtggaagatggctggaccattgtccggagaaaaaaatgagtggggatgattggaaatggctttgggcccttatttgctgttctaagagttgtctgtaggggttttttttttgaggattgcagacctgtggactggttaccccatctccaccctctcccctgttcctctgtctggctccctccagggcaaggaaaacctagggtccttggtcttgggggtggggggaccttttccagcatattcccctgggcctttagttaacatccgagtgacgaagccgggttccccagtacagtgtcttttgggtgcggtcattgtgaggaaggggatgagtgagtgtgggtgtggctggaggaggagctagatgccggtggacagtgggcaggtggatttggggaggagaggatcagcagcagcagcagtactcagtgatagggggctggctgggtcaggaatggtgagatgaacatgcaagtggaagagagaatagttgaaaatgtgaatgaaagtagctctggagcctctcccttaccccaccccacacacacgcaacagctctgtacccctgcccagaacttggaacctcccaggaatgctgccttccttcagcccagcctccagtcctgggttccctcaggaattcgaagaccttggctaggtggtgagcttggaagagctgggctttgttttctgtctcctctaacctctttccttactccttatcccatcccatttgagttcaggggtgaggcttaagatcttaataaataataccttactgcttaatctgtggcttgacctgtgagtagtagccttagaatcagccttctgggagctcagcttcagagtttacaagggagcagtttctgggcccaccctagcagcctggtactttggacaaccaaacagatgaacgaacggagcacagcagtgctatgaaagttactgtaagcctgaaataaactgtatttttcttaaaaaaaaaaaaacacacaaaaaaacacaaaaaactgagtatccattgtcctcccccctgtttccctgtcctgcccgctggccctgccatgggtctggacgataaaatactgggtagccttggggccgggtagaagctgtaagccatgggagaggcaggagaggtctagttgccaccccacgtggagttgtacgtgtgaagacactggctgaggaggcagggctgggtcggggccccagggtcagtggcagagctggcacttgaatccaggtctcctacctctggtgctttgtggggaactgggtggaggcaggatctgtggtagggtattgagggatgagggagaaaaacgacctaattcaggtaggactggcaacggctcccaccctccctggggacagggattaataaaaattgacatcactgtaggaatatattttttaaaagcccacgttttgtgaaaagatgaattaaaaaacccaaga

SEQ ID NO: 137460 - DNA, 1113 bp, Homo sapiens
cgggccgaggggacacgttctgcccggggcccacactgtctgaggacagggagatggaggaggcaccggtggctgctttaggagccactgctgaaccccccgaatccccccagacccgagacaagacctagagggtttgggacaaactgggagcccccaccccacactctagttgcccatgtctgattgggggctctagccccttccctcccagctcagtcaatacttgaactcccatcacgggcactttcaatcccgaatgctgggtcttgggttttttaattcatcttttcacaaaacgtgggcttttaaaaaatatattcctacagtgatgtcaatttttattaatccctgtccccagggagggtgggagccgttgccagtcctacctgaattaggtcgtttttctccctcatccctcaataccctaccacagatcctgcctccacccagttccccacaaagcaccagaggtaggagacctggattcaagtgccagctctgccactgaccctggggccccgacccagccctgcctcctcagccagtgtcttcacacgtacaactccacgtggggtggcaactagacctctcctgcctctcccatggcttacagcttctacccggccccaaggctacccagtattttatcgtccagacccatggcagggccagcgggcaggacagggaaacaggggggaggacaatggatactcagttttttgtgtttttttgtgtgtttttttttttttaagaaaaatacagtttatttcaggcttacagtaactttcatagcactgctgtgctccgttcgttcatctgtttggttgtccaaagtaccaggctgctagggtgggcccagaaactgctcccttgtaaactctgaagctgagctcccagaaggctgattctaaggctactactcacaggtcaagccacagattaagcagtaaggtattatttattaagatcttaagcctcacccctgaactcaaatgggatgggataaggagtaaggaaagaggttagaggagacagaaaacaaagcccagctcttccaagctcaccacctagccaaggtcttcgaattcctgagggaacccaggactggag

SEQ ID NO: 137461 - DNA, 1083 bp, Homo sapiens
gacaccgggcatcaatgttgacagaaggcctagcctggctcctcctagctttaatacctcctcagtgtagggactgctattcctatctcagatgaagacgctcaagctcaggtggcaggagtgatttgtccagtgccacccagtgaatcagctagagctgagattcaaagctaggttcgtctgcctcatttgggcaacggctgctgcctctacaggccagtggaaggagtgtgcggatctcaggcattctttcttcagtcagagcattcattcctcaagccattcacacatttaggcctcatgcttttttctgtctttcatcacatccatttcctacactcattgagaggtaatctagcattgtggttttaagggggtatgtgggtggttaatgaagtctggcttagaatcccagctctagatgaaaatgtattgacttggagagcaaagagagctgatgtgagaattaaatgaattaatatatgcaaagtgcttagaatagttcctggcacagagtaagtactcttttaagtgttaaataaatacctagatttgtttttaaaaaaatctccaaaatgtgtgtttgtgcatatatgcctagaaagataggataagccctcacaatggtaacttttgggtagaagggatacggtattttattattttttgtttatattggtctacttatcctactttgtaataacaaaagacaatttttaaattttttttttttttttgagacggagttttgctgttgttgcccaggctggagtacaatggcgcgatcttggctcaccgcaacctctgcttcccaggttcaagcgatttgcctgcctcagccctcccaagtagctgggattgcaggcgtgcgccaccatgcctggctaattttgtgtttttagtagagatggggtttctccacattggtcaggctggtcctgaactcccgacctccggtgattcacccgcctcagcctcccaaagtgctgggattacaggcatgagccactgtgcccagccaattttttaattttaaaaaaatccagtgctgccactcatttgctgtgtaatttgggcaaatga

SEQ ID NO: 137462 - DNA, 1751 bp, Homo sapiens
cccggctaatttttgtacttttagtagagacagaatttcaccatgttggccgggctggtctccaattcctgacctcaagtgatccacccgccttgacctctcaaagtgctgggattacaggtgtgagccacccacacccggccaactgataattattgacacggtttcttttatgttctatattctctcccacacatttcacccttacccctctacctgaggcctagcacctccttgaaaagtcctcacccaaacttcagactggggcatgtcacctcctctgggctccttggccttattttcaccatcaaaacactgatctccctgtattgtccctgtctatttcctctactagaccatgagctccttgagggcagggtcctctctgaagctcaagttcttagcacagggtctggaaagtattagtaatcgttgaataaataaacccaggcagattatgtgacttgcccaaggtcatataagtaataggtgaagaagagggtcaagcccaggtctttctgactccaaaacacctgctcttccactcctattgctttttgtgggcctacctaaccaaacatctttcttttttattccccaccccaaggactgaggaggagaagaaagactgggtccaggtaacatccaaggctctgtggtagggggctagaagagtattaacaggtctcctaggggttgatagattctccctcaaaactcacagctaaccagaatggtcctggacaactgtctttcagcaaactttactatccccattttacagataagcaaactgaggtgcagaggttgagcagaaactcacaaactcttcttttaggaagctggtttctctgagggtgtataaggtgagggtgtcaagctctgtaaaatcttaagcccagaaggtggccaggaaagccacctgaggtttttcagccaccactccccctcccccattttacacttgtaacactgagacctggatttgggaggggatttgttcaaagtcatccacctaccagtgacagaactgggtttgaaacccagcttttctaacttcaggctagggtatacgaaggtgaggcgagggtagaaatgggtagtttgtggggtgatctgacttctcatttcttacacctcctccccaggccatcaactccaccctcctgaagcatgaacagacgctggagactttcaaactgttgaactcaacaaacagggaagatgaagacaccccacccaactctccagtaagagtccccgccctctttcccctgcactgggaccccttccagacttccaaatgcccacctgacctttagatgatcctctccctttcctagacggtaatgaccagagaggcaatgcatgacttcagaagcagtcttccattggtagggccacagagaaatcattggggaaactgaggcccagaaagtataatagaagtgacttgtcttcagtagcacagctaggagcagagccaggacttaaaggcaggtcttctgaatgtggctgctccccctacccccagcccatccccaccccatgataatccaagcgttggagcaggaacaagggctggctggactgggctggggagtagctgtctctgacctgagacctggccctccctacagaacgtggatcttgggaagcgggcacctacgcccatccgggaaaaggaagtcaccatgtgcatgcgctgccaggagcccttcaattctatcaccaaacgcaggcaccactgc

SEQ ID NO: 137463 - DNA, 1044 bp, Homo sapiens
ttaaaataatagcatgggatgatggccagccatttaacagaggggcctttcatatccattctctacttcgatgattataatcatagctcatatttcctcaagacttagttttttgccaggtgctgttttaagttaatgttaacttaaaattttaagtctaagttgactagtcaaaagcttacaagagccctagaagtagctactgttaccataaatctactttacaaatggggaaacttaggtgtaggacagttctgcatgcagggcgcagtggctcacgcctgtaatcccagcactttgggaggccaaggtaggaggatcacttgaggccaggagttcgagaccagcctgggcaacataacgagacctcgcctcttaaaaaagaaagaagaaagaaagaaaaagaatatttatgtacttgcccaagatcccagagcaagaaaggagcagagctgagattggagctcaggtcatccggccctggagtccacattcctaaccactgtctatgctgccttctgagggaccaggtgaaagggtatcagggtcatggtgagggccagaggatggatgcatgtcagcagatggcctgcttctgacaggctgtgagaaagtgagaaatgactggctgggactgcaaggaggtgggagagagagatgaatgtgagatagagggtatcctcctgggggatgaagtgagtcttgaagcttggggagattgagagcctcatggaggcctgcagcagggaaagtgagagcaaagcagatgccctgcacatccaggggagtgacaagccacgtgacagggactcatcatctgcagagaggaaaggggctgcagtgggacactgggcccagaaggggcagccaagcaatgtaggatttcctcctagtggcagcaggaaggcatggagggtttgctttgctttgcagtcacttttactgcccttaaaagaaaaaagaaatttaatgcaaattttcaaatatccggaaaagtgtaagtacaacaagcacccagatgcccacaacttagacagctgcttc

SEQ ID NO: 137464 - DNA, 3329 bp, Homo sapiens
gcccggcccctgaaaggcatgtggatgcctgagctgggacaggggccatagatctccgtgagcaccaaaacttggtcatgaagagagagcctcttaggaaaacacgacttggttggccagccatatggacctccttcagaagcacctctgctcctctagcacaggctgatctgagtggggagatccagcacatacagaatggggtacacaaagactgtggccaggccttaagcatgggtgggatttattagtgtgtggagatgtacagggactcatttcagctttttctttttttttttttgatgatacctggtcactataggaaatatggaaattacagaaaaagatgaaagaagtaggaaaaaaatcccctgttatctgagcccccagagaataagcacaatgaacattgtgacataaattcttcctggtgttttttagacatgtatacttgtaaaagtaagatcattctatataaacatgtttgtatccttttcttaaaacaccctgagcatttcccagattattaaaagacctacatgaggatcatttgtaaaggttgtttaatgttccattatatgaagacaccataatgtatttaactgaacccctacagttggccattttttttggcagggaagaggtacaggtgaaggtgtgctcccctacagatggacatttttgtttcccacttggaactgttgtaaataccaatatgacaaaaatgtgtttgtgtatagaatgtgtattttcctagaatagatacccagaatcagaatcattgagacaaagaacaggatcatctcattgtttctttatatggctttttctgattataaaagtaatacatgttctttgtcaaaaatacggaaaatacagaaaaacctaaagaagacaataaaaaccacccacggccccaccaaccagagacaacatgggtatgcttccttctggttacatatgtaactattattgttattattaatggtaataataatcttggcaagcttgcatttttttattggctgccaactactccatctattgtgattctggcattgtgacattggacaacttctgattttaaatgatgttgctgtggacatctttgagggtggagctttctgagatgggagggtgtgatcaggccaggaggaggtattcagggaggaaagaagccccgaggccgggtgcggtggctcacgcctgtaatcccagcactttgggaggctgaggtgggtggttcacaaggtcaggagttcgagaccagcctggccaacatagtgaagccccgtctctactaaaaatacaaaaattagccaggcatggtggcacgtgcctgtagtcccagctacttgggaggctgaggcaggagaatcgcttgaacccgggaggcagaggttgtggtgagccgtgatcatgccgctgcactccagcctgggcaacagagtgagactccgtctcaaaaaaaaaaaacaaaaaacaaagccccggaaaggctcctctctgctagtcccccatctgacctcacccctctatgcctgtagagtctctggagctgatcgccacagcagcagagcactcgaatgctgccatccgcaaaatggtgagtggcccttctagcccctgcccttccttggccacccacctgtggtgtctccatcctggagtgggggtgtcgtgacttgtgggcatctgacaggaggctggcaccccaaccgtgccttttgttccctgtcttttgccaggagcgaatgcataagctgctgaaggtatatgagctgttagggggcgaggaggacattgtcagccccaccaaagagctcataaaagaaggccacatccttaagctgtcagcaaagaatgggaccactcaagaccgatacctcatactagtaagtgccaggcatggaattgtgggtgggtcatgcccctcccaacacacacacacatagtgacctggtactcactcaaagactatacctcctttcattcctgaaagaggaaaaaaaagaaaaacagactatacctcctgctagtcattctctcctctagtaacgaattgtattttcactacctagctaggattttttttctccactttacagatgaggcaaataagccttgcagagaagtgacttgcccgaggttccccactaggaagtgtcttccatgcctaggctctttccttgtgacccctgtgcccaatttgggctgtcttttctccatctattgcctacagtccttggcagtaaagcttcagggcaaggagctgggccacatccccactaggccctctgcacatacatcccaaactttttccttcctagttcaacgaccgcctcctttactgcgtgcccaggctgcggctccttggccagaagtttagcgtgcgggcacgcattgatgtagatggcatggaggtaagcatccaagaggtgggaaatgggaacttggagtggggcattggtgttgggaggaacaaagatgctggctttgaccccgagtctgtgtgtgtatgtgtgcagagggctagggccctgtggagttcagtggcctcaccatgcccctttctgcctccattcagctaaaggagagctccaacctcaatctgcctcgaaccttcctggtgtcaggaaagcagcgctccctcgagctccaggccaggtacttatccttgcctatgcctttcctccagcgcctacctcccttttgttcagatatgctgaggcattccaggcccagagattgttccagagaaaggatgggcacctttccccaaagatgcaggcttgctcttcagcggtgggggtgatccctaagggttagacaccatttagattcagggtgagtacttcacgatatggggaaaggtggcactcctgccagggaaaccttttggaaaatgaataagctctccctaattaaaccaagaatttcttctggtggattttgttagaggagagagaagaatgggatgtgaaacccaacatgaataataccaccacaaatagtttattgtagattcacagatctaagagaaataacaatcaaatgcagtacttggtccatgacagaagcctggtttgggaaaaagagccctaaaagacatttgtgggacaataagagaaaatgtggatgtaaagtgaacattagatattgagaaattattgctgtcttaggtgtgataatgttatggtggttatgcaggagaatggccttgttttgcagcagtgcatgctgagggcttagtgtcacaatgtctgttaattactttaaaatggttcagcacccaaaaaatacatatgtaaccatacatacacatttgc

SEQ ID NO: 137465 - DNA, 1121 bp, Homo sapiens
ctgtcaatggctcccctgtgcctgcagggtaaagacctagccctttagcctgacattcaaagcccttggtgaggctgggcgtggtggttcatgcctgtaatcccaatactttaggaggccgaggggggcagatcacctgacttcaagaccagcctggccaacatggcaaaaccccgtctctactaaatttataaaaattcgccaggcgtggtggcacgtgcctgtaatcccagctactcgggaggctgaagcaggagaatcacttgaaccctggaggtggaggttgcagtgagccgagatcgcaccactgcactccagcctgggtgacagagcgagactacgtctcaaaaaaaaaaaaaaaaaaaaaaaaagactcaaagcccttggtgatgtggcttctgctgaccactccagcttcctacacctccctaaacatgtcccgtcttacttcatctggccaactgtcactgtcttctggatccagctcacttcctccagtgagcctgcccagagttctcgggctgggttaggaccctgtctgggttctcacattctcctttgctcccttctgtcccactagtcacagtgctcatcatgtatttatacatctgcatccatattcctcagtagactacgagctccctaggacagggccaaggtcccactgccctctccaggcagatgctttggataaattagctccttcaaccctcacaacaaccctgtaacatagatgattgtgccccatttatccaatgaggaaaccaagacccagggagaaggtgaccaccctaggttgcctacctgggtggcagagttggcatcagagctgggaatgatctcccagctgccttttctcctacacatcctacatctcccccaccccaaggcagggggcaggctgagtggtagaggtagggggcacccagggaaggggataggaagaagactctggcaagttgtgggcacacaagctcaggcctgtgtaggctgatgggctctgactggaggctttgttacaacgagctctgtctggagatgtctcatgtggagtacagactggcatttccaaggatccagggtgtacagtccctacctgggggctcagtgtggggatttca

SEQ ID NO: 137466 - DNA, 1132 bp, Homo sapiens
taaagaatggctactccataggcagagcagcctgagttgaagaaattgagcttcctgttttgtatcaatcccaaccctatctgaggccccaggatgaacctcacagcttgagcttggccaactgagcttccttaatggagcctcccagattgagctccccacatcaagtccaaagatgaaactttgtccccagaaacaacttaccggtctggttttctgagctgttcagaatgagaatctctgaatgagagcccgcctgagatatgcgcactaagatcctcagcccaagatcgtaagctgagctcccaattttttacacctcagactaaattccccaggctgagcctcactgaatcatatgtctggttccccagactgacttgcccactttctactttccagactgcactctggagcctggaccctagaccaatctccccataccaggccatctggaactcctggcctcagttgcctacactgggcccaagactaaactccaaaccaagatcctagactgccaagcccagaccaggccccactaacgcttccaaaccaagcccctacatcaggccccgcagattgcactccctagcctgaacccctaagtgaaattctagactgaaatccccacactgagcccccaggtagggactgtacaccctggatccttggaaatgccagtctgtactccacatgagacatctccagacagagctcgttgtaacaaagcctccagtcagagcccatcagcctacacaggcctgagcttgtgtgcccacaacttgccagagtcttcttcctatccccttccctgggtgccccctacctctaccactcagcctgccccctgccttggggtgggggagatgtaggatgtgtaggagaaaaggcagctgggagatcattcccagctctgatgccaactctgccacccaggtaggcaacctagggtggtcaccttctccctgggtcttggtttcctcattggataaatggggcacaatcatctatgttacagggttgttgtgagggttgaaggagctaatttatccaaagcatctgcctggagagggcagtgggaccttggccctgtcctagggagctcgtagtctactgaggaatatggatg

SEQ ID NO: 137467 - DNA, 1835 bp, Homo sapiens
aataaacacacagtagaggccgggcgcagtggctcacgcctgtaatcccagcactttgggaggccaggccgggggatcgcctgaggtcaggagtttgagactagcctggccaacatggtgaaaccccgtctctactaaaaatacaaacattagctgggcgtggtggcgggcacctgtaatcccagctacttgggaggctgaggcaggagaattgcttgaacccaggaggtggaggtttgcagtgagccaagattgcatcactacacttcagcctgggcaacagagcgagactccttctcaaaaaaaaaaaaaaaaaaaaaaagagctgggcgtggtggtgggtgcctgtaattccagctactcgggatgccagggcaggagaatcactcgaactcgggaggcagaggttgcattgagctgtgattgagccactgcactccagcctgggtgacagagcgagactccatctcaagaataaataaataagtaaataaatacacagtagaatattagataggtgctgagtataattcagagaattagaagagggtggcatgacagtggctggagagcctacttgagattgggtggcctgtctgactagaagacagtgagtcaaaacctgaataaaaagaaggtaggcacatgcctgttggggttgagcatgttccaggcagaggccacagcaagtatagggtccaaggcaaggggagatattaggggaggtggggtgctggacaggttgcatatctctggatcaggaagaaggtcagtgtgacctgaacatgacaaataagagtagaatggtagaaatgaggttggagagaggagcaaagactgaaggccaagataaggagatggattttattctgagtatggtgggtagccatgggaaggtttcgatcatgattacttggggagcaagagagagagagctgagagatcagttagaagccttttgcaataatccaagtgagaaaagttggcttggatgaggacagtagcagtagaatcggtgagaaatggttggattcaggatacattcttttcagaagcagcactgagaggactagggtggagtggatgctgggcttgggagcaagagtcaggaatgacttaaaggtttttggctggtggtgatggttcctgagatgatcttaggagtctgactttggacatgttcaaagtgagctgctagtcaggcagttagatgaatctagaatttcagggagagatttggatgtcattggcacatagatagtattccaaagccataaggctggccaagatcaccaaagggagtgagtgtaaaaggaggggaaagggggccaaggacaaagctcagggatgtggaatcaccaaaggagacttagaaggagcagccctaggctgggcgcggtgactcacacctgtaatcccagcacttttggaggctgaggcaggtggatcacaaagtcaggagttcgagaccagcctggccaacatggtgaaaccctgtctgtactgaaaatacaaaaattagccaggtatgatggtgcacgcctgtaattccagctagtcaggaggctgaggcagtagaaccacttgaacccgggaggcagaagttgcagtgagccgaggtggcgccactgcactccagcctgggtgacagagcaagaccccatctcaaaaaaaaaaaaaaaaagaaggagcagccctaaaggtaggaagaaaaccaagaaagtgtggggtcctaaaagccataagaatggggttcgaggccgggcgtggtggctcacgcctataatcctagcaatttgggaggctgaggcgggcagatcacctgaggtctggag

SEQ ID NO: 137468 - DNA, 1783 bp, Homo sapiens
accacagaaagccagcatgaagcctggttcctatatctccccacgagtctgtgaaccctgagggctgggaccaggtctggtttgctttgctcctgcaccagactgaccaatgaggagtacaaccaggcctggtctctttgtctcacctaccagatggtgaccctctcagggctcaaatgggtgtgactcatttctgtgtccccagcatcacccagcacacagttgataatcagtatatgaagtggtcctggcagtaaggtctcagggtgagtacttcaaccagtactcgggcagggcagaattgaggcaggtggcatcccaggctgtggtctgaagtcaagccgagcctcttggcctcactggcctgtaatgtaagcagcatttctgaaggagcagactagctgagaagtaggtttctaggactgagatgaaaggtatctgcctggggctggaaacttgtgggggaagtttctgaggggcaaagagcagcaggaccacatcagcccctaattccaccccagggaccgctatccacgcattggagacatcctgcagaaactggcccccttcctcaagatgtatggtgagtatgtgaagaactttgaccgggccgtggagctggtcaacacctggacagagcgctccacccagtttaaagtcatcatccatgaggtgcaggtaagtggtcaagctggaaggagcagacttggggaggagaggtctgcagggatgtggtggggcatctgcagccagatctgagcccctctgcttctgcctgtcacagaaggaggaagcctgtggcaacctgacattgcagcaccacatgctggagcctgtgcagcgcatcccccgctatgagcttcttctcaaggactatctgttaaagctgccccatggctccccggacagcaaggatgcccaaagtgagtgtgtgcacccaggccccttcctacttctccacactaatagctctaggccagacctctgaggcaggaccccaagacttaattcacagggtcggccttccattgccacatgattgaaatcccagaggagaatctccaaactgaaaggcccacattgaggttctgaagtgagaccccaggatgagatcctccttctgaatgttctctttgggtattcaggcagggacctctaagttgagacccctgcctgaatacctgtagagaacattcagaaggagatccccaacctgaacttcccaactggaaccccagagtttgagtggcatgcccattatgatcccctaaaggaactcatccatttcctagatcgagaccccaaggctgacccctagactcacccccaaatgaagttgtaccaaatgagaaaggaaactgagcctgaaacctcagggactgagccaccaagctgagaggccagactgacccctcaggccaagcccacatcacagaatctccacagctgagctccccagaaagagccctggctcatcaattttccatcctccagatttagagctttcctccatgtccgccagccactacccagaatgaacctcccaaaagaacctccaaattgagcaccctagactggaccccaaattttccacctctcaaatttggatctctaggctgagatacctcctccccagactgaatccttacacattgaaccactagaaaagtcttctatcccgattcctccagtatcaacctgaaccccacaccccagatagagctccccccgcctaccccactttctcttccccagattttcattcattcattcattcattagt

SEQ ID NO: 137469 - DNA, 2144 bp, Homo sapiens
tttatacgttcttatacttttgtgcttttctcacaccccaggtactcagcaagcccttgctgatagtgtactgagtgggtgaataaatgattaattaacatttatataccatttaatctgtagtctgatgtgttttatttatattaaattatctaattgtctccattaccaatggacttcagtcctattattattttgttttggttttgtttttgtttctcaccagcctctacattaaatagattctattattatctgtatttatggatgaggcgtcctaaatacagagctgttaaagaacttacacaagctagtgaatggcagagcttaggatttgaacccaggaagtctgacttaccatcccacatgcttaaccactacactctgctgagtgaatagagagagcgggtgaatgagttgttgagtgagggagtgcacgtcatcagaatggaggggtaggctttatggtagactggggactcagggatgaagctgaaggacttacagatctagagatgggggtcaaggttatcctagggtggtattaggcttagagtggcatgggaactgttttaagaattctgggggcttgggtgagggttacgatagaggatgatggatcaggggttactgtttctcctttccagttgactgtgcagcaaaaggtgtttcacattgccaatgagctcctgcaaactgagaaggcctacgtttccaggctccatctcctggatcaggtgagtggccccttgggggtacgagggccccaggaccttgtaggtgcgtttcaaggaggcagtgatagggcctgagttcaatcccaccattgtggccagaatttagaggcagtaaggctcctctctgaccttgaagtcagcttgtccctgaagccatctctgattatgccccaagcttgatcagtgagggctgataccaaccctcactcctaacgctgggcaggtacaccagccctgactgcgactctgacactagtactgacttggacccagatcctgaatttatccctagctgtgaacttcattctaaccctggccctattccagatcccaaatccactagaatccctgagagtagagatttttatctttgttcactgctctatcttaccctctatgacagtgcctcgcacacagcagacattcaaaaatattcattaaatgaacagatctaattccaactttctctctgaccctgaatctaattctaagcctgaccttgatcctgacttctaattgttccaaagcctaactcttggcagcagggacccctttctgtgcccaagcagcctaacatttcttcagaaggcaccctcgcacttgagttagatctcagccagaatacttgctctgccgggaccaagctcaagtgtgggggccaaagccagggactgctggaataacctgaaatccatctccccaatatataaccctaaccccattccctgtctcctcagtctcaagaccaatgctgatcccaaagctccacaagcctccccacaaatactgccctcacccttcaccagccaagccccaggcccagctgggctgagtgcttctgccctgccccacaggtgttctgtgcccggctgctggaagaagctcggaaccgcagttccttcccggccgacgttgtccacggcatcttctctaacatctgctccatctattgcttccaccagcagttcctgctgcctgagctagagaagcgcatggaggaatggtgaggggccctagacctagactgcccactcccctgtccacctgcctgccgagcccagacccagaggtgtacacaagacttcatttctgcttgctcttcctcttagtgacttttgaaaaaggaatcagagccgggcacggtggctcacacctgtaatcccagcactttgggaagctgaggcaggtgaatcacctgaggtcaggagttcgagaacagcctggccaacatggcgaaaccctgcctctactaaaaacattaaaaattatcctggcgtgatggcacgcgcctgtagtcccagctactcgggaggctgaggcacaagaatcgcttgaacccaggaggcggaggtgtggtgacccgaaattgcaccattgcactccagcccaggtgatagagctagactc

SEQ ID NO: 137470 - DNA, 1430 bp, Homo sapiens
ctcagcctcccgagtagctgggattacaggcatccaccaccacacccagctaatttttgtatttttgtagagacagagttttgccatgttggtcaggctggtctcgaactactgacctcaagtgaaccgcccgccttggcctcccaaagtgctgggatcacaggcgtcagccaccgcacctgacccttcctgtatactttaaatcatcgccagattacttataatacctaatacaatgtaaatgctatgtaaatagttgttatactgtactgggttttatttatataatttttattgttgtattgttattttttgtctttttttccaaacatttcgatcaatcagcctccatgcagaggccgaggatgcaaaacccatgaatgtggagggccacctgtatgccacatgtctgtgattgtgagttcgtgtttctgagtgtgtggtatcatgtgactttatgctgttttgccactgtatgtgattgtgtctgacatggtataattgactctgtgcctatagtctttgtgtgtaaccatgtttgcaggtgtgacatggtgtgtatgacactccatggccctgcaattgtgagacatagtgtaaatgacaatgtatatcttttgtgactcagtgaaaccatgtttgaagaatgtctaactgggtatatgattgtctgtggttgggcggttgtatgaagctgtgtgtgagatggcagaattgccattgtgtgactctgtgtctttgtgactgcatgaccatgtttgcaggtgtgtgtgatactgcgaggctgtgtgatcgtgtgtgaggttgtggccgcaggtctttgtgactgtgtgtaactaggctttcaggagggcgattacctgcagttgggtgaaatggtgtaaataacaccaagtgtttctatgactgagtgggcccatttgtgactagtcatttatgagactgtgtgtgatataagctaacagaccctttgtggctgtgagtgggaggccatgtggttgtggcacagcataacttacaccatgtgatggtggtacctccgggagctcttgactactgctcactctcttgtcctcacacctgtttgcctccatctctccctatgcaaggggtttttgtggctcccttctgctacaggatgaatgtcagcctagcatccaaggcctttcccactcctctctggccccacctgacttctctatcatttgaggcactcccacagccccctgcccagccaggaccacatgagccccacattcctttccttggggcatgccatccctggggtgggggtccctcactgcctcccagaccaaatcctctctcctaagcatgaccatcatctcctctagagccaaagatagaggtggctttaggggacatacagtgagggaagagggacagtataaaaaggcctcccctttttctga

SEQ ID NO: 137471 - DNA, 3350 bp, Homo sapiens
gagtggccgggcatggtggcttacgcctgtaatcacagcaccttgggaggctgaggcaggtggatcacctgaggtcgggagatcgagaccagcctggctaacatggtgaaaccccatctctacaaaaatacaaaaattagctgggcttggtggcaggcacctgtaatctcagctattcgggaagctgaggcaggagaattgcttgaacccaggagtcggaggttgcagtgagctgagatcgcaccattgtactccagcctaggtaacaagagcgaaagtccatctcaaaaaaaaaaaaattaactgagtgtcctgtattttatctggccaccctatccattctcctccactgagcttccccagtccccacaggctcgccctcgttgcctttcctgagttagagtctttgtctttgagattgggagctccctgagggtaagggtcaagattgcccttctggcctgctgaatgcctgggggggcaggggtttgagagtggggcaggaagggtgcataccccacccccatccccacagcagagctggcacagtgcactggcactcctggggtgcctagagtatgctttcctaggtgacaagagatgtccgagtggcagtggtggttgtgtgtgtgcagttgtgccgagcacggtgcacacagacatgagtagctctgtggttctctctctgggtctttgagggatgtgcacagttggtgtgtggctgggtacatttccacaaagtgttatcagatttggtggtggctgggtgtggtggtacacacctgtagtcccagctacttgggaggctgagacaggaggattgcttgagcccaggaattcgacaccagcctgggcaaaatagtaaggcctcacctcaaaaataaaaaataagaaagatttggtggtgtgaccaaatgtgtgtgacgggggctttttggtgatctctgctctactgggcattggggaattataaatccgttgatggaaggggcagtgctggtggaggatcttgtcaggtgtggaggtgtgggtgtgggtgtgataatgttgtggattatcaaccacaagaaaaatgggctggaattgggcacactggctcatgcctgtaatctcagcacttttggaggcagaggcaggaggatctcttgaagccaggagtttgacaccagcctgggcaacaaagaaggaccccatctctacaaaaaaaattaaaaatagccagccatggtagtgagtacctgtagtcccagctacttgggaggctgagatgggaggatcacttgagcccaggaatttgaggttacagtgacctgatcacactactgtacttaaccctaagcaacagagcaataccctgtcttaaaaaaaaaaaaaagggctggagaaaatgaatccaggaccttgctgggtagggacgggatggggcagtgggaatggctgtggtttctaggaaggaggaggggggcctaccctgggagctccccaagggcagggatgggattttctcatctccaagcacagggtctactaggttcaaaaatattctggagaccaaactcagccaaggaaagccatagagttcagcatggtcatgaggggccactgagagctagctgagaagtttctttttttggtgtttttgtttgtttgtttgtttgtttgtttttgagacagagtttcgctcttgttgcccaggctggagtgcaatggtgcgatctcagcttaccacaacctccgtctcctgggttcaagcgattctcctgcctcagcctcccggtagctggtattacaggcatgcgccaccacgcccagctaattttgtatttttagtagagatcgggtttctccatgttggtcaggctggtctcgaactcccaacctcaggtgatccacccacctcagcctcccaaagtattggaataaaggcgtgagccaccgcgcccggcctagctgagaagtttctattttcccatggacagtagggagttacagaaggttcttgtgcaggtaagtggcatgatctgagctggactgtacgtaagttcattcagccacctggagggagcaagacttggagccaaggaggccactgagggaaaataggagacagggaaatgtaggcagagagacaagggagagggagttctgaaacgagagggagggatcttgaaccttctcccgctcagtgaaacctagcctggttcttggccaggcctaggctcctaaactggacccctgttcaactccctgtggacagggttgaggggtgtccctctgactagctacactgcagtttgtgactttcggaagccgttgggtccacccgcccctcctggttcccctcttttccagcttgcccttggagagcagggttaataagaaaggaatccagtccatgaccagtctgcccaaaagtgtgccattcattgatttgctctgtgaccttgggcaagtcactgcctctctctctgactccatctcctcactagaaactgggctgacaatctcttttcctctcacctgggactccagggaatctttgcatttcattcagcctcctcttcctgcagggctgcctgcaaggaggcagagagaatggagaggcaggtctgtctgtgggctgtcaggtgagatgggtgaggagggagcaatgggtgggctagggcagggccatggaaagtgggatgtatggtcactccatcccgaggaccagcactggaggagaaggagagcagcattatccagggaccctgctgctttgctacagatagggtagggagggcttgcccagagaggcctgcctgctttgaggtgtggagataggtgggctcctccaggcccaaggaggcagacaaggggcaccagggaccctggcacctatgtgtgtatatctgaggaggggtctctgcatggcagggtgcctggctttactcactgcctctctggccctgtcagctcctctctgtctctctcccttgctctggccatgtgtctctccaaccacatctccgcctgtgccaccctccaggtgattcatcttcctcacccccacgcccagggggagggcagggcaagaccaggccaggatgtgctgagcagggcagggtaagcggcacagctgagtggagaggagcgcctcctccatcctggccaggccctgccagcttaggtggggaaggaagtgaggaacgacacccaaagcaaggtacagagttggggaggggcgctcggcctggggcctggggcaccctgttccctcagtgctgggaaaggaccctgatctgagtcccctggggtggacctggctgggatgtagccaggggtgaggtcaggggcctagggaagctgct

SEQ ID NO: 137472 - DNA, 1595 bp, Homo sapiens
aaaacctggatttcccggccgggcacagtggctcatgcctgtaatcccagcattttgggaggccgaggcgggtgaatcacctgaggtcaggagttcaagaccagcctggccaacgtggtgaaacctcgtttctactaaaaatccaaaaattaggcagatgtagtggcgtgtgcctgtaatcccagctactcgggaggctgaggctggagaatcgcttgaactcgggagacagaggtagcactgagctgagattgcgccactgcactccagcctgggcgacagagtaacactctgtctaaaaaaaaaaaaagaagaaaaatctggatttctggattcccttgaaatattggaagacctgacaatacagcgccacattactgcaagatgacacctgggtggaggggagaagctgctgcttctacttcaggttaggcatgtgctttccagtttaacccagtccccaccattccccatggccttagactgtcccactctacagaaagttcctcactttatactagggtctgcactttacagaaacatccttctctttacagaaggggcctcactttacaaaaaggagttctcctttttaacagtcttctgttttgtcatgatccttaagagtcctttggttacaaacaggccatccattttacaaaagggcctttagagaactctcctcactttacagcatgtccctccactttgaagaaggctcctctttttggaaaaacttcttccctttacagaagggccttctgtttatcaaagagatctccatttcacagaaagtgtctccgttttgaaggatggaacactcttcaggaaactcgaaagagttaggaagctcctgacttgccagaatggcccccacttcttgaaagtgtcttcacactatagaaagtgcctccatttttctgcagagtccttatgttgagaagaatagtcgacttcagggaaggaacccctgagctacccacagggttcctgtaaacagctccttctgcacatttcacacttgaccgagctttgtgtttgaactttgagagacaacatctgccaggtcaggcagcctgggtgcagtctggccttgaaggcggagtggggcagctggcctgcagttcacattcaaggggcaggtgggaagaggtggggcagttatggctttttttttttttttttttgtcaagcggagggatgccccttcccctgacagaactggcttcccaaaaggcactttcctttctgctgttcttctccactccctctgctccctttccccaccccacccccaggaattccagctgtcccaggagcctacctctctgcccggaaaggaaaagatttgagggctgtagggagaagtttgcctgggctgtcaggagacctgcgtgctaggggctggcttctgctcaccctaggatctcgctgattgctcacaacaagcagaacacacgttttctccccattttagcatctctgcagagctatccttcatagctgtgggccccaaatggggaaattggggcccagagctttgaagccacttgccccaggacaccagggagttaatggccaagggccagtctggg

SEQ ID NO: 137473 - DNA, 1093 bp, Homo sapiens
tagcggctttgcctcacaggaaggggaatctcagccagcgtggcagccccagcatctggtaattactgctcccagtgctcccagctgcagttccactcccttcccttcctgtcctctgaagtccccagctcctcccggggcgggggagggagatgggcgggggtggagctaccgccccctatcctctggcctctagtccagagaagcagggaggaggtggccaggccctcacagtaatcaaggaactggaagagggatgggctgcttgtgctctcatgtggctgcttggtttgtctgtgtgtgtgtgtgtgtgtgtgtgtgtgtgtgcgcgcgtgtgcgcgcgcatgtgcctggccttctttgtccccgtggatctattttgtgtgtgtgtcttaatgttcttgtttctgtatggccatctgtatgtttgcatatagatccatgtgtgtctctgggtctgtatgtgttacgtgctcctctgtgcctggttgtatgtcaccttggccctaagtatgtgggagtttctagatgtttctgcgcatgggtctccttagatcttgtggatgtgtctgtctgtttctatacctgtgtctgttcccgtgcctgcgtctgcctctgcatgccccctataggtctatggttgtggtgtagggaagggggtgtctgcttgcttgtatcttttggcctttcctgatccttcttcctgctgtggagccttcttgcaaacccatgacattacgtacttcaaatatatgcttcactcatacctccccacccaatatccacacttttgcccactcttcttcccttgtctgcagaaccattctcagtccatctatacctaaaaaaaacacaccccatcctggatggtgcaactaaaaaccacctcctttaggaagtcttctctcctcccccctccaaatgtgatttctttcccaactcagcagtcactgaaggtgtgctctgtgactctggacacagacacacctgggatctggtcccagctcaaccacttttagctgtcctcaggcaaattattttgcctctttgtgcatcagtttcctcatctgtaaaatgggtaatagctcaccgg

SEQ ID NO: 137474 - DNA, 1051 bp, Homo sapiens
gatgtgctgaggctgaggagcctgaagacaggacatctaggtgacagcacccagttggcatcagatatgcctatctgggtcccagagtaagggcaggtgggtgaggggcacaggtatgtagctgagactaagagggaagagccctccttggcgcttccccatggcccctgcagggaaagggttaaatcgcggagggaaggcgcctgtggaaagcgggaaaggcgggactggcagggctggcctttgggagctgcagctggcatagaagcccttccgcccgccagggcctgctaggcctgggccgccaccgcccacaccaccgcctttgccttcgcctttgcctttgccttccctgctccccctccagccccttccctgctcccctaggctgggggacccccctacctaatgcattccaggtgtagacgcagcccctcccccaccgcgcgggtgtgggaggggcagggaaggctggggtcactttcaccgcatctcttagggagcatctcccaggcttgctgactgcttctctctctctggagaattccctcagggatctctgtttgggcctccctgactctggcaggggctggcagcagagagagccccccagacccaggtccgccactttctaaagtgtcacgtgaccttgggcaagtcatctcacccctctgagcctcggttttctcatctggaaaatggggctgtcattcccaccttctagggttgttgtaaggattcaatgccacagatccatccccagcccttggcatggcacattgtcaccatgttcaacagatggccctggcctgccctttttgttcctgcccctctgcctgggtctgtatccctcgctgactaccatgccctgtgtggacctttctgtctctgtctcccttctgacttgtcccttccttttgtccatctccctctatgtccatctctgggtctctgtggttttcctgtcctctccctccttgtgtttgtcccagtgtctttctcttatcatctgtcttttcccctcataatccttctgtgtctccaactctca

SEQ ID NO: 137475 - DNA, 1711 bp, Homo sapiens
gctgagcccgcagtcccgccccccgatcctgaggccgctgctccgccgggcgccgggcctcctccgcccgcgcctccgccccaggagctggagccaagcggggagctcgggccccgcgcccaggcccggaccatgcatggccaccgagccccggggggcgccgggccttcggagcccgaacacccggccacgaacccgccgggcgccgctccgccggcctgtgccgactcggaccctggagcctcggaacccggactgctggcgcgcaggggctcaggttcggctcttggcggcccactggatccccagtttgtcggaccctcggacaccagcctgggcgctgctccaggccaccgggtcttgccctgcggtcccagtccacagcaccaccgggccctgcgcttctcttaccacctggagggctcgcagcctcggcctggtgagtgagcgactgagagagcatgggagcccgggccacgggcctggtactgggagcgggttcttgttctcgagccctctaagccccacctcggaacaggctcgcttacctcggccctttgggttccctcaaacccctcctcctccccacgtcccttggccttatgtccagtcctttcaacctctgtccccatctcctctctctgtcccttgtgcccctcaacctctccaacccccttctcctctgtctgctgaggctaatgggagagggagcactcgcgagaaaaagagggaggattgcaaggcagcaatccttggatatttggttggggaaaccagggtttcgtttggagaacagaagaaaaaaaggagccttacatttgccaagcgcctacattgtaccaggcactggactgggtgctttacatggattttcatttcagcttcaggaaccctcatgaagtagataccattagtcccattttgtagggaaggaaactgaagctcagagaagttaagcaacttgcccaaggtcacacagctagtatggagccacgattcaaaccagatctgtttgtgtccaaagtctgtggtctttctgcttccccaaactgaggctggagaccatgaaagtaatgccaagccttctgcttatgtgattttctcctgtactattcagcagccctggagtatgagcggaaaaaaaaaaaaaaaaaaaaaaaaagaaagacggtggattgatccaaggttgagattttgccaggtgtgtgtggcgggagaacaagggaaggaaggagtagaaggtgctgagagagaaaggtggaagaggtgggccttgggagtcaggctagaggagaaggctggaggggctgataggtagggagacagcagaaaagccaacagaggcagaagccagttgtagcaggagctggagagctgcaggtccacgaggttggttgtgatgtgaaatcaggatggtttcttggatttgaaaaggtggagcagctttaagtcaggctgaggccacagaccactgcctttgtgctacacagacctgagtgtctgaggagcacagcaggaccttccccatctggggacattctcatacgggcctgagcccaggagccacagaagaagagcagcgcacatctgccctgccttccactgggactgaaggagttgttaagcccttgggggctcccgggttcacacctcaggctccacagatctctgggaccgtggccttgcaccaggtagcagtagtgaagtataa

SEQ ID NO: 137476 - DNA, 1040 bp, Homo sapiens
ccgggaaggtggttgggaatagctaaccaattcacttcaggtggggaaatactcggccagacacgtgacccaggcggccattttctcacaccctgctgtcgccatcttccaggcagacaaagacaccatcccccacccttgtctgattcgggcgtggtgactgcctggttattgagatttgggagcacgcatatttaaccccagacagatgcccgcagacaaaattttggcttgcaagtaaggtatatggccgcaccagtcgacccgccgcttcttcccggtcatttccccgtcctccttctccctcctccgctatttccttaactacggggcaggcaggaggcggggccagcgtggtcgcgaagaagggacgggcgggcgtgagctgtcagtcagaagctccgcccccccccccccccccccgcggagaccgcacggtgggcggagtcgggcgccgccggcctgggatccggaagtcggagcctagctgcgcgagagtttctgctcgctcaaccgagttgtcgtgttgccctcgcttctcagatccccgccggaagtgtaagtaagaaacttctctcctcttttctcacaatgtgcgctcacctagacggccgggcagttaggatcgtctattggatgtgaaaccagagatgcccgccaacctggaatagagaggtaaacagcaggatcccttccagggtagaagggaccggaagaggggcagggatcgcggcacacgtggagacgcgccgaattgccttttcgcggagtggagtttgccgggagaggggcattgccccatcccacctagaaaggtgtagacccgggacacactgtgtagagaggcacaaacttcacttgtgtggtgaagcgttgatcgtcctcaagatagtgaggcttcattctgcattcaccttgtatagacaggagtcgacccaccaaaggcatgggggacatccaccccaaccgtgtagagacatctccctccacccagctgagcagcgcagacttctcccgacttaaggcacttccttggcttg

SEQ ID NO: 137477 - DNA, 1049 bp, Homo sapiens
gatatgcaggtctccctccctgtaatgttgagagggagtgacatcgctgattacctggcagttcagtgcgtatggtctctcccctttacccaaggtagtggagctcagatctgtttctctccacccagggtagaatcacagacgcccccacccccaagtattagggctgatctattaatttatagctgcattgccagccccctccacacaccacccatgcagagaaccagagcccctatttctttcagtgttagtgtgccgctgacttcaaccagcataaaagatgaaagttgtcacagtccaccttccatagaagggtccagaatagctcactgcaggtaaggtgcagacccgcttattcaaagctgcatagttgtggaatcaggcatatcgatcctgtaccacagccctctccagggtgaagagacgcaggacccatccccacaatctagagataaacagatctgtgattctttccccatgcagcagagatgcacacagccactttgtgggtttccccagtttctctgcaccccagagtagagggacagatggcaatccccccaacccaaatcaccaaggtatagaccccaggcatatgcaggcacagatttttaccccctcctccaagattttgtacttatctcaatccatatagacactcaggtaagaatccctgttctcaggccccttttccccagggtagactcctgagatctatttacgcccttccccaccacctctcccagggtagatgagatatagaatcccctacttgggaaaagaggcactattatcaccccatatagaaatagaccatccttgcatgtccctttcccctcagtgtggaggtgttgagcactagtcccctacctagaatataacactacagtgtggaggaataaggaccaaagaccccatctgaccccatttgaccccactgggctcaaagcccagtggctttgagccactgactccaccccggatgaggttgagacctattcctccctttgggtagtatgacactgccttctctgtgtggactcagc

SEQ ID NO: 137478 - DNA, 1870 bp, Homo sapiens
agtgaaaacaacaaccaccttttgagaggcctgcaagtgaagcattgtccttgggagagccaagtatcaaggcaggagcttggacaattgatcccagggagaggttgttaggggagtgctgatcacccaggtgggagtttcagagaatgttgtgggaaatttgatgctacggcagaggaaggatgaggggaatgaagtcagtgggtgtacagggacatctgtgggtgacagtatgggagatgagggattagcgaatacagagatctgcttttgagtactgatgaattggtgattttaggcctagatgatattggtggatgcattgaggctcagagaggttttaaaaaattcttcaaggtcatatagctaggtagttgttgagccagagtaagaatgtctgctggttataaaatggtagctgttttctctctggagttgttgaaaaacctatgagcagaggctcctgagtgctgggagggatgactgactgcacccccttctcctttttccctccccccttctcttctcccctctgaagcacattctttttctctccaagtgatgtgttttctttcactgtgtgcttgtatccattgcaggcactcagtttccagggaagttaggcagatggaaattgttgagtgaaatgtccagacctggttcattccaaacctcacattttttttgttgttgttgttgcaacatgagtactttagaagaaaggagactggtggtctgtttcgtgtttatttaaactgtgtttatttaaattcgacccattcacatttgttatgagacgtttatgtctggtcagatttctaccgtcttattttttatttatttattttttgagatgcagtctcgccctgtcacccgggctggagtgcaatggcgcgatctcagctcactgcaacctccgcctcctgggttcaagcgattctcttgcctcagcctcccgagtagttgggattacaggtgcctgccaccatgcccagctaatttttgtatttttagtggagacagggtttcaccatgttggccaggctggtctcgaactcctgacctagtgatccgcccacctcagcctcccaaagtgctgggattacaggtgtgagccaccgtgcacggctctctaccatcttattttatatttattatttattttgtttcctcttattcccttatttatgttttgctaacttgatgaagtttttaaacaatcctccatcggtaattaagttatgttggtaattgtattcatatttatatcaaacataattaattctgtatttatcactttaccaaagttaaataatgactattttgtaacctaccctttcaaaatgaaacctttagcatgctttcatgcttttgcttttccaacccccattacttgattcctggattttattgaaataatttggtatttcagttctgagctatttccttatgatatgcttcttcgattttaagaatcctttttttgttgtttttttgagacagggtctcactctgtcggccaggctagagtgcaggtgtgatcatggctcaccacaacctccgcctcctgggctcaagtgatcttcctgcctcagcctcctgagtagctgggacaacaaacatgtgccatcacacctggctaatttttttttttttttgagacaagagtcttgctgtgttgcccaggctggagtgcagtggtgcgatcttggctcactgcaacctccacctcctgggttcaagcaattttcctgcctcagcctctcgagtagctgggattacaggtgcgtgccaacacgcccggctaatttttgtatttttagtagagacggggtttcaccatgttgggcaggctggtctcaaactcctg

SEQ ID NO: 137479 - DNA, 1010 bp, Homo sapiens
ggcagcattttggctgagtaggtcaagtccctttggaggcaatggcctgagcagggtcagcaggaaggatggttctttccccacatactgagggcatctgcccaggtttagtgggctgggactccttagattaccttctcattctgccagctccctcatctcagcctggcacttaaattgttgagtttcccccagtaggaagttctgggggaaagaggagtcacaagcacatattcaggtttctctctgtacagaattcctctcagaattatttgagtttgcagtgaaataatgtgcaaatattatatccagtacttcctctgatactattgctgccatccgcatctcttgtcttgtgctggatctagacagacatggtatctgaggcttcctagctaggttcccagtgtggcctggccttgattcagatgtcaacaaatatcgtgtagatggatgacggctcttttctttcttttttttcttttgtagaaaataaaaagccaggtgaaggttccaagggccacaagaagataagttggccctaccctcaggtaaggtatgcctgttgttgagggtaaggtcaagaacaggttgcttgtcctgggagaggcccactaaacccagtaaatattgggtgactctggacagagtgccacattggagtcagtggatctggctttccctccttctctgggtggccgcagcagagaatcagcagcatttttcccaagtcatatgcagcttcgtgcttgatttaccttggtagggattatcattatccccatgttttagttgaggaaactgtcagtgagaaagttcctaggttcaaggtaacgcaactgggatttgagactgtctgattctcaagtccctgtttcttatggagaagagggaggccaaaacatcatctttggttcctggatctcctggtcctgctgggaaaggtgtgggtaagtaaggcttgggaaagagcaatgagaagaaggtataggccagagaaggcttgggtt

SEQ ID NO: 137480 - DNA, 1054 bp, Homo sapiens
tagtagagatggagtttcaccatgttggtcaggctggtcttgaactcctgacctcaggtgatccacctgccttggcctcccaaagtgttgagattacaggcgtgagccaccctgcccagccttcttccttatctttaaatgatgaagcatcccaggaccttggcttctttccatctctggtcttaagtggttccgcctgcctaggatacattctctctctgctttttataccctcttttctctgcaactctttccttcccttcatctctctttttcttcttctcaaaccctcatctcctgatgtcatatcttccctctccctggaccctgctcctgccacctctgccatgtcgcaccatttcctctgtctgtcacccatccctcccttaggctgcagacccagtcagctccagtaccagtgtgtgttcacttgttaggttgaggagatgagggagaagcagcaagccgcccgggagcaagaaagacaaaaacgcaggaccattgagagctactgtcaggatgtcctaagacgccaggaggagtttgagcataaggtaagagtgcagcccttgcccctgggtaggtttgctcaaagcatcttttgccgtttttctgtgaaagggaagaaggtgtgaagttgttggaggggaacaagggaatcagtgtagagaggatagaaaaccatggggacggacgaagggagggagggagggataaagggagataaagggccattttgagccttacccgtgactggacacctctggagagctcctctctcccaaggttgagcctgaagactggggctggtggcggagttgggggctgggagagttacatgtgaccaggggatggggttgggggagagggagcgaaagtatgaggagaggattgagagacagagaggagcatatgtgaggggatgttgtcttccttctagggcttcttgctgcctttttggcagatgttcttgtttcacacacagaatacacgcttgccagctcatactcccttttctgatatgcagtgtgtatgcctcccccatcctgtgtcc

SEQ ID NO: 137481 - DNA, 1046 bp, Homo sapiens
ccattgtgtatatgtgccacattttcttaatccagtctatcattgttggacatttgggttggttccaagtctttgctattgtgaatagtgccgcaataaacatacgtgtgcatgtgtctttatagtaacatgatttataatcctttgggtatatacccagtaatggggtggctgggtcaaatgatatttctagttctagatccttgaggaatcgccacactgtcttccacaatggttgaactagtttccagtcccaccaacagtgtaaaagtgttcctatttcttcacatcctctccagcacctgttgtttcctgactttttaatgatcgccattctaactggtttgagatggtatttcattgtggttttgatttgcatttctctgatggccaggactcacatgattttttaagcctcctatagtttaaaaagccctgcttctctttctcgctctctccccctcctcccctggaccattctctttttttttctcctttaggaggaagttttgcaggaattaaatatgtttcctcagctggatgacgaggccacgaggaaggcttattacaaggagttccgtaaggtacagggttccatttcttcaggcttttgcgggagggttccagtccagccccttttcctctccatttctgttttttcctgactgagatggagatttttgtttcacaggcctgcatcactgctaccctatccttttcctgccctcatctcctggtcctctgccctgcaggtggtggaatactctgatgtgattctggaagtcctggatgccagagacccattaggctgccgctgcttccaaatggaggaggctgtcctgcgagcacaaggcaacaagaagctggtcctggtcttgaacaagattggtgggtgttaggcaggattgggtgtgacagggaaggtgggcaggccatctttaacgtctagcttggaccagacactgaacccagcaactcagtgatactcataatagtcatgcaaagtagaaatttttgttccgattttcaaagcctgtatcacagag

SEQ ID NO: 137482 - DNA, 2218 bp, Homo sapiens
cccacattcgtgtgggtgttgtgggtaagacctgctgtgtggtcatggggctcaggcttctttcttgagcggacacttcgctgggggaaaggatcctgggagcttcattgtcttttgcggggagagaggagtggttcaggagaagggtttcgtgatttgtaacttggatgggtgggcatcactgcgtattgagtattagattcatggagcaaatacagggtgccaggcttggacttggtaccatctcatcctatcagagctatgggaggatggggtgaccgtctaccttttacggatgagaattctgagtgaggctcagagaagggcaaagggacttttggagcccagccctgtgcaagacaaggcagagctgaggatcaaaacctgggcctttctggagcacaagtttctgagggagggatgatgggaatggagtagggaaattgagagaggcagagatagatcaccagagaaagaatgtgaagccacgtgagaaagacattggagagagagctagacactgagaaggtataggtatgcataccaggatagatacagaagaagacacagagaacgcactgggaagccagatggcaggattggtggggaatggaaagaggagacagatttacatgatggaggcatgtaaagagggagatacaatcagaaacaccaaaagggacatagaaacagacatgcatacagagatctgccgagggagacataggaagggtagagataacccatgtatgtagagaggcagacatgttttctcaaagaatgagagagaaaaacatactacagggatagagacagattcagagagagacatacatggaagcagactggacaaggctgtagatacagaggaacacatacacatagctcttaagtacacatacagatccacaaacacatacacagacccacgctacagacccagagatccagaggaggcacatctagcgagacagaaccacagtcaaaatgcatgtagaccaagcccttcccacacacacccaccccaacgctgctcccccaacgcgcatagaaccacaaggagggctggatgtagcagctcattcatgcctgtagccccagcactttgggaggctgaggcgcacagatcacttgaggtcaggagtttgagaccagcatggccaacatggcgaaaccccatgtctactaaaaatacaaaaattagatgtgtgtggtggcgggcatttgtaatcccaggtactcgggaggccgaggcaggagaatcgcttaaatctgggaggtggaggttacagtgagttgaggttacagtgagttgagatcgtgccactgttgagatccagcctgggcaacagagcgagactccgtctcaaaaaaaagaagacacgcatgtgcccacatacactttgaccctcgaacataatcacatacctagagttacagagggacacaaataccagacatgtcactatgaggcaggtatgtgtacctgtacagagagaaatagagacatacagagaggaggttaaggaggcgcagacagggagagagtagaagagacaccgtgagacacatacagagaggcatccatgaagtgaccagcccacagagatgaggagcatggacagaggctgacaggagttggcatggagggaattacaaatagaggcaggattggtggggtggagagaatcagagagaaaagaacaatggccagaatgagagacagacaaattggcagagaaagaggtgcttagatacagagacacagagagaaacaaagataagatagagaaagagactgagtgggagagatacaagaaaaggaaaaagtggtgatactgagaatgggaatgaccgagagagagagagagagagagagagagagatgtgtagagacttccatgcatggtgataatttagaatgagaatgacctagagagagggaggggggagagaggtgtgcagaggcttcatgcacgagaggtatacttagacatataccttttttttctttaggcaatcagctttctcgggttgaaacaagcatatgcttgagacaatagtacacacatgtaaattgagcacatacagaaagagaacggtgagaatgaggcccagtgaggggaaacacaaagacatccacaggctgagaatggctgacagatgcacaaacagcaaaatacacacctcaggtagacagctgcacagagagactggc

SEQ ID NO: 137483 - DNA, 1024 bp, Homo sapiens
cagaccactgagcactttctgacggcagtggcccaccgtttggggaagaagaagaagggaggcttatatagtcaggaacaggcggccaaagctgtcctagctgactgggtgaggtgaggagggggttaggggtaagggtgaggcccgctggcagcctggctccccaaaggggctcatctgtgctcattgccgctggggcagcttgacttcctgggtcttggggcagaggatggccaaggtgccaggtcatgtcctgctcgagactttatgcccagtgattatccagcaactcaactccttcttgttcagaagccactgtctgggttttcttgttccgttgctgtttctggcctgcaaactcatcgtctcttggattgtcattggttctctcagtgacagcaccactcatctcccctatctcccaatgcagcgggaagatcagcttctatataccaccaccagccactcacactctgcccacccatctcagtgctgagatcgttaaggaaatgaccgaggtctttgacatcgaggatactgagcaggccaatgaagacaccatggaatgtaagtgtgggcagggtgggtgcacttggtcttgcactagtggggccacacagacctgacagcaaatcccacttttgacctcccgcttccttggccctacttgggctttgggcaagttgcttaagcagcttcaggcctaatttcttttcttgcaaggtggggaattctaatctggccctggcagggcgggttgggggagggtggttgtgagcttttggtaaataacgaaagaaaaagtgcctggtacccattgaggtgctctggaaatgtgaagctccattcctgtctcttgggacctggaatggactgagacattctctcaaaaactctctaatgttgccttaggctttttcacaaccacttcaggtccacttctcgattttccttcttacccctatcggtgagtaaggtacccaagtcacagaaagctgatatttgccaaaaggatgtcagcaga

SEQ ID NO: 137484 - DNA, 1169 bp, Homo sapiens
agcccagtgtgaagagggcttgtggaattcccattttccacatgaggaagctgaagctctgagtccagctcccagcaagtgaatgtcctactgcaaaacccatgcttttaattcttggtgatgtggcctctcagcaggagtgaaaaagttcctgcacctgactcccctgggaagcatccatgtatccttttcactgaggcctgaccagggggctggcaacagaggggagccagggccctgacagtggtgttggttgtgttaaaggcttggccaccggagaatctgatgagctgttgggtgacacggacccacttgaaatggagatcaagttgctccattctccgatgacgaaaatagcagatgccattgaaaataaaaccaccgtgtataaggtacctgtcatctttgttcatggcaaccctcttctctccccagggctctgggaagtggtcaatcccttttacctgcctttcatgtggtgagatgtgggtagttcactcgctccctatgggcttctggatgcctggcctagtatatcctttaccaagcaatgacaggtccaggaaacaggcatgctctctaaggcagctttcccagctctggttctagcccatagaacaggtatcactatctagccacccagttgtccaacttgcaaacgactctttcttctccctaactagtaccaggattttattttattttattttttatttttttatttttttttgagatagagtctcactctgtcacccaggctgcagtgcagtggcgtgatcttggctcactgcagcctttgcctcccaggttcacatgattctcctgcctcagcctcccagttagctggaattacaggcatgcgccacgacacccggcttaatttttgtgtttttagtagagacagggttttgctatgttggccaggctggtctcgaacccctgacctcgggtgatctgcctgcctcggccttccaaagtgctaggattacaggcatgagccaccatgcctggcctgggatcttatactctgtcagtcagcaagacctatgtcttctccctcctaaatcttttgacaagcttttcatccttttcatccctaccattcctgttaccctaaactaagcttccagccctcacttacttggacatatgtcccaaggtttctttct

SEQ ID NO: 137485 - DNA, 1146 bp, Homo sapiens
gaaggcctcctggaggaggtgaagtctggggggcatcctgaggaacaacagggtgtgtctgggggatgggaggtgtgcgtggtgaacgttcaggcttatggcgaacatacagccgtgttgccctttgctgtgagagctttgttttgagggtaatggtagagcactaagtttgacatagtaaaagaaaattattgctttggtatttggacaaaaatacttggagcccagtgagtctgaaaccctgagatagaagctgtgttgggatgatcatttcacagatagaaaaatggattgtctacctgtgaagctgagcagtggcttccagcactcaccagttttgtggtagcgtttgggggtaagtgagccagttcaggagcttggtgtagaccaaggtagatgtaggccagcgtcagcaggcctcctggtggcaagccagccaccaaaagattgcctgtatttctccatttgcagataaaatcgccagcaagctgtctgattccatgatgtctgctctcgacctctctggcaatgctgatgatggtgttggtgactaatcgactgatctcacttcccttccgctccaagcaccagttccggtggtacgggggaataccagtgaaatagtttggttctccctgaagcatctgcatattgaaagaacgctttccccactgtgtgtcttctccccctcctccagtaaaaacagtcccggctaggtgctgtggctcacgtctgtaatcccagcactttgggaggccgaggtgggcagatcacctgaggtcaggagttcgagaccagcctggccaacatggtgaaaccccgtctctactaaaaatacaaaaaaatttagccgtgcttagtggcacctataatcccagctacttgggaggctgaggcaggagaatcgcctgaacctgggagactaaggcaggagaatcgcctgaacctgggaggcagaggttgcagtgagcccagacggcaccattgcactctagcctgggcaacaacacgaaactccgtcccaaaaaaaaaaaaaaaaaaaaaatcccaaggggctgcagctgccaaacccaataccctctatttaacccctactctgttttacaagagaaataaaagaagtatcagcagagctcaggtgctaac

SEQ ID NO: 137486 - DNA, 1237 bp, Homo sapiens
cctgtaatcccagcattttgggaggccgaggcaggcggatcacttgaggtcaggagttcaagaccagcctaaacaatatggcgaaacctcatctctaccaaaaaaatacaaagattagctgggcatggtgtctcatgcctgtagtcccagctacctatggggctgaggcaggaggatctcttgagcccaggaggtcgatgctgcattgagccgagattgtgccactgctctccagcgtgggcaacagagtgagactgtctcagggggaaaaaaaaagaggaaaacaaaaaagacgttgggagtgcagtttctctacctacagcatatctcaaaggttttttttaaaaaagtattttcttaactttttaccttcatttttcaaaacaattagggtacaatttacatatagtaaagttcactctttatagttttagttatgtgagtttgtacaaacatatacaggagtgaaccactaccacaatcgaaatatagttgcatcacccccctaaaactctccaggcccttttgtagtcaactcctacccccgaccctcagattctgctaaccactgatttgttttctgcccctatagttttgctttagtatgactgtcatatcaatagaatcatacaatgagtaggcttattttatgccttcaggttttaaaaattataaacatttacattacagtaaaattcactctggtatacagttctataaagctctgataaatgtgtagagttgtgtaaccaccaatgcaaccaaggtacagaacagtcctcttagcctctccctaccaaatttattcctgctactttgtagtcaaaaccagtcccctacacccaaaccctggcagtcactggtttttttcttcgttctcttttttttttttttttttttgagacagagtctagctctgttgtccaggctggagtggtgcagtggcgtgatctcggttcactgcaacctccgcctccagggttcaagcggttctcctgcctcagcctcccgagtagctgggattatgggcgcccgccaccacgcccagctaatttttgtatttttagtagagatggggtttcactgttttggccaggctggtctcgaactcctgacctcatgatcctcctgcctcagcctcccaaagtgctgggattacaagagtgagccactgcgcctggcctttttctttgttcttatatttttgtcttttttttttttttttttttgaaacaga

SEQ ID NO: 137487 - DNA, 1093 bp, Homo sapiens
ggagtgcagtggcgtgatcttggctcactgcaacctccacctcctgggttcaagcgattctcctgccttagcctcccgagtaacagggactacaggtgcccaccaccatgctgggctaatttttgtatttttagtagaggcgggggtttctccacactggccaggctggtcttgaacttctgacctcaaaagatccacccacctcggcctcccaaagtgctgggattataggcatgaaccaccgtgtccggccatatattttcgtcttttgaagactgttatatacatgaaattatatggtatgtagcattttgagagcgacttcttttgctatgagtaatacatttgagattcatccatatttctcagtatattaatagttcttatttctgagtcactccattgtgtggatttactactgtttgttccccagttgaaggatgtttaggatctttgcagttttggacaattacaagtaaagctgctataaacatttgtatgcaacattttgtgttttcatttatctatagtaaatacctagagttggattgctgggatatatggtaagcatatgtttgacattttaagaaacttctaaactgtttttcaaagtggctctaccatttcacattcccatcagtatgaaagtttcatttccacatcctctctagtacttgggggtgtcagtttagttttttaatttttaaattttttaatttttttaatacatttaaatagagatggggtctcactgtgttgaccaggatggtcttgaactgctggcctcaagtaatcctcccatctcggtctcccaaagtgctaggattacaggtgtgagccaccatgcccagccaggttttttgacattaagtatgtggtggtatctcatcgtttttatttgcatcctctaatgatttgagcatattttatatgcttatttgctatctacatatcttctttggcaaggtgttcacatctcttgcatattttggattgttttattatttttgaattttgaggattatatgctggatacaggggtgtttttttttttttttttttttgaaacagagtcctcacccaggttggagtg

SEQ ID NO: 137488 - DNA, 1061 bp, Homo sapiens
gtacaggtcagagaagtgtggccttggaattttggagccatttgcttagttgggggtgaggagaaggtctatgaacttccctgcttcctcttgcaggctgaagcttcagaaaaggacagtagctcgatgatgcagactctgttgacagtgacccagaatgtggaggtcccagagacaccgaaggcctcaaaggcactggaggtctcagaggatgtgaaggtctcaaaagcctctggggtctcaaaggccacagaggtctcaaagaccccagaggctcgggaggcacctgccacccaggcctcatctactactcagctgactgatacccaggttctggcagctgaaaacaagagtctagcagctgacaccaagaaacagaatgctgacccgcaggctgtgacaatgcctgccactgagaccaaaaaggtcagccatgtggctgatacaaaggtcaatacaaaggctcaggagactgaggctgcaccctctcaggccccagcagatgaacctgagcctgagagtgcagctgcccagtctcaggagaatcaggatactcggcccaaggtcaaagccaagaaagcccgaaaggtaagacctctgcagtcaccacccttggttttctactcctctctcagttgattcatttgttctacaaacatttagaaagatccctgtgctcatcagggctgtggggggcactgagagtaatgtgatgtaattcctgtcttcagagagcttgcagactgatggggaggtgcaatctgaatgtaatgcagtttatgtttacatagtagctgccctgtattaggccttgagctaagcacatttatgcaggttatctcattaaatcttgaaagtaattctcatagccccaattttatggagaaggaagctgagttccagagaggtgaagcggcttgtctaggatggttcaagcagagccagtagtgggcacagaaagagaagaagactcagcctccacccacccttggtttgctcctggcctgctaggcagatgaaacacctgcttggaagtcagtgagaaacaaatccagggttca

SEQ ID NO: 137489 - DNA, 1991 bp, Homo sapiens
ctgaatgggtggctgtggtctagattccatgtgttcaatttctgtccctgtctcctcttgcctcccctcgcagctgtcatctgggaggtgctgcgcaagttggggctgcgccctgggtatgattgggctctctcagcgcttgctgtccgtgttgtcctttggcaagagaggacggtcctaggattgcatcagtctggtggtctggtggagcgggtggggtgctggactgggtagagggcccagggttctgacctgggtggatgatgggtgaatggtcctgaactctctgctccctctctcagtgtctcttgggcttctatggagcttccctcttgtgctggaaacctcttttccatcttggaaatgcctctgcccacatctgggaagtgccatagccttgagtgaatttatttgtttatttatttttctttttcttctctcaggatacatcattcactctttggggacgtgaagaagctcatcactgatgagtttgtgaagcagaagtaagtatctctgtctggtgttcatgtgtcccatgcatttggcctatttcagaactgagtgataaagccgtggtgcatggatgcatgtgtctatgtgtgtatgtatttgcatatttgcatgtatgcaggtgggattattccttgggcggtgatgggaaacaggagcagcacatgtttcctgatctgttacatatacctcaacatttgtcttgagaccagttctgcaagggagggattatcattaccatcattgtacgtatgcagaaactgaggtttagagaggtgaagtcatttggtcagggttacacaggtagcaagtagaagagttatgtttagaacttggctccaaagccttagttctttttattctgctaactagagcttcatagaaattaatttccgtaaagaaatgacatagaatggtagcttcaggcaaccaggtaccatgctggggagttgacttgtacatctcatttcattttcataactaccctgcagctgtcatcccatccccgttttacagttgagggacctggggctccgagaagggagatctgagcatggcccacagctggtatgggcctggagcccagtcctcttgaatttctggccaaagctcacctatccttggtccttggaggacatgcaaacactcacacagccacacgcatgtgcacacagaaacacacacaaagggtcaggaattcagcatgtgtgaagcatgctgctattggctgttcttcctctgtagtctttctggtcattttctgtggtggacctttctgggcttggccaggctgaggccaagacacttgcagtggggtgtgctcagagcagggggcccaaagaatggctcctctgtttacaacacacccaacaggaatctggggtcattgtgatgagggcgtcaaacttgtggcttccctatgaacaaacgtcccccaacacctctatgtggcttctgggcaagaccagtgggacagggctcaatattggaagaaagactgtagtaattagtggatgatgttgccatctggagcctgtccagtctatgcatgggtaggccatgaatggtcttagaaataaaggctttgaacctctctttccaaggtacctggactatgccagagtccccaatagcaatccccctgaatatgagttcttctggggcctgcgctcttactatgagaccagcaagatgaaagtcctcaagtttgcctgcaaggtaattggagagctccttgagcttggcaagtcaagagcatggggtgcccctggctggggcaggctgtgtgcagagcagcctgcagttcaaatctgaatgttttggtgcttctgttaattgtcaaaacactgtaacaggcactttatctgaatcatttaagccttacaacctgatatgtcattgccctgttacagatgagaaaaccgaggcccagaaaggttggtaggtgacatgtccaaagtcatggggctaggaagtgt

SEQ ID NO: 137490 - DNA, 1891 bp, Homo sapiens
cctcaggctcacctgttactcggcctcccagaaagatggataggagaaatgactacggatatagggtgcctctatttcaggtgaggcctctctgcattctctctaggccatctgccccatcctgagttcacttactgctcttcagaccccttccaccgtgtagtttcataattccctgcctaactcgtctcagtcctcccttacatggtgaaggagaggagaggaaaacctgcctgactctattccttccttgctccctaccccattttaattaaccactgctcagaggaagggaaggcctttgtggaaagggatgggctttagcgaggccaaatggcccagaggatggtaatcctaagtgtgtagggccctctgcctcccccggggagcctggggcttcccttccctccagatatacagactgagaccacagaagaggacagtgtcctgctgatgcataccctgttggcggcaaccaaggactccctggccatggacccaccagttgtcaaccggcctaagaaaagcaagaccaagaaggcccctataaagactattactaaggctgcacctgctgcccctccagtcccagctgccaatgagattgccaccaacaagcccaaaataacttggcaggctttaaacctgccagtcattacccagatcagccaggctttacctaccactgaggtaaccaatactcaggcttcttcagtcactgctcagcctaagaaagccaacaagatgaagagagttactgccaaggcagcccaaggctcccaatccccaactggccatgagggtggcactatacagctgaagtcacccttgcaggtcctaaagctaccagtcatctcacagaatattcacgctccaattgccaatgagtcagccagttcccaagccttgataacctctatcaagcctaagaaagcttccaaggctaagaaggctgcaaataaggccatagctagtgccaccgaggtctcgctggctgcaactgccacccatacagctaccacccaaggccaaattaccaatgagacagccagtatccacaccacagcagcctccatccgaaccaagaaagcctccaaagccaggaagacaattgctaaggtcataaatactgacactgagcatatagaggctctaaatgtcactgacgcagctaccaggcagattgaggcctcagtagtggctatcaggcccaaaaaatccaagggcaagaaggctgccagcaggggcccaaattctgtctctgagatctctgaggccccacttgccactcagatagtcacaaaccaagccctggcagccaccctgcgggtcaagagagggtctagggctcggaaggctgccactaaggctcgggcaactgaaagccagactccaaatgctgaccaaggggcccaggccaagatagcctctgctcagaccaacgtaagtgcccttgagactcaggttgctgctgctgtccaggccctggcagatgactatctggctcagttgagcctggagcccacaaccaggacccggggcaaaagaaaccgaaaggtgagatctctgacattgccatccttaactttgtgcttcttttccatttctacccttctagtttgttcatttcttctataaaagttttactttgagctagtccctgtgttcagataggctgtggaagatgctgagaagaaggtgatatagtttctgctccctagcagttcacagattggtgaggaaataagacatccatacactcagctacaacctgtatgtaatactacttgtatttaaatagtagttaccacgtgccaggctttgtgttgggtacagttacacagggtatgtctgaatgtcttgaaagtaactcttaccaacaagggatcat

SEQ ID NO: 137491 - DNA, 4784 bp, Homo sapiens
ctttctgtctggagcaggcaaggtgaggagacagagccatctctttcacctggtgactctggaccttccttctttctgatgatgaagtccaagcatctgaatggggatgagagaagtggcagtaattacaggcggatcccatggggccggaggcctgcaccaccgcgagatgtggccattttacaagaaagggtaagaatccaatgctgtccagtctcttctcttcttcacttgccctcttctctgcctccttccaagttttctgcaagcatgttaagatctctccatctattcctctcctcccaggctaataagttggtgaaatacctgttggttaaggaccagacaaagatccccatcaaacgctcaggtagtgtcctaccaaccctcctccttgagctctcctctccactcccctctcctcccatagtctgggagtaacactttatggcctctttgttctgtcatatctccacacctgccctccttgcactctgccatggctggcatctcccattaactcacttcaggtctctgattgcactgacccaacaggactggcaaaagggctgcagctctgtggcccctgctaagctcagctactctcacctctccttttctacagacatgctgagggatgtcatccaagaatatgatgaatatttcccagaaatcattgaacgagcaagctacactctggagaaggtgaaggggcagtgctggcggatgggcgcaatggggaagctttgaatcgagcaaagacatacatgtcccttttggagagaatcacagaaacatgctaatccagccccattactgtgtgaatgggcagacagtggcctagggagaggtgtagatttgccatgggtcacacagcatgtcagtgatgaaaacatggctaggacagaagccactcaaattagtctcagcttctattcatagttggacatattctgcatgtatttcagatctcacctctcccttgtatccccattttctgtctccctagattcctgctcatcacaaagatgatgttgatgacaatagtacatttgctgtgtgtttactgggtgccaggcacttggctatgtgctttatgtgcattatctcactgacttcttacacatgcagaccccctaagtacactgggagttttaggatgcccggaaagttcactgatacctaagctgaattttgtgatctcacaggctattcttttacttggcagatgtttcgagtcaatctgaaagaaattgataagcaaagtagcttgtatattctcatcagcactcaggaatcctctgcaggcatactgggaacgtaagctgggaaagggctggagtgggaaggaagcttctgcttttatctgtgctgctaccccttctttgtcctacttcccccatcctcttagagagtcaggaaaaacagggtctcaaaagccctgtctcagcacctgcacatagttggagccctgctcacagtagtggcacctgattatgattgactgaagggtataggagcctagggtgggacattcctgctgtcaggtttgctgtctctgtagaagcttcccaggaaagcaggcctgtcattgcttgcctcttccgatggagtgcctggcctggctttgacagagtggttctcaaggagggcttcctggtgtggctggatcagtatgcatgaagcgcaagagtgtcagtggggctgaaggttctgggagagaaagaagggactcacattgactgagtgcttgtgttgtaccaggttgacagccattcttccatcttcttggcaacctgaggaagggagaatatgattttcccattttactgaataatagaccaaggcttgcaaggtctaagtgccttgcccagggtggcatagagctggaagcagagactgggcagaattctgtatctgaggaatctgggagaggttagcctggtgagctggctggtgtatcttttgcggatggctgctgaaacataaaccttctttctgtcctgttgaaacataaaccttctttctgtcctgttattcccttaggaccaaggacacacccaagctgggtctcctcatggtgattctgagtgtcatttttatgaatggcaacaaggccagtgagggtgagtggctgggcatgcagctgaatgggcggccatggtctggattccatgtgttcaatttctgtccctgtctcctcttgcctcccctcacagctgtcatctgggaggtgctgcgcaagttggggctgcgccctgggtatgactgggctctctcagcgcttgctgtccgtgttgtcctttggcaagagaggatggtcctaggattgcatcagtctggtggtctggtggagcgggtggggtgctggactgggtagagggcccagggttctgacctgggtggatgacgggcaaatggtcctgaactctctgctgtctctctccttaatgtcctctgtctgttctaagctgagatgttagatagaccttcagggatccctgacaaagaggcatctggtcttaactgcttgcttctagtggccatgtgctcattactttcttcacttcattgagactgccccatgtgctagagaggtctcttccatgttgggaaatgcctctgccctcatctgggcagttctgatctgtgttcatgggttatttttcccattgtcagggtgaggcattcactctttggggaagtgaggaagctcatcacagacgagtttgtgaagcagaagtaagtggtgtttggggctttgtctggccctgaagtgttctgggtatactgatctggttcagaaagtgcttagtcagtgcctttcttatactagctttagagggatgggcatcctgtgtcctagaactgatactgtctaaaattcccatgggcagacctttccaggactgggccagactcaacacaaggcccttgcagtggggtgcgctcagagcagagggccttaagaatggctcctctgtttacaacacacccaacaggaatctgggcttactcctcacaggtggcatgatactttggccttcctgtgacatcatgccctatacatgtctcccctggagaagcccaagggactgctttgcacagggccagtgggaaatggctcagtattggaggccaagaccataaactgtgtttggtagtgagtctggggctggagggtcttagaaatccctctccaggggctgtttgtatttgtttggaggaggttgccacctggtgtctagtgcttagacagcagggttgcttggttagaaacaagtttcatttcctttttccaaggtacctggagtacaagagggtccctaacagcagaccacctgaatatgagttcttctggggcttgcgctcctaccacgagactagcaagatgaaagtcctcaagtttgcatgcagggtaagaggagagctgcccgagcttggcatattaaggcaatgggatacccttggctggggcaggcaatgcacagggatgggcaggtacagagcagcctgcagctcatatataaacatgtggagcctcctttatgtcccagggtgctgctagatatatagtttacatcatctcattcattcttcatactttgtattaatcagcatgggctgccataacaaaataccatagactgggtggattaaaaaacaaatttattttctcatagttcttgagggcgagaatcctaggtcagggtccacgagggtcagttcctgttgaaggctctcttcctggcttgcagatggctgccttcttgctgtgtcctcacatggctttgtgtgtgagagagaagagagcaagctttctggtgtctcttcttataaggacactaatcctgttgatcaggaccccacccttatggcctcatttaaccttaattatctccataaaggccctatctccaagtacaatcacactgggtgttagggattcaacatacgaatttgggggcgggcacaacccttcagttcataacatatttacgctctatcatttcctgtaattataaagacacttaggctaagtgaggttaagtaacttgtccaaggtcatatagcacgtaagtcagcagagctgaaactggagttcagaactgacccatgatagagccccaataactgagaagtttaaaaaagtattgctactagtttaatacaaagcccgtaggttaatacatgattactagggttgttttcttattatgattatcatccccatttcaggtgcagaagaaagaccccaaggactgggctgtgcagtaccgcgaggcagtggagatggaagtccaagctgcagctgtggctgtggctgaggctgaagccagggctgaggcaagagcccaaatggggattggagaggaagctgtggctgggccctggaattgggatgacatggatatcgactgcctaacaagggaagagttaggcgatgatgctcaggcctggagcagattttcatttgaaattgaggccagagcccaagaaaatgcagatgccagcaccaacgtcaacttcagcagaggagctagtaccagggctggcttcagcgatggtgctagtattagcttcaatggtgcacccagctccagtggtggcttcagtggtggacctggcattacctttggtgttgcacccagcaccagtgccagcttcagcaatacagccagcattagctttggtggtacactgagcactagctccagcttcagcagcgcagccagcattagctttggttgtgcacacagcaccagcactagtttcagcagtga

SEQ ID NO: 137492 - DNA, 1021 bp, Homo sapiens
ggcttctggacagtaagtacagattgattttgaatcactggtgtaagaatggagggaagggcagaggtcactaggggtggacataagaacaagggagggtttaattgggataggagaggaaaacttgggcatattgtatagactgtggggcaaaagctaacaggaacaggagatagatatggaagagtcaggaattgactgaagtagcccatccctgagaaggtgggatggaatagggtaccagagaagacaaccctgactttgaacagacttaagggtggctgtggatgcagataaatatagatctgcttcaagcagggatcagcaacttctgtagtagacaacaacaacaacaaaaggagaggtggattatacaaggtttaggtcttgctgggtggttgtgatggaaggacaagggaacaaaggcagcaagtgtatgagtctgtctctttaccactgggtcactggtacctggcttatggtagctgcctggagagtggctgaagagatggcccatagtatccaacatagttagggacagaacactaaggatagattgggggacaatagagcattcaaaggactctgctcttgatgctgtacagcaacaaatattgttcattcaaaaaatactacagggctgggcacagtggctcatgtctgtaatcccaggactttgggagaggccaagatgggaggattgcttgagcccaggagttcaagaccagcctggataacatagtaagacttcgtctctacagaataattgaaaattagccgggcatggtggtgtgcacctgtggtcccagctccttgtgagagaggctgaggtgggaggattgcttaagcccaggagtttgaggctgcagtgagctgagattgcaccactgcacttcagcctgggtgacagagtgagaccctgtctcaaaaaaaaagaagaaaatactacatatatgcctactgtatggaggcacactgctagggattcagtggatgacagagagttgtaaggactggggta

SEQ ID NO: 137493 - DNA, 1056 bp, Homo sapiens
gcaaggacatttttttggccactgggatcttcccaacctcttcactggcactccctgctttcagtgtttaatttaggccagtatcgacgagaggcagtgagctacaagaactatgaattctttcttccagacaacatggaagccctgcaaatcaggaagtaagtacccaatattttaggaacctgtgctgtctcatggctgaaaggcccttgttcagatattgggggagtagggcagaataatctggaccagaaaggaggccctctagactctcaaacagtagttggaacagcccttccattttcctgcccaaatcctgtttctggtcaagaataatctggaccagaaaggaggccctctagactctcaaacagtagttggaacagcccttccattttcctgcccaaatcctgtttctggtcataaccatccacttatcaagaacctttaatggtcttctacttctgacaggagagagtagaaacttctcagcttagcatttgaggcatgaatctcaataccttggcctactctagtttctgtagtctcatcagttcaacctcaaggtctctctgcactacaagactctgagtacttgcagaatagagcctgtgccttatgccttcattatagaacctggcagtgagtaatcactaaagagatttttgctgaaagcataaatacattgccactgtcatgcctgtgtgttacccatgccaggaatgccttttacttcacagaccacatgctctacttgggtccataaaacagttcagcttgagttccattagctcaagggttggagcccttaatattatggcttctgtcattgctcagcttttcctgattgtgtcactttatacctgcccgtaaaccgtgtaagctgtgcacacatagccactttcaactgtttgacccctctgtgcttagcacggtgcctaaagcgtagggcaccctgtgtagatgttcaatacatgataagttagtctaagacatgagagatggtacagaagatactgcagacaatgagagagaaatccatcctgggggataagg

SEQ ID NO: 137494 - DNA, 1041 bp, Homo sapiens
gatatgcccaatgtccagggaaaagcataacgatgcatctttaggttcctcacccagaattgcagcataattatttgttccccagaatttaagtcttagagccatcatcctcaatggttacagcaaagacgcagtaaactgcttttcctcctggaggacttaaaaggttaccagttgttgctatcagaaaatagctctgtgattaaaataaaaatttgcatgtcctgagcttcttcatgctttgggagttattgactcaggattgactcccatgagtgcgataactaggacaaaggaaatgaacatttttattgctcttgcttcatattgccagattgctttccagtaagggattatgcccatttacactgaagatcgatctgaaactcagcaccagcgaaatccagaacttgcctgtctccatggctggttttaatttccccattctgcagtggcttgttaatattagttctgacctttggggcaaggtgaacacatggttggactgaagagaaaaggcttctggtggctcaggaacgtctttggcaactacaacagctgatatttcaacagagcacatacatcccccacttaacaagggtacgtcctcagccttctcagggaaccaacgaacacctccaggcttcctctttgatgccacccactggacctgccttgggggtctgtaaatgcaagagaaccgagtgttggataattagcgatggaagaaaaaacctctagaataaaaggtaggtgagaaagaagggaaagtaggcaggagttgcacaaatccacatccattcttcaggccctctggaaagttttctttgcatagatggttggttgtcgtgtgcattaaagggcatgggaaagtgggggaaaagattatatctatatgtaacctatttatctgtctgtatatttttaaaagtccattctggcctttatgggacactggcccccagggcaattcactagcacctgtgaaagtctctctaacttggtcaagtctggttttgaatgaactgagtgattgagatt

SEQ ID NO: 137495 - DNA, 1729 bp, Homo sapiens
agacccctgcaaggggtggcaaatcaggaacccagcaactgtgccgccgtggccgtggggcgcattttggacgagctggatgcggatatcgtctgtctccaggaaaccaaagtgaccagtgagcgctctggattccaggatccctacatactttttctttcccgctaacttttgtcccctgtcccatgtaattttactttcccagtttcctattcttagagtcctgtccttagacccaggtcccttccctcttaaacttccatttcccaccctagctagatcccctaattgcactccatctcctgtcttcagcaaactttagctccttctcgaaaccccatatctagtcagattcccactcattctccggccccaaactcagtcccctgaatttcctccttccatacgctgtccatctccccgccgccaagtcaaacccccgaattcttcatccctgccccaagctcagatcctctaattcccaccccatctttgaccccagctcagtctaatttcctctttttcacatttccacctcagaaccccagtaccccttatctattcccatctctcctcccagcggaaagtccctaattcccacctcatttcccaccccaagcttagatgtcctcttatttcttcaccctcttatctcccctcagaatcccctaattccttttccctccacccccagttcagatcccctaattccctctctcttacctctcacccttagctcagattcccaccatcctctcgtatgtccatccccatccccagcttcctcctatcgttcagacccccaggcttagctctgattctttccccttcccacctaattctccacctccacttcatagtctctaaccgccccccaccaagccttctaattctgatatcaatttcctctctgacatttcccatctttctaggtcctcctctaatcatggatatttcattcccgtcacccccaactctggctctgatgtgtgcaaggaattagcctacaactgtaattccaggcctttgtgtttctcggatgctagttttacctctgacttaatcttacattttttttttccaggggatgcactgacagagcccctggctatcgttgagggttataactcctatttcagcttcagccgcaaccgtagcggctattctggtaaatggggctttctgtggactttaaattagtgagggaggcagataggggaaaagggtttccaatatttgatgagagggtaataagaaatcttagacatttagtttacagagctaaagctgcataatagtaaattacatgaaatataatttttatggatagaattatcctactggacctcagaagtacagtagtagtgtggtgcttaattgtgtgaactgtggagccagacagcctgggtttgaatcatggctcatttcctagctgtgcaccctctggcaagttacattacctcttggtgcctcaggttcctcagctagaaaatgaggataatgtttaccttccggggctgttacaaggattaaatgaattaatccatgtgataataataattgctaatacgtcttgagcactcaccatgtatcaatgtaaaacacttagaacattctgtggcttttttagatgtaggaactgagactccagggtttgaataaggttgcccaagaaccacactttatgaagatgacttagatgacttgtgtggggacaattggagtggga

SEQ ID NO: 137496 - DNA, 1875 bp, Homo sapiens
attcaaggctctccttggtctgtgacctgtctcttatttccaccttcagtgtccctacacattttgtcctctctagacaggttgtctcctgtcggcccgttgtaaaagttattctcattctggcttttctcactgtgccctgaattggtggacatgaccccctccctgtctttttgttatatgaacctcttatctctaagttcccctaggcccatggttttcagcccctaactgcatattagaacaaaaatatcaatatcttagcactactccagatcaatgaactcagaactctcgagtgtggggccagggtagtggcacgttctaaaagcccccagtgtgactttattgtgcagccaggcttgagaaccactgccctagaatccacaagccagctctcatcttttcttgccttatgtctcacgatgggggatcagtgatttatgctggtacagtcctactcagcactgggcttggcttagagaagggaccgtgggaatattccttgattaattcacagaagagctacataaatgtagatatggctcccagctgggaaaatgagcagaagtgagagaatgagagaatggtggtggtggtgtggtggggagcggagataatgctacaaagtgtgagccttcagtccctccctgcctcattcctcttatgcattcattcagtgtgttctttcagattcctgtgatagcatcatacatctttgtgccttttctacttagttcagaggtatcctagatctcttatgtatacctctttcattttctcctccaggaaaagagaactaatagtgccagctcagatgacttacacagtctttccaaaatagcagaacatacccactttctaccaggcttgctcttttagtcttgtcatttctgtaaatggcaccatcatccccttgattgcttcaacttaaagcctgggaattgtgctagtattgtctttctttcttactccacttcccacattcagttagtcagcaagtactgttgattctagctacaaatcatctcataatttcatgtttctgtctcctctggcacccaccctagtccaagtgaccatcatcttgcttgtgtgactatggcagccatttcctgctggtattctggtctccagtctggtctttcctcaagtcttttgggtacgcagcacactccctccacaggcccagcacagagactgttcttaaagttaggagcaccctccacctaggttactcttactcagcccccacacctcagctccagatcacttctcgaaaggaagcctccttggtccccaggagtagatcaggttcctactttgtccctggcatcatgcatggcacataataggtattccatgaacatttcttgcattgaatgagtgggtgggtaggtggattgaatggatggactgatggatgatggattggggatcagagcctaaggaagtattcagacctggatccttgcaggtcctcagctcaggaggtaggaatggtcattgagggctttgacacactagataaaccaaatagtgccagagggtttaaaggaagaagctgacagtcttcctaactcttaaccccagccctgcttcctagaggcaaacacttttaacttcctgttttccatccttttgaaaagcagttccaggaattgctttgagtaagcaaactttcagatttgccattgacggaccaatgcaagacaaatgcaagctcgtgcagagggaaaaacaagcatggtcttttaaatcagtaaggatgaaaatcagaatcccagctctgccaattccggactgtgtgaccttgagcagtagtcctcttgggacaaccaaattttcttatttgcaaaatgcagcagttagtct

SEQ ID NO: 137497 - DNA, 2571 bp, Homo sapiens
tgtgctgggggacaggaccctggtcatagacacctttcaggcctctttcctgctgcctgaggtgatgggctctgaccactgccctgtgggtgcagtcttgagtgtgtcctctgtgcctgcaaaacagtgcccacctctgtgcacccgcttcctccctgagtttgcaggcacccagctcaagatccttcgcttcctagttcctctcgaacaaagtcctgtgttggagcagtcgacgctgcagcacaacaatcaaacccgggtacagacatgccaaaacaaagcccaagtgcgctcaaccaggcctcagcccagtcaggttggctctagcagaggccagaaaaacctgaagagctactttcagccctcccctagctgtccccaagcctctcctgacatagagctgcctagcctaccactgatgagcgccctcatgaccccgaagactccagaagagaaggcagtggccaaagtggtgaaggggcaggccaagacttcagaagccaaagatgagaaggagttacggacctcattctggaagtctgtgctggcggggcccttgcgcacacccctctgtgggggccacagggagccatgtgtgatgcgtactgtgaagaagccaggacccaacttgggccgccgcttctacatgtgtgccaggccccggggtcctcccactgacccctcctcccggtgcaacttcttcctctggagcaggcccagctgaaccaatggaggcctggggacatctggcatggtcacccctgcacatgatctgaggccagctccccttccctgagctgcctcctgcttctccctcaaagtctcctacccttctcttcctcttttaagccctctcttcctcgctttccttcctacctagctccttgttggtgagcttcttgtgccttaatcctgtgacccagccccttacaccactttccaccttcctgtccgaagtacacggacactagctgccccaggaagttgtgtgattttaaatcacttctgtctttgctggaaagtgtatttgtgcataaataaagtctgtgtatttgtttcagggttgcactttggacattgtggaggtactccataaagttgagtcagagaagctatctcaatacttggtttgccggctggctgtagcccaatgatgtaattcccagagaaaggggaggagggaggggggaggagggaatagtgaggcgtgagcagcagtgctcaccataaagggttctctgctcagttgtaggaatttcctgtacggctaaggtgaaatcagcaaggaaggtgggctgtgtagccttaaaccagagctttccagctagtgcgtcccacagctgccacagtgggttacagggttgaaagaaacggtcctcagccctcagagttgccaggcagggcctgggaccacacaagtttcagggacgattgcctccttagcaagtagtatcattagtacccctaagtgtgccatggaaatgtttcctgtatactgtgacctggaaagtgggagcattgctttgaacacagtgcttgctctagccaagcctcttctcacctttgaaaatgggactggtagaccaggcacagtggtgcacgcctgtaatcccagcactttgggaggctgagatgggtggatcacctgaggtcaggagttcgcaaccagcctaacatggtgagaccccgtctctactaaatacaaaaaaattaactgggcgtggtggcgcgtgcctgtaatccaagctacttaggaggctgagacaggagaatagcttgtacctgggaggcggaggttgcagtgggctgagatcatgcattgcactccagcctgggcaacaagagtgaaattcagtctccaaaaaaaaaaaaagaaaagaaaaagaatgggactggtaaatcctgttctgtgggatgccgtgggagggagagaggataatggattgaggaagacatccatatccccttatggaaaatacctctttggttttggggaaccactcctttctagggaatttggttagggctgactcatttcctggcttcaggggctaccctgggcccagatttccagggcccggattaccagtgaagcgtcaatccctggatttttattgaaaccattggagaagagccatctcaaataaatctgccaagtatcctagctctttgcaactcactgtgtagtttttgggcatttccttcctctttctcattctgtttccctgttggtaaaatggaatggtgaccaacaagtgacctatggttacctcatagatctgccacttgtctgagggagtcagaatgcacttgtctgttccctgtccaataaaaggcttcacatgctgtggtttgtgctttatttttaggctcaattcagctagaggcacacaacaaagcagaagacaggagtaggcctggacccaagtgaagcgcaggtggggtgtgaatcctaggcagctggcttctcaggcataggtggtgacatactggggccccatgttcccgaagtaggaacgttcccactcactcatgagctcaaagtgtacaggacggcgacagaaattgcag

SEQ ID NO: 137498 - DNA, 1059 bp, Homo sapiens
aaggtggtagggggaggggagggaaaaaatgggttagactagatcttccaaatctgtcacagtacagatgagccaagatattgatccccctcaacccttcaagatacctcagggccagaagtagcctactgtttgcttctgtgtgtgccgtgaatattaccatttgtatctggatgctgggatatatattataaaagatttggaagctctcctttgacacaatttgaagccatactgtcctggcctggaccactccctaagtataggatgtgctgtggcccaagaatgactgtctgcttgggaactctaagccctatgaggacaatgataatgacagtaactatactgtgtcattggtgctatgaccaggaaacctggggtagggggtccacctgggggtgtgaaaacccagagaagggaacctgacctagctggaggaagtaccccaggtacgttccagggctctgttcttggccttttctgtgttcatgcccttgttgatcttgtctagtcacatgactttaaagaccatctatatgctgatggttcagaaattttaatctccagctcacgccactctactggtttccaatcttgtatatccaatggcttttctccatctccacctagatgtctaatatgcatttctaacttaggagtacaactgagctactcatgtccctaccctccaccaagctattctacttttagcttttcccatctcagtggatggcaattccagttgctcagtccaaaaatttcagagctatcctttatttttctctttctctcttaccctatatcccatctatcagcaaagacccttggctctaccttcaaaatctgaccacttcttattgccttcattatgatcaagtctgagccaccatcatctctcacctgggatattactgtagcccactcttgggtctccctgcttccacccttgctcccttttagtgtattctctacatagaagttggagcaattttgttaaaacccgagtcagaaatatcagtcctgtgttcaaatcctttcaagggctctcagagtaaaagc

SEQ ID NO: 137499 - DNA, 1892 bp, Homo sapiens
ctctatgtactcaatttttctgtctcccacttgcttataccattccacccacacccatcttcttactgttcctcaaatataaaaggaatactcctgtgtcttccctgccttaggatgttccctctgcctgcgatgccattcccttagatatctgcctcactaacttcacctccttcaaatttttgctcaagtttcacctcagcgtcttctacccttgccactctaatactacaacccttctctgaactcgcccctggccccttatcccattctccttatcctgctttattttttcccatagcacttagaactaatgtgctacttaatttgcttatttttggtaattttttttactaccccttccactagaatgtaagctccagagggtaggaattttgtgtctgatttgtttgctactgcatccccagtgcctagaacagtatctagtacacagttggtactcaataaatatttgttgaaagaatgcctaagttaagtctacaagatgaaggaaagtaagccagaggaaagtgtgagggagggcattccaatcaaaagagagcagcatgagcaaagtcccagaggtaagagagcagaaaaaaatgagggaacgacaagtccttcagtgtagctgaaaaaacaaaatgcatgtggggaggaggtgagggcatagagatcaccatgtggaaggcattgaatgctatgctgaagagcttcaactctgtcctatatgtcaatgtttccaaattttggactatacatccctatcagtacaaatgttttagcatgtacctccaatctctatatttgtttatatattatatacatgtataactgtcagtctgtatattaaagatcagtatcagtgatgcttgatttcctatttttaagataaaaaaacataaaattctaatacatattctgttccttcaccctgtaatcattttgcataccccttggaggtcactgctttagagtctagagggaaacatgaaggggtttaagcaagggagcaatatagtcagaattttagaaaaatccctctagtggtcatcatcgagaaaggatttgagaggagcaagagagaagcagagaaattaggaaaaaaatcatgttgacatggattaaagaagtggcaggggagaaaagcaaataggtttgagagagattatagataacttttgcaggatttcaggatggattggctatggaacttagggactggtggagccatcgtggatgcctcatatattcttacaaaagcctagcctaggtggacattcagagaaccaagaatactgagagctctacaattgaagcccagagcaaaagagaatactgaacaaaaggcccaggagtctgggtcatcagctcagagaggtggtagacctagcagttatgaccatggaggtagagacagacctcccagttgcaacttagaagctgtgtgaccttggatcagcgactatatatttttgtgcctcaatttccacatgtacaaaatggaaatgataagaggatctctaactcttgaggttgttgtggggattagatgagttaatacgtgtaaagtgtttagaacagtgcttggcacatggtaagtacttaatgttagccagcattatttaatgtttttgaatgaatgaatggcgcctacctagcttgtcttccttgaattctcatactgcccatgcttcagacaaacagaattatgttgtcaatacatacccactgctttcctatctctaggtcattgctcgtggaattcccttattctggaatattcttacaacatattcacatgtacttcaacatgcatcataaaaacttccttactcacaaagcctctccaatttcatccttcccaccctctctctccataatgtgtccac

SEQ ID NO: 137500 - DNA, 1023 bp, Homo sapiens
gatggttctgggtgagaagataccccccaccaagccaattctggaacccccgccaagccaattctggggtgctgtcactaaattaattcataaaatgagtgtttaaaggaaatactaggttagtctaaagagcagtgactatttctcatccacaaaattgtcacaaataagtgtcctttccctgccctggcttactgactcacacaaatacgtgttatttaagaaagaagtagcagttcatttttaaaggcagtaaatgctcatattgaggatccaaagtagcagctaatcctatggcttttgattttatttttctgccctcatttctcaataagaagtacgttttacaccgtgaccataaacgcacacatacacatacatgtgtatatgcaaatacccaaaatgcatacaaatttttcacaaattgatgatacccttagtatgtgatgtactccaacattttctgtttcttttctttttttaatgctaatgataacccactaagctgattttgtgacccattaattgtcttgatccagtttgaaaaactctgaattataggctgtgagcactcgctattgttagggttaggataatctaataagcatgaggtaatggctgatgcaaggaaaagactggttaatccagaatggctgataatttttcaaaaagggaaacaaagctggcaataaagggaatggttagcaggaaagcaaataattgaagacagcaacagatgtaggtttgttgggagcgtgaggctcccagaataaataggtggagagggcaatgggcatggtggggctctcacccggatggggatgatgtggctggggcaggggatgacaggaaggcccctgtccatgagtagctggcgcatgtgcttgacattgcgctggtgggctcgcctcagggcttggccctcctctcccttgagcagccgcacagattctagagctccagagagcaccatggggggcagagaagtggtaaagatgaagcctgcagcataggagcgcacca

SEQ ID NO: 137501 - DNA, 1225 bp, Homo sapiens
atttctaacaagagaagtgttactcgaggaattggagttatatgtgttagggtgcagatactcactttagcaccaacttgctgagccactcaagatgaattggatgccaactctgaactttagtttctttacctataagatgaatgtaatagctgcctccattctttggcatttactagctgtgtgaccttggacaaattactcttatgtctcagtttcctcatgtaaaaaatcaaaataataataacacctatcacatagaattgttcagaaaattaaatgaattaatacatgtaaaatactaataattttgcttggcacataataaacactataaatattagctgttataatgttatcgtcatcatcatcatcatgatcatcatggtttttgtgagaccaacactagtaaacatacactcactcatatacataccatccatggagtggacagtctcaaaggccacaattttgggtatcttagggttagacttctctagaagtttctttaggtggtcagggtcattgtgcctgaagacaaacttggctgctccactgttacggataccttggatcatggaagcatggttgcctgcgtctgagtaaatctcgcaccctgaggaagcagatgtataatccttaagcttctgtcccagtactcccacttcaaccttcaggtttgacctggcaaagaaaagggccaaccctttcttccctttgaagaccttgctctgcttcttccttctctgggaacttttgtgacacttctttctcccttggaaggacttcactgttcccaaattctgacccctacatccttccctccagtcatttgtaaccctggtctagcctctgactgccttggggtggaagaacatttaatttcccaagaagcttcagagttttttgaggacgggacctattttccttctccccaatatataagatcaagacttgaaaaagggattaccccagggaatgtttgttgactcggactgatgctagattgttcctagtctagatgaaattccatccattccaggtagcatctgcttgtggttacagggatggatatttatcaggcttttactgttggaatcataagcttatggcatgtcagagctggcagggctgttagtgatcatgggattcatccctttactatacaagtgagaaagctaaggtccagaaagatttgaagaatgcagggctttttactgggcaa

SEQ ID NO: 137502 - DNA, 2961 bp, Homo sapiens
ttgtaaagaatagattatcggagggcaaaggtaaaattttctttaaaaaatgatgttggatcaggctaggatgctggcagtagagatggaaagaagtttaatggttgaggaggggatggactaaaaacaacttaaagatgttgagtttagttggggcttatgggtggactcaaaaaaagtttctgagaagtggtggtaatatttttgctgtgctgaagaatcagcaggaggtgaggaagtagatagtaagagcgaagacttctctcaagcagtttgcctgttatagggaggaaagagggcagtagctagagagtgatcaggggttgaggcaatgtttttttataagatacaagagacttgaaaacatgtttaaagagagggagaggctgaagatacaggagaggaggagagagccaataggtcaagattcctaaggtggtagaggggaatggggcacagagcaacagtggaaggattagtcacaagaaaaaggatacttcttccactatgacagaagagaaggagtgaggagaggacatttgaagatgcttatgagtttgtaggtgctttgtggctgggagtcaaggacattgctgtctggtatcttctattttgaatgtagtagaacatgaagttgtctgctgagggagatggggaggagggggtgtgggaaggctgaggataatggtggtttggcaaaactgccccataaacttcgagaactgaccagggaaatgggattgtcagagaccatggagaacccagtagaggttaagagtatgaatttttagtgactcctgtctgagcaactgtatgagcccggaattgatatagtgaagatggagggttgtattcattctggattgggccttggcggaaggacaacaaggcgtatgaggtgaggacattacagactagagagtaggagactgggaatatgggaaccagtgtacaagtgaagggattggttttaggcagaaggagagatatgccttccattgtaaaaggaaagaatgaggcaaggctagataaacaattagataagttcgtaggtttggtggcaataaataaggattctctgtctggggcttctgtttttattgtgaagtaagatgtgaggttatttgctaagtgtggaggagaaggtagtcagaggttttagaagaggagaagaagtttgaaaaagctcctgtggagacataaaataactatgtatgtgtgttaagagctcagttgagttgggaggtgatgaatttatagtgtttcctttctgtgaggtggggtaatgttccccggtaatggtcctctctacgtgcagaaggagagaaagcagagggatataattatccagtgttgaggatatgcaaggtggataagaaggaagaacaatgggagtgagggaactccaaatacagggaaggagtgatggaaccagtgaaactggatgctgtattgcaggataccagccctgaacaaagctcaggcctcaggcttacctggcaggatcttggccaaggtgaagagagtagagtcattggcaacaaagcaggaggagaagagcagggctgagtccttctggtgcagctcagccagctcctgctcaagctccacatgaaacttactggtgcctgagatgttgcgggtgccaccagctccagcaccatgacgctgcagggtctccctggccaggagaaaacaggagaaaaggagaaaaagaaactcttgtcaggcatcgaggaactgggtaggtttctcttccttgatgggagtcaatgttgagttagtgatcctatataaactgtgtcctatgagacaaagtagagggaaggatggggaggatagggagacatgtgccttccttctaggactggaggtactcagggagagagggagaagctaggttgagcttgagtagtttggaagacctagaggaagtcacactccatctctggcaatactaattctgcagctagattaaaaactcaggcagagtgggccttgcttggtctcccatccttcccctccatagcattggacaccgaagagtttgggaaacatggtgtgttgacttatttcatatccaaggaatagatatgatggaggaccttggacaaaagaagtggtgatagaacccaagtttccactgccagctctgccttttttttttttccatgtgtggtttttcatctcctctggccactgctgatggctgaaagcctactactcactgtgtggcttgcaagacctgagggtgtcggctcatgcccaggtaatcattactacaccagacggacacatcctttgaggccacagatgcctcagagaaatgttgggcaaagggatatgcatcagcccagcggttcacagtcttgaacacacggtaggtgtgatcctgtttcttctccatgatcttgtccctgaaaaactggtcataactgaagacatagtttcctgcaggagcagatatgaggatgaaaagaattcgttttaagtctctccctggctagtctgtattttacccatgttgctgattttgagttctccaactctttttccacatattcatttatttgctcagtcattgacttatggaccacattaactctctactacttcattcagccatccttttgcttactcattcactcattcactcagtagttcattcacacattcatttagactttcttatggcctcatctctcttcccgggttggtgtggcagcctccttactagaatcactgctttcagtctcactggaaggagtatcaacagatcttgtttctagcgatctctttgccacttcctagctgtgtggccttgaacaagtcatgaatcttctttcttactttaaatttctttatttgtagaatgaggctaataatactttccttggagagttgtgagcatctgacaaccaacaacatgtaatatattcaaactaataaatggcacatggt

SEQ ID NO: 137503 - DNA, 3756 bp, Homo sapiens
accactgtttgtaatagaaaaaattggaagcaaccaaatagaggagtagccaaataatctctattatatctatactacaaaatattttgaagcattgaaaaataaggtagatacatatgtgttaaagtggaagcatttccacagtatattgttgagtgaaaaaagggcacagagtaaaatatatagcaagatattattaggtaaaaataaaaattgaaaaaagtaatactatacattttctttgagtacatttgtatgtatgtaaaaccaacctacaatctaaactgagagaatacaaaaaattggaaacaacttaaattatagatgcttgattaactgaatgatattgaatccatactatacccatgacatatttttaagtgaacaaaacagcataacgaactccaggtaaaataagatcacacttctaacaaaagcatgggtgtggtgaagagagcagagggtgtgtgtgtgtgtgtgtgtgtgtgtgtgtgtgtagccatagaaaaatatctgggagaaaatataacaaaaacttaatggtggaactctgcatgacttaaatttccctccttatactttcctgtatatgttgaaaaatattttaccatgaatcatattccttttacattagaaaataatgtaaatgtcattatggaaaggaatataaacacatataagaatggggaaaaggtgctgtatgaagggtgaaagtttttgagggaagcatagagaagaaataatggaaataagcctaatatttaatgaagcctcattagaaacacttccataaatgtaatttcactttcttctcatggtaacctattgaggtaggtattaaatgccactgaaggaaagtgtcttacttgccaaaacacctagatccagcaagtgccagcattaaattttaaactcaaatttcctttggttccaaggcccttctgtactgtttcccctactgtgacagaggccctttcagaatgccttccctattccggtcccctttttttccacctcagcaaactcaccaggcatattgttctgaatcaggtgtgtgaccttcccagagatctgctcctgctcctggggaccggaaaatggcttccttaggctgactgagaccagggagctaggcagatctgagacggaatgtgagattcattggccgtgaagagaatgggggaaaaagaaagcatgtgttgtcctctttaagctcaatgcaacacatgaaaattcaagtttataaggtaagggcagcttctacagcgagaagaaatcttctccaaggtgagcttctatttatccccccgaatggagactattacattgttaggaaaccttctataaggtgaatcatacttctctccactaggattttcccttggctcaggtaactggagcagccaccctgggtcctgcatttagaaagtagatgcaggataatgtaccttactcttcttttctaaacatcattaaatttcaattttgaagtttttgtccttaatgatatcccaaaggggcctatgaaagatgtcaacagtgtggccatatctcaagggtgattatcttgggtggtctgcactaattaagttgacctggggatctgcaccctggttaaaggaggtacctactcccagctctttctctttcatgcaaatccatattctcatagagtggtcttgctgaaatgtgggaccccagcctgttgggatcagtttagccacctgaaaaagaggagtcaaaattctagagggctcatcttagaataatgactaaaagtttcaggagcccgtacatatgtgtttgtcaggtatggtgtgcttcagcatacagcctaaactgttgcctaccatggctcccctggaaagactggacttctcatcatgggatgtgtactggctgcttttgtattagcctagctcaggactgtgacgtagtgtgttcaagcattaggagtaaaggttgcataaggtggaacttgactccaacctgtcttgaaagccttcacatcttcctggacttctggggctgccttctgcacaatcttgctcttcccatcctggagttccgacagcatgaagggacagtggcccttcgcccaagatggagaatctatgcaaaggtaagagagtaatttggggtgcatttctagtcataagttcagctcaacaataattgctgagatctaatgtacccctaaagccctatctcaggctattgtagagacacagagatagatgagtctggtccctgtgctaggggagctactaaactggtgggaatggcatacactgaagacacattgtgaacagtgctgggatagaggaagtacatgggctacagaagtccagaagagggaggggaaatgagccagaattggaattagacagtttggaggtctaagcaggctttgcagaggagatgatggccaagcttagtgtcaaatgagaagtatgagattctccagtacagggtctaggagagggtaatctgacaggagcaaaggcacaaactcttgacagaatagttgatttaggcaattttaagtagtttcagcatgtctggagtatagtgtgtgagggacatgacagtgagactgtttcttttcttttcttttcttttctttgacagattctcgctctgttgcccaggctggagtgcagtggcatgatcttggctcactgcaacctccgcctcctgggttcaagcaattctctgcctcagcctcccaagcagctgggattacaggcgcccaccaccactcctggctaatttttttatttttagtagatatgggatttcaccatcttggccagggtggtcttgaactcctgacctcgtgatccactcgcctcggcctcccaaagtgctgggattacaggcgtgagccactgtgcctggccgagaatgagactctttctagagaacctggcagaagacagattctgggtatattttggggccagttcatgctatcttgacacttttcacatgaaccgtcctaattattaggcaaagatggccagtataacttggaacttttaccccaggaccctaacattctccccttttgctagcagcctcttcttacctcctccagcctttgttgccttaaggtggatttgagaacagtttggtccttgggtagccaggatgggacagcgtccaataccaaacaggaactggtgagtcttaaccaccttgcctaggaggcttgtggggccccgggcaagcactgggcagcactgtagcagcatggctgcagtcaccatcttgaacctaaagtcctgcagaagacatggaagagatgaggttccatcatgagggcctggcaaaaagccaagcctttgatcctcgtcttcagcttcccacccaaaacttgctgcctccgagatgctcttattgcccttccagggaaagaacttctttcccaatgttaacatgtaccaataaaacatgagggaggaagaaataggaaactgactactgggcaaaggggtgaaggaaacagttctaactggaggtcagaaagcctggattctgactcacattctggcactgactacctctgtgatgatgaggatcactgaaatgtgtttttgtgtggcaggatgagaactgccaacccactaaccctttgatcaatacttaaggccaagaatctttctaagaatgttggtcttagccaagtgaagattcagcctgctaatgcaaacatatgtcattgagtagagctcctgaggcttggcccagggt

SEQ ID NO: 137504 - DNA, 1814 bp, Homo sapiens
gtttaaggaaatcaagggatccggaaggaagggtaggccctaggtcctacagaatgtgtaccaccagcctgatattatgctgtctttgaatttgctcctgtctcttggataagcacagatataggaagaggtgaaagcaagtcccagtggggctggaaaacagggacaaagacatagtctatggattagtgaaacaggcagaggccaagacagagaagagaaagggggcaaagagatcagaaaaagagaaagcaaatgacacacaggcactcaataaatatttgttgaattttggggtaaattgatgaatgaacagagtctgaaattgaggaaggagaagggactaggagaaaagccagaagaaaagaaaatttaggaaagataaaaggaggaaagtagagagagaacaaagatgtggtggtggtggtagagttaaaagaacagaaattgagggggaaaaagagatcaaaggtagagggaaagggagcagggtagagatgaaaacagagattgagtcgagagaaagagaaaatgaaaaaagaaaaagggggtggtgatagtgcacacagggataaaggcagagacagatagaccaaggggcacgaaagggacatgaggagggatcaatgagtctagaggattatacaaagattcatagaagtgagaacaggagtggagaggatccagcaggggtagagagtcagtcagacacaaacataaaaaaatgctgccagaaattgcaaaaggctaagtaagtttagggaagagaatcatggccctaattgagggagatgagagagagactgagggacagagagaagagagtagagaaaatgacaagatcaaaggatagagacagagaggtgactaaagcagggggatgagggttaagaggggtgagagctgagagacaccaagagaaagacagctagagagagcaagaaggagagacagatgtaaagaaaaagggcaaattggaaagacagagtcaaaaagtgagacaagataagggacagtacaatgggagagacatgggagaatgtgagaagactaaagcactgacactgtgaagaaagttactgagtagaatctactagcaccctcagccttatgttttgagggacaggtcagctcatggccctgccctcatatggcaacctccttcatctccctcccttcctgatctcatagaacaagcaccctccccgtacctcacaaaacaacctctttttcttgttccatcccagagcaacctctccccctctcatgggctgtcacagcagcctgggttggtatgtggggccaaggcatgtgggccctgaaattggaaaagacagaagggttgttggagggactaaatgaaacaatccaagttaagcctttagtatagtttttggcacatagtaaatcttcaataaatgttagcttttcttattaaaattccagctctccaatttcattgttggatgttcttgttcaaatcacttcccctctctggatcttggccttcatcagctgtcaaacgtgaggtaattatggccacttcacaaggtaggtaaggaattggatccagtgcctacctcatatctggagatatgtgtttcccttcccctgcctgcttgtgaaagctaaagcacttggggctgagcctgcagaccacagataaagttgccagagtttatcgccattggggtctgaccactccccaagctgagaccagggcgtgggagagaagaggagccccttcctggaatcacgtctgagcatctggctagagctggccctggctattggtggtaagaaatggatggccc

SEQ ID NO: 137505 - DNA, 3338 bp, Homo sapiens
ctttgggaccttagaaaagtcacttccctgctgtacatcttatatctggaaaatgttggtaataacaaggacaatctgcatcacaggaatgttgtgaagattcagtaagataatccatataaagcatttagcagagtacctatcccagagtaaacagtaaaaaagtgttaaatattatatttaattgatagactttattatttttattttctccatttcccatgtagaaaaaatgaacgtacagccaagggaagtcacatgaatataccaggctgggtttgggaagctagagaattgattcttgtcccaatcctgttacaatttattgtgtgaacttgggctctgtaattcccctctctgggcttccgtttctccactgacattggactagataatttcatagattccgcctagttctgatagtcaaacacttacagagccctctgtgccaggccgtgttctcatgtcaaccctgtgatgatagggaaactgaatcccaaaaagattaagtaacctgtctagatcagaaagctagtacataggagaagcaggatttgaacctaggcaatctgtttccagagattcctaacttaaccattatggatctgtgattcaaatattactacctttttttcttgactgagggcctgactctagacatttatctcctctgctgcactaacataggcctctttccaggtcatatgccatttgtcaccaatgccttaccaaaggaacagatctgtaactacagtggaatttcaggtactgttgaatattcatttactctaccattcaataacttatgtacctaatgtgtgataatgcttgccaggcatcttcttaaaacaatacttttaaccaaagagatgatggtgaaatttgagaccaagtaacagatcattactgaaagtttttccctacgactttaaaatcctctcttgtgtcagcacccaatctgtactcccagaggtgaaaagggccaactgcaactctaccccagcagacagccagaaaacactcattgcagcattccttgtcccccacccccccaccccttttgtggcctgctttgcaaaagtcaattaggtctggaagggaagtggtaatttctcttcaggagttggaaacatcaggccttacttctcttcctagtacccctttcccaccatgaaagaatcatacagaactttagataactgtaatcagagaatcagaaattcttagaaacaggaaaatttagaagatcacaaaatcaaaactagaaagggtggtggaaattacaggccaagcctttttttcagagagtgaatgacttgcctagggtctcacagtgaattaggatgagaatagaaatctgtttactttctgtatagtgacactacattcctcttccactttcttcacttatttctgctaattattcatctctcaattccccaaatctctccttacccaattcatcattcccatcacccccacatcctcttagtttccctccctagctcttcccccacccctaggctccccatgggctctgacccactgagctctgctgtcagcccagcaggtagagggagtcaaagggagagaggaatggggaattgcaggaagaaatattaagccatcgttcttgatagagaggaagagagagacagaaacacagagacggagagatacaaagccgaggaaagagacaaaaagggggagagaaagaaatttagagaaaaagatagttagaattcagagggaaaaataagagaaagcaagagtgtcagagaatgatgaaatgaaatgaatgatcttgaaaactaacaaaagaaagtaacgaagggaaaaagagagaaaaaagctgaaaatgaggaaagacagaaagagacatgggagataaaaagaaaatgaaaaagagacagattctaagaaacaaacaaaggaaaaagtcagatctactcagaccagagagtcagtgtgtacagccctgagagaccagctggcagaccagagatagggtgccaggctgaaagcagctcttacctgttgccctgcactgaggacgaacgaatgacaggtgggtacttgggttaggacctggcatttatcccttctcctctgactcagccccacccaccctgccttctgccggcctggccctgcattggccccaaaggtatctcagtcccttccttgctagagataaaacccaaagtagcccctccctctagtgtaccccctcccccagctctggctcttccctattttcttctctctataggacagtaaaattagctcatttgggctttggaatcagaccatccacatagagctgggataccttgagcaaaaccacctctctgactatagatctcctcaactataaaaggagggcaataaaacccagaagtgactgtggcacaagttgggagggctctggagtcagacctagaatacagtgttgtgcttatgagctcaaacagtcagcttccacagactagatccccggttgttgtaacaatttggtaatatcatgtatggaaaacgcataccacagtgcctggcccaaataaataacacctactgttgactgagtgcttacaatgcaccagacccttcactaagtgctttacatgaattaatttagccacataaggaccttaaaagataggtactattatccctatgttacagatgaagaaactgaggctcagagaggtgaggtaacttgttgataattacccaactagaaagtacagagcccgcctatgaacctaggcaatgtagttacagaacccacactcttctcttcctctcataatatacaattaaaaatgtgaagttctctgtcttatcttttctattaccttctcctccctttttcattttcttccccttttgtcactctctttttccccttcccttatcaatcctaaggcagcaggaccatgttataaccagacaatttcatctttagagcagattgtcatcattaatattatatttacataaataagaccatagtctacatattgatttgcaatttcttttttttgtttgtttttcattcaaccatatgccaatataccatggaggttacaaaatctgaatgcactgtaatttatttaaacactcccttattgatataaatttaggttattcccaaggattttcccccctccattatgattaatgttgcaatgaacatcttttggcatttgtgagagcatttttttagagggtggcatcctaaaatataagcattcctggatctaaaggtaatagacatttaaagtttttgatactgccaatttgtcctatacatgtgttatacacccctccccacc

SEQ ID NO: 137506 - DNA, 1527 bp, Homo sapiens
aaactcaccaataccatttgttattttcaatttttaaaatatttgttaatcttataggcactaaaaatggtatatcagtgttgctttgatttgcttttctttcattattaatgagattgggtgtcttttcatgtttctttatcagttgtctatttctcttctgagtggtctactttttgcccattttgggggtgggttggcagtaaaatatagtggactaaaagcatgcactctggagtcagactcacccaagtcaccaagtcaccaacaccttagctatttggttcacttatctccagatctctcatatataaaatgggacagtcatagaacctaccctattggattattgtgaggatgagatgagaagaactttgaataatattaatattaactccttttctgtgatatttgctgcttcatctggattaatttattaattcaacaaatgtttattgagtgcctatagcatgtcaggtgtggtgctaggtagtggagatgcagtggcatgtaaattggagagtatgggtatagcatggtgtatttaaccatttttaaaactaaagattaattccagttcttctagaaggtatttcaaatgcagctgcaataaccttgacctccaactctttagctggctaaccatttgtcactttgaaaagtgagctcaaaggtcatcacttctgggaggcccttttaaacccccacactggatcttgttccctcttctgggcccccacatcttctctctcagaatttatcacactgtactactggcaccttgtcttatgtcttcctcccacatcagaccttgagcaacttgctgacaggaatctggaaccattgactaggggggctgtcagaaatgcctgttgcattcagatgcatttcctccgttctttctactctgttctgcctgtacccagaaaaggaactggaagaataaaatctactgaggttaacaaacctctgaggtgacgtagagaaaaactcgaagtgccctaatggaggaaagtgtgtgggacttcccaggtcattgggaaggatacttaggtggtgcctctctgtactattcctggtccagctgagcccgtgagtgtaggtggctgtggttgtgcctgatatctcctctcctttagaggaaaatgtctcattttctctttgggtggtggttgtgtgattctcacctttttatgaggcaatgtagtctggagggagaagtaagtttcagtcccatatgctcatgtagcgtgtccaaaggaaacactttcctggcccttctctacatagtcccctctctctctctgcattgatttgttctgtgtcttggctgacttcctacccatgtgggaattcctctggaatcagagtctaggtctgattcatttctgcaaccccagtgtcaacctgacaataagtaactattcagacaatgtttgattgaatagacttcggtgacttaggagtttcaactttttactttgcagttgcactgcagtagacatcatggtacttaaagttttctct

SEQ ID NO: 137507 - DNA, 1102 bp, Homo sapiens
gggagttattaagtagtattaattcacatgatcacaaggtcccacaataggccagctgcaagccgaggagcaacgaagccagtctgagtcccaaagctgaagaacttggagtccaatgttcaagggcaggaagcatgcagcatgggagaaggatgtaggctgggaggctaagccagtctagccttttcatgtttttctgcctgctttatatttgctggcagccaattagatgatacccacccaggttaagggtgggtttgccttccccagcccacttactcaaatgttaatctcctttgggcaacaccctcacagacatacccaaaatcaatactttgcatccttcaatccaatcaagttgacactcgatattaaccatcacacctggcatatatcttaatacagctagtaactatttatagtttttgtcttttggtaaagaagaatgtgttttctttctcaatcccctattcagcaggcagagaaagcaatatgagcaaaaggaaaaaagtttaaaagtccctaaggtatttcaggaaacactacagagcacagatgatattttaaatgggttatgaagcatgagtttactggataaagcacagggaaaggggcaatccaggcagagggtacaatatcaacaaaatcagggaggtcttaagatgtttactgcatttcaggaacagtgagttttgtagatgttgagggaggaggaagagtctggaattacttgctccgtcactttatggaagatgagatctcatcctggtacttggttcttctaaatgttactgcaagaatgaacagtgattaagaacatcagccctcgagccagattaactgggttctgccatttattaactgtgtgaactttgggaggttatttcacctgtctgaatttcagtttccttgtctgtaatatgaagatactgataatatctactttatagtgtttttatgaagtgtaaaagagtgaatctgtttaaagtagttttttccaattctgtgaagaaagtcattggtagcttgatggggatggcattgaatctataaattaccttgggcagtatggccattttcacgatattgattcttcctaccc

SEQ ID NO: 137508 - DNA, 2432 bp, Homo sapiens
aaccaaggattagactacagcaatggagaatcttgaggcaagccagatagttgcagagagcccatctgagggacaaatatagggcttatcttagagttagatttctagaaagccccttaagatgggataagggtcacagagtgggcaattgtgggagggttcctggtggaggttggggattggagtgatggcctgggggtgatttaaagtaagaacacaatactggactgaagaagatggggaagggttccagcaagaaagcctcccttcagagtgcaatgtggaggcagcagctgcagtgcccgagagcctgagttttggaatacctgccactatggattctagaagtagtgccagatttcttccttgtagtagtgaatttcttccctgtcctcatttatttcaatagggtagaggcaggagaggaagaaaagatggagccttttgcctatgattaataataaaaccactgtattctagaaacagagagaggcaggatgaggtacaaagaaagatacctgttctgccgaagattctcagtctctggatctcttgtcaagataaccttatatttactcgcatatggctgaattgactagttagtaccaaattgatgcagagaggaaggaagacaagggggtaggagcatacacaggtgggattaattttactcaacttcaccaacagactttgttcatttctggtgggggatggctgtagtggtagagaaatagactgtggtgggaaaggggagaggggataaggtataacattttctggcccttcctcccccgttttgtgtttttccttttctctcctctcatgaccagaagtctagacaggaagcagaggtcggttaccagggaaactgaagctgagtatgcttgattcacgagcttgtgagataaaagcaaaattgctactcaaaatgcaagactgtatggaggatgggtattaaccaaataagcaaagatttattcatccttataattattgtacatagatatataaatccacaaagatgaatagcttttcctaaatgtttagttgagaatcagtctatggaatggccttgaatcctgcccctgccgccttccattctcactgctggccccatgctgtcagtctcccaacatgccttatgtctgagtatgatggagtcctaatgatattgcctctgtacgtggctctgtcagttacagggaaagaaactaagggaaaaaggaagcatcaattcacctagctttaaaagcaacagagagataaacctcaaccatcaaaatctttccctagaattccacctaaaaatcccagcaaatctaaccaaagtactggtctttcaatgtctaattaatatgtatttgttttgggtccagtatcaaagagttctacgaaaatgcaattagaatacatcaccattccttatacgctgctgcccctagtgtaacacatgtggattgcactctcttgacagttgtagccagttattccatttcactgctgtatgacgggttttagacttgtatctgtattttttaagatatgcagttgaatatttctgttaatctttttgattatagagaaatgaagcagatagcctaccactggccataatatttttctgatgggaaaatacattctgctctgtggcaactgctttctgatgcagtctctattgttgcattttaataaaaatcatcctctgcttgtatactcccatatgatttcagaatatttatgctgatgtcaactcggttgtaataattgatctccactgagaccttagaagttaatgtgaacctgcatttaaagtttaattagggagtaaaaagtgtcggggggtgttcatatctgtctgtactctcttctacaactggaaaactttccctaaaaaacaaaaaacttgtatttgagtagtggtgtgtgtgtgtgtgtgtttgtagatggggcataaaggtagagtgataagaattgacaagcaccaatatttattgagcactactaggtgtgatataatttgcattattttatctgagtattacatacaagcaataagttgggttttggtgcagtcattgaacctttcacctgccattttttaaattgtatgaggctaattccttgtggatagcagggtgaacagaaatgttattggtactgagatctttctgtcacttttagttgccatagccctttgtagtttagagaaacttctgataaggaaattaattctcacaggctaggcttgctttccatgcaatacttcgtttaacccttcctacaaacactttgatgtagatactattactatcttgaatttacagttgaggtacttggagatgagaagagcccaaacccaggtcttcctgtttctgaagactgtgtttttctgcctcccttatgtagtaaaaccggagaacagtctggagtgt

SEQ ID NO: 137509 - DNA, 1542 bp, Homo sapiens
agaaatataataccagcattgttaaatattgtaatttgaataagagtccttgccattaccttcttcttttgggaattgtaacattggaaggcaggaaattcttggaaacaactgtttacagggatccctgagtagcttctccaacataaaaaagacactgaatcatgttagtttaatgaaagaaaaagagatcttaagaggaaaatacacaccctattaaattcataagtatagaagaacaatgaatactagtcataaaatgctaataagtaacatataactttaactaaaagtatgtcaaatgcctttcaggatatgtatgtagcactgaattgatataggaagaccatacatgtccaccatcaggatatgtgaacaaaatcattgtttatttgtatctatgtgtgtatgcacgtatgtataaatgtgtgtgtcttatttgcttcattgtaacttttacccatagtccaacttacttgttatggtcattatttctactacatcctcagcattaattgatacttcaggtggaggatgagtacttacttctctgatgcagttattggaataaatcgtacaagcaagggtagagaatgtgtgaagggatttggaattgcaaggcctgtgtttgaatcctcaccctgccacttcgtagatatatgactttggacaaggcagtgatctgtttcctcatctgtaaaatgggggctgttaatcccaacttcattaaagggttattgtgaggatagaatgaactatcttaaatggctctactttgtaaaaaccattaagcccattatagagttttatgctgctattctccaagccaagtaggaaaaatgttgtaatagcataatagcaatcccctttctgtctttttccttccagttttcatggagtgataatgaaaggagcagcagccgcattaatatcccagagagagcaagtggaccagaaggcaacttaaaccagattgttactgaacccgatgcaaactttccccagttcttgcatgaggggtatgtaccatgccaaggtctttactcccatatcaaccagaccttgaaggaggctcacttcaacagcctgcagcagcgagggcaagctccaacatgatgaattaggacttccttattccaacctaaactgtgtttataaaagcaattgcatacacaccaaaaaaagtctattggtttttaagtctacattttaagtaacaagttaatgggcagttgtttaattggggttttacttcactgttgtacttttaaaggggctgtgaataaatgtttatgaaatttttatttttatttttattttactctttctacatagagttttcaagttgagtgtcaatttcatgttaaggtagcaatatgaggaaacttctcctgtgcattgaagccatatgtccaattcagattgatttccagatctgtcagttagaaactctatgttaaacatctttttaaaatacaagtaagtcttcatttttaaaaatacagtagcctagtaaagaggtatgtagctttcatttaaaaa

SEQ ID NO: 137510 - DNA, 1021 bp, Homo sapiens
tatattgaaaattcagacaaaaaagaataagctttgtaactgtcagatagtataagcattctggtaagacatttgtatgaggattcaggaggatggtgaagatgttttatatattatgagcctttccaaatactaaagtgcttaaaatctcatttattctctgataaaagaatttgcactttgggaggctgaggcaggaggatcccttgagcccaggagttcaaggccacagtgagctgcaattgcatcacagcaatccagcctgggtgatggagcaagagcttgtctctaaaaaaataataaaataaagtgtattaaggttaatgcttctgtactaagatagcagtttcaagtgtcaaaaccatacaccatcaaaagcaaattttcctcttaatcattctgataaacggtccattaagtgggatctcacatgaaacagattcacaaggtaagtgtgacaaagcccaggttgcataatataggctatgtttattaaataaacagcattattagcctagaaaatgctagtgtatatgactttgtagatgctctttactaggctaaaggaggttaaaccctcttcccaaaatctcggttatggaatcacagtgctttttaagtctttgctttgaagtcagaagtaactgaatccataagcaggagattttacttggttttgtagtagcattctttagtttgcctacttaaaatgtttctttttcacaaaagaaatatatttgtagtggatgagttagaaagtgaagatacaggacgggcgcggtggctcatgcctgtaaccccagcactttgggaggccgaggcggacagatcacaaggtcaggagatcaagaccatcctggctaacatggtgaaaccccatctctactaaaaatacaaaaaaaaaaaaattagctgggcgtggcggcatgcgcctgtagtcccagctactcgggaggctgaggcaggagaatggcatgaacccgggaggcagagcttacagtgagctgagatcgcgccactg

SEQ ID NO: 137511 - DNA, 1369 bp, Homo sapiens
gcatacaagaaatatctcttcagtgtcgctacaccactggcataagaacttaagagtagacactggcagacacacatgtcttacgatcttattgaaggagttaaaaatcacttaccctggaattgtaacttcatggagtcaaaacaatgaaactaattaggtagattttgaaaacttagctattaaattcctcatattctttattttcaaggatcatttaaggttatgaaaattatttctagaaatgaaatgcacagcttggctttacttagagttcttgtattacatttttttatcttcatgcctggtaatggagtacttatatgacttttatatcttgggatagcagatagtgacattttttcagacaagttctcatatatgtatgttgtcacggctttacaatttaagcatccaaaagatcagttgtttcatgtaacaactctctctttacaatttattttcaggaaaagaagaagaaatggcagtaaagagggcaaccatcattccacccagcccaaaaggaataagagaaaccctatctttcaggattctcaagatacagaggtagcaagtatggtcagattgcctctatttcattcattgcctacactaaattatccaatttgtgctccataatgaaaagaaatgtattattccaagaaaccttcataaaagttttcttgcttgattacagtggcttttgagctggagctttaaattatgatatagtatctcacagaaaatggaaaagaagcacagaaaaactttgctaaacataatcaggaggaattagcccctgtaattttgtcccctcatatgagcagggaatagtagtcttacttcccttctttttatatggaaaacatattttctagtacatagtgatatgttattagctggaaggcaagtcttgctttctcagtgaaaaaaagtgaaaaatttggggcagtctcatgatttttgcaaaactttaatggtgctggaaaaagagtttgaagtttttaattttttattgatatagaatagttgtacatattttgggggtacatgtgatattttgatacctgtatataatgtgtaatgaccaaatcagggtaattgggctacccatcacctcaaacatacatcttttctttgtgttgggaacttataaatcttctcttctattttgaaatatacaataaattattgttaactgtaattttcctactgtactgttgaattctataacttattccttctatctaactgtattttataccccttagccaacttcttttcatccccccttcctctcttctaaacctctagtaaccaccattctaaggagcttgaattttaacttcaaggtgcttcactttaataa

SEQ ID NO: 137512 - DNA, 2008 bp, Homo sapiens
cacacttacttttagaaacaaatatttgtcttcttcacgtgtcttactcttcttttccatttccctctatctctgtttccttttttgccacactgttcatgatatatacttatttgatgttttgatgtcaaaaatagtgatagcttaacactaatgtggctatataattaattatgtaatcagaaatactttcctagtgaaaaaagagtcattgtggtaataaagttaatggcccctaagatagaagaaacacctgccaagtggagcaagaagatggtcagatccacagaggcttcttcatgtgctagatttcctgctaaagggggataaactgttcagctggttccagtgccagcttctactattgaggatgcaagtggaagcagaaaagatgggggaagaagtcagaaactcatattatttattcgggggaatgccatgttgggtgcaccaattatcagagggactaatcagttgctgaatcccccaattatgactggtattaccagaaagaagatcataatgaatgtgtgggcggtaacagtaacattgtagatctgatcatcccctagcagagttcctggttggcctaattctgcttgaattagaaggcttaaggcggtgcctagtatccctgcccatgtgctgaatagcaggtatagcgttcctatgtctttgtggttagttgaaaacaatcaacaattaatgaacataagtggggaaaaaaaggtaaaatggctgggtaagcattagactgtaaatctaaagacagaggccaaggccgctttttagcagccctgaggggatttctcatgttgaattgcaaattcaaaggagaagcttcagtcctgctggggcttcccccaccttttcccccaacggtggagaagtagattgaagccagttgattagggtgtttagctgttaacgaaattttcgtgggtttgaattccaccaatctagcaagggcttagcttaattaaggtggttgatttgcattcaattgatgcagaatagagtcttgcagtcctcaggtctgttacagaaattaagtgtaatcttcatgctttgaaggctcttggtcttatttaacctaaatttttaagttatagttagtattaatggagagataggtaagaggagggtagaagagataagtggggggaagaatggtatgggttttgtgtttttgaattgtcattttattttcatattattagacgtggggaataatgtcactgaggtggaataaattaggcgtatgtaaaagtacaggttgagtagggttatgatagctataatgtttcagcaataaggctcttgttttttgtaaattcttggatgatgattcatttaggcaggaaccctgttaatggaggtaaacctcctagagatagtagaattagtggaattataggtgtcaaccatgttaatttgtttcaggtgtgtaatagtgacagcgttgtggtgcttatactcaggttgagtgttaaaaatatggttattgttaagataaaataaataggtttagaatggtaatgtttgggctatagagtagtgctgctattattcagcctatgtgagtgattgaggagtaggctaagattttacacaattgtgcttggttaagccctcctcagctgcctactataatggatagaattgtgatagacaggaggatgttcatgtttgttgatgggaaaatttaaaacataatcgatgtttcttcacaatatcatgtgaggagaagtataccaggtattagagaggttccttgggttacctctgggactcagaattgaaagggggctattcctagttttattactagggtcactattattaatgatgaaaattgattaatagtgtttattattgttcattgtccagaggacaggttgttgaaaaggatacctattatgagaattacagatgtggttgcttgcgtaaggaaatatttggttgctgcttttgtacagctgtagagtggggacttatatttttaatt

SEQ ID NO: 137513 - DNA, 1360 bp, Homo sapiens
taaatgaaccacttatcagtaaaactgataacaggataatggctagggtgacctcatttgaaattgtctgggccacagctcgtgatgcgccaattagtgcatattttgaattagatgctcatcctgatcatagaataaatggctaggattgatatggctagtataaataggaggcctatgttaaaattaattagaggatttggtatagggaggggagttcataagaggagatcgataggaagggctaggattggagcaataatataaagggtaatagtagatgttgagggctgtaagggttctttggtgaaaagttttattgcgttagcgaatggttgaagcagcccgtagggacctacaatgttaggtcctttgcgtagttgtatgtagcctaagatttttcattcgatgagtgtaaggaatgctatagcgatgaaagtagggataataagtaggagaaggttaattataggtatattgttaatgagaggagttgaacctctgattataaagttttaagtcttatgcaattgccgggctctgccatcttaacaaaccctgttcttgggtagggtatgtgatgatttgttagattgagatagcatcatctgtggagcgagggcactttatgaagtgggccctatttctcttgtcctttcatactaggggaaatgttaaatagatagaaaccgacctggattactctggtctgaactcacatcacgtaggactttaattgttgaacaaacgaacccctaatagcggtgacaccattaggatgtcctgatccaacatcgagattgtaaaccctattgttgatatggactctagaataggattgcgctgttatccctagggtaacttactccgttgatcaaattatcgggtcaatatatattaacttgcttaggctagtgcagtcttagtttaggttgctcggaggttgaattatgctctgaggtcaccccaaccaaaaattttaatgcagggatagtaggctagggcctgtaggcttaagtttttatttgcattaataaattaaagctccatacatagggtcttctcgtcttatttgtttatatccgcctcttcgcggataggtcaatttccctgattaaaagtaggagacagctgaaccctcgtgtggtcattcatacaagttcctatttaaggaacaagtgattatgctacctttgcacagtcaggatactgcggccattgaacgtatgtcactgggcaggcagtgcctctaatactggtaatgctagaggtgatgtttttggtaaacaggcggggtaaaatttgcggagttccttttactttttgtattctttccttagagcatacctgtgttgggtta

SEQ ID NO: 137514 - DNA, 1050 bp, Homo sapiens
cctcccgccacccctggcctcccaacccccaacacacacacagcccgtcgtcagtgggaatggagccgacgcactccttccctagaccgtcgagccaatcttggaatgtttgtagtaggctgaaaatacagaaactttaagctatttttttctcttctgcaaactccaggcccctccaatctctagctgtcatttctgcccttgtcccacccctgtcgctgcctgccccttttcctatctgctagcggaagtccctgtggaggaccagcctacttcctctttggtgctaggagtgtgcgtggcaggagaggcggggccaattttgctgagctttctcgcgggcttgcagctgcggcaagtgctggcggcggctgctcgcgcaagtcagctggcgtgggaactaccctttgtagctgagaacggcttgtttattgctacaaagactctattgacattggtagcttcagcggcagcagcttcttacggtataaagctgttgcttcctgaagaggctacaagcatccttccctaggactgctgtaagctttgagcctctagcaggagacatgcctcggggacgaaagagtcggcgccgccgtaatgcgagagccgcagaagagaaccgcaacaatcgcaaaatccaggcctcagaggcctccgagacccctatggccgcctctgtggtagcgagcacccccgaagacgacctgagcggccccgaggaagacccgagcactccagaggaggcctctaccacccctgaagaagcctcgagcactgcccaagcacaaaagccttcagtgccccggagcaattttcagggcaccaagaaaagtctcctgatgtctatattagcgctcatcttcatcatgggcaacagcgccaaggaagctctggtctggaaagtgctggggaagttaggaatgcagcctggacgtcagcacagcatctttggagatccgaagaagatcgtcacagaagagtttgtgcgcagagggtacctgatttataaaccggtgccccgtagcagtccggtggagtatgagttct

SEQ ID NO: 137515 - DNA, 1048 bp, Homo sapiens
gagaccattgccacagcaaatgtgcactgagcacccacattgaagtctcaactctgagttgcaaccaaatctcatatggatccacaatatttgaaagaggaaaaaaaaggttcactaagaaaggaacacacaggttgtatacacgtatcagcagaatccagagcatagcactcaaactggggacctccccccgaccgccgctgcaaagcctctctactatcgcttatgtcacaccccttcctccaatccccagacatgattttataaaaggagacggaggtgtccatagatcttagaattgactcaatgattgcttgaaagagagtagccagactggaagaggctgaagaatgtttaattcattggagaaatgtaactggtcacccctgctcacctgtagtaaccattggattgtgtactcagaaagtaggattatttatggaaagcaaacaagtttctttgtatttccacaacaacctataccgtatgctgtattaaattttgagctcctgttagcaagatagtttgtatccatgtggctccctttcaatttatggtgtccatatccctctagtggtttagaacttcacctaaaaacggacgtatctcatattagcattttggaccagcccgcagataatggaaggcaatgccatctaatgtttaaaagcaaagtgtgtattttggacttggagagaccagtttcagatcctacttctgccgcttaacaggagtctcacatggcaatgtgtaagctacctaacttctctgattcccagtttactcatctggaaaaaggaggactatgattcctgtcgcttagggttgtggtgaggctgagatgaatgatatgactatatacccaggacaaaataggtgctcaatatatatataagctatggataagattcacattcttgctccattctggaatctgcccccaggatcaggggagggttctgtatcacctccagagcaacctagcacagcgttttccagctgtgctaccacagaatgtagccctggctttaggatcattttacgcacc

SEQ ID NO: 137516 - DNA, 2411 bp, Homo sapiens
agcataatgaaatgaaaagaatgctttaggtggggacaacgggagtagaagtgttctgatgctactctatgtcatttgtttttacagaaatatcttgtgaagtcagggagtattcctttatcagcaaaaacttcacaattggtgttccagctgtggctgaccagctaaatagtttgaaagaaaaataatattttaaaataaagtttaaagagctttaaaagaaaaacatttaaaaaggaaaaaatcatttttaagattttaaaagaaaaaaacttttaaatgttgaaaaaaatttaagttgttatttttaaaagaaatattttaaaagttaaaaataattttttaatttaaagaagtttcagaattttaaaaattaaaagcaaagaaaattaaattcttaaagtttaaaaatgtaaaataaattaaggaacaaggttaaaaatgaaagtttaccaaaaaaaggaagaaaatactgttaaaaattaaagttagaaacaaaggaacatcttaaaagtttcaaatgaaggaaaataatataaatagatatttcaaaattaaagcataaaatatacgtatttaaaaagtgttaacaaaattactactataatgattaagaaataaattttcaaaaatacagaatggaatgcaattcagattttagagaaaagttttaaaagaggcaagtttagaataattcaagacaaaaagacaaaatgtgtttaaagacaaaaattgaaaaaatacaggaagaaaatagagacttgtaaaataaaaagaaccttagataagttcaagagatttaaatgaaaactttaaatatttaaataaagatttaaaaatttaagcttttaaaaagaaaaacagttacataaaaattgaccagtgaaaaaatgtgaaagattcaagtagaaaaaattattaaaattaaaagtttaagaagttctatttttttatttaagcatattaaaatacagacgggtatgaaagaaataaatggaggagacaggaataacgacagcggtgtgtgagtatatatatatatatatatttttttttttgagctttatgttgatatatcaatatacgttggaaaaggaaatagacattttaatcattatcttaccatccaattgtgaaatggctgcaaggcctaaacactaactaacccaccttcccctcttgagattccatgccccatctcatatcctgaaggaagtcaaattacttcctaggcagaatcaattcatctgagaaaaatgaaaacattagggactttcccatttagaactgcattattcatacaaattcttagcttctgaaaaggggctcttgataatttggtggcttagagaagttagatcacagctgtgaagctctggctttggtatttgagccccatggcctgattgaggaagtggcagggacccatatctgaggccttcccaccttcctttttccctcttccccctccaaggagaaacaagacctttaatttccacagtagagcaatgggtttgtgcttgcagtccttctgctcattctttattccctctttatttcctttttttgtcactcatgcctagttccctgaaccccttacttacctggccttacctacatctctgagccccagcctgcagggctccttctttgactattcacctggtggcttttactcctccttcaagacccaactcacagatgacttctctggagtcttccctgaatgctctaggcaggtataaatgagaaaattgttcctctcttcccctctttattcctctcactgtgcctccaaagtactttgtccatacctcggtgatagtacttattctactgtgattttattgtagctttgtgattgtctgcccctctgcactgagcatctaagaacagggggccaagccttattcatttctgtgttaataaatatttgttaaatgtgaagatgagttcagttatttgctctattcaccttgtcagtaatgttttctcaccccttcatccatcaggctgccattaaatgcccagtgctatactacagtgtgatcagtattgtattttaccccaaagcaggatatgaaaagcactcagctgcaggggctggcttaagaaaggtgctcagtgagaaatagccaggtgtgtggagggaggcccaggtacaatgcagagaaaagagcacaggcctggaagttggcagtcatggaagactgggtggggatgaggagcagcagctgaaggtgaggctgagctctctggcatgtgtgtggccacactgcccctcatcacagtgttcctcagcagcagtgtctcacaactgtgtaccacacctctctagggtttaccacattagtttaccttccccgtgagacagtagtacctcatcactgcacagtgttcttcatcacact

SEQ ID NO: 137517 - DNA, 1410 bp, Homo sapiens
aagagcgtgagcccgcgccggaggagaacttgacgtggagcagcagcggcggcgacgagaaggtgctcccttcaatcccccttcgctgtcacagcagctcctcgcccgtttgcccgcgccgcaagccccgccctcggccccagccccgggcccgctcccgcagccagcctgggctctcggccccacccccgcctccagcccggcccccgcccccgccgccacccccgcccccacccgcaccgcggcccagggcctggcgtggatcccggcgcagatcccggcctgggtccaggcctcagacacggagaagctgctctggtgacctagacgggtcgggggatcctggcggcttaggggactggttgctggaggtcgagtttggtcagggtcccacaggctgctctcatgtggagagctttaaagtaggtaagaactggcagaagaacctgaggttgatctaccagcgtttcgtttggagtgggaccccagagactaggaaacgtaaagcaaagtcatgcatctgtcacgtatgtagtacccatatgaacagactccactcttgtctctcctgtgtcttttttggctgcttcactgagaaacatattcacaaacatgcagaaacaaagcagcaccatttagctgtagacctttatcatggggtcatatattgcttcatgtgtaaggattatgtatatgacaaagacatagaacagattgccaaagaaacaaaagaaaaaattttgagattattaacttccacctcaacagatgtttctcatcaacagtttatgacatcagggtttgaagacaagcaatcaacctgtgagacaaaggaacaggagccaaaattggtgaaacccaagaaaaagagaagaaaaaagtcagtctatactgtaggcctgagagggctaatcaatcttgggaacacttgttttatgaattgtattgtccaggcacttacccatattcctctactgaaagatttcttcctctctgacaagcacaaatgtataatgacaagccccagcttgtgtctggtctgtgaaatgtcttcgctttttcatgctatgtactctgggagccgaactcctcacattccctataagttactgcatctgatatggatccatgcagaacatttagcagggtacaggcagcaggatgcccatgagttccttattgcaatattagacgtgctacatagacacagcaaagatgatagtggtgggcaggaggccaataaccccaactgctgtaactgcatcatagaccaaatctttacaggtggcctgcaatcagatgtcacatgtcaagcctgccatagtgtttctaccaccatagacccatgctgggacatcagtttggacttgcctggctcttgtgccacattcgattcccagaacccagaga

SEQ ID NO: 137518 - DNA, 1048 bp, Homo sapiens
gatttgcgcctgatcccacatgacttagtatagcatgggccatcgtgccaggtaccaatccggacttactccattgcccctttgcccccttggacacacacacttttaaacaatgtgtgcaccctaacgaaccatagttcctgagagaagtgcaaggttacctttcggagatgccacaggtggagccttttctctggctcatccagtatctcagaagttctgcttttttatagccttttctcgaattatttcagggttgttattattaaccatttttattgtcattagtttaaagtcagccacaacacccaccctttgagggtctgccccgctcacttcttcccttgcctcattccttgttctccactttccccttcatataaccttaacagttcggtgaagagtttatttccaaatgtccacgctaccttcagtgcctccatttttactccctccccttcttctctattatttccaaacctcagattgtcccctcaccaagattttctgacggtctcatctttttttatttctgaagtaccccatgacaaccttttcccctgcaaccaccccttctctctgccctcctcctctcaagatgatttttgtgtattttctacttccgtggcaggcaccctgtgatgtcctcttctttttgccagtgctccctcccctatgctgggtggagtatccaatcaaatatctaatacataatattttcatcatatattctgatcgtatatttcagtcccccccaaacttatttaagtgtctcttgaattttcacacatcctatggtgctcccttccccggcccactccccaagacaggtcacataaggttttttacattttcatggcacttcaggctcattctctatcccagcatttactgcactgccagtttacctatttttctttcccacataatctagaacattctttggacctggaggatgtgtactagggagtatccctagaatctagactggtgcctcacataacaggtggtcagaaaatgcgcaagacgtactagttgttaggctttt

SEQ ID NO: 137519 - DNA, 14292 bp, Homo sapiens
ggcgggtggttaggtcgtaactactgcccccgccggctgactctccgagcggccgggctcggaagccacgagccagctgaggcgttctccgcttagtgcctacggcatgggtcagctctttctgccacctccgccttcgcggtcctcacctctttgcgggtgaagttacctttgggtttccagaccttgggggcctgaggcccaaactcgggacgaacccctaacccacctctcttttcctgtcattctccaactcttactttgtaccacggaatcacttggccttaaagctagccagctcggccgtgccttgaggccaggttcgagagataaaggtaaccgtggggaaagcggccccccagtggacaaaggcggaggcaagaatagagcaggcctgagggccataggcgatgagaataggcagttgaggggtgaaaaagaaaacaaacaaacaacaacaacaaaccctgaagagtactgaagatttagaagggactggaaaggacttgttgcgcaatggaagaatctgactctgagaaaacgacggagaaagaaaatctggggccgagaatggatccaccactaggggaaccggaaggatcgcttgggtgggtgaagggtatttgtgaaacctggaagtgggggtgttcaaattgaagagagtattgtgaattagaacacttctccccaccccgcaccatgataaattgctttgatttaccagtaatgttgattgggattatgctttggacgacaggataaactggaaagcgaattggtgctaactgatcagaaacaacccttgggaaggggctgatattcctggtggtggtgctgggggagtgttctaattaaagcagttatgagttgctttgaattatcagtaaaggagatttgctgtcaccaggttggggatggaaagactagaaagaagatttgcatttccaggtcagagcttgagggtgttttctgtgccaatttgtacctgaatttgagacttacatctactttgtgtctgtgatgagtgaaatagggcttggaaggacagctgaaggactaaaaagatacttccagattttaaaattaggaggctgaatgttttttatacatagaagatattcaatactcagtcctcaagtagaggatatcaatatattctgtttttttagaaatagaagatattgtttgattaaagcagctgtgttgctttgattaagatgatgaaaaattgaatcttgaattttaatggctcatttgtattcctaaataaatcttcctaggagttctctcttgaacttctaattaggagatagagagtatacacacagttttataatttaggaaaatgggacctctattcatctgaggtcccacacacacagctgtactcagccgttgtactaaacatgctcttttgtacctccatgtttatttatacttcattaatttcaatttctaagggaattggatcatggaaactgttttttggtttatatctgcaggtgggtgctaccaaatacagccatgaagaaaaaggtaagacgtgttagatacgtcaaaaccatgaaggtaaaggtaagaagttgatattcaggaactttgtgacatatatacaccatcttttctggactattgcaggagccttctgtgtggtctgtctgactctcttctccttgtatgctatcagatttaatttttctaatatgaaaatccgactgagtcatctacatacttaagaacctttagtaacttctttaagcccatggaataaaatccaaatgatttcatggccctttaaaatctgttcctgaccaaaccctgtgccacacttatgcaccctatcacagccctacagaatttattgttctccagatttacaaattaatttgcactttgtgtaagccatatacacacaccatacaggcctctgtctgcacatttatttttaacctaactcaagtgttaccactataaggtcttattgagttcttcagatagaattggacacaccttcctttgtgctctcatagtactgtgccctacgttggggtttaggcagaattgctaagagtgcagctcaagctaatttcttaaccttttggggcttcagtttcctcatttgtaaaatggtagtaataatattaactgtatcgtaagattgttgtgacgtttaaattagtaaatgcctgtagaacacttagatcagtacctaacatgattagccttggtaagtctttcataggcaattgaaagaggtacactgtataaattaataaccgaaggaaatgtaccatatttagccttagcttcatctaataattcagttctgtaactacagtttgctaagagaatgttcttgatgagcctgtctgaagttgctttcattgagaatgcctaaaagtacagaaatttctacatgattaagaacaaaaattagcttgatttaatcattctgcattgtatacatatatcaaacattgcattgtacctcctaaatataaagagttattgtttttcaattaaaattttaaagtacaaaagcaaactttttgtagcaactttagactggctcagcagtggcatttccttagtgagataaagttatatagctacatttttagattaaatcaagtctgagtgtagtatattttcatcaatacttcttatattagtaattagaaatttgtataaaatatcttgggattgaaggtagaacataggttcccttcatttgaaaagcaagttaaggctgggcacggtggctcatgcctgtaatcccagcactgtgggaggctgaggcaggtgcatcacttgaggccaggagttcaagatcagcctggccaacatggcaaaaccctgtctgtactaaatataccaaaaaaaaaaaaaaaatagccggacatgatggtgcatgcctgtaatcccaggcatgggatggctgaggtggggggctcaggtggggtggctgaggcatgagaatcacttgaacccgggaggcggaggttgcagtgagctgagatcatgccacagccctccagcctggatgatagagtgagacttggtctcaaaaaaaataaaataaaaaagaaagaacgaaaaggaaagcaaggtaattggaactatatttcataaattctagatttgaaaggactctcaaaagtcactttactaaattcccttttagtacgagagtatagaacatcattgacgagtgctctctgtgtgacatgctgacattgacaggaaggctgcttaccttcatgaggctaccttttcccttggacagttctcactgtcagatactctcttgctttctatatttgttttgataacttgcttgttcttttgatgtacatactttgagcatctgttgtatgttaggcactggaggtatgaggggactttctctccccttccagagcacagagtcttctgagagagaaggacagaccccccaaaataagtaactgcaatgcattatagtctttgcaatgaaataacagtgccatgggaggacagaggtaagacacttaagtcagcctagagcattagactcagaatatcttcttgcaaaaatgattactgaaccaagtcttgaaggataactgcaatttagctgaaggaagaaaagagaatggatagtttactggcagagagtactgcgtgaaacaatggcacagatgcaggacctcccagacggctgggaacaatcagagggactaccagcagttcaattaagtgtggctgtaagctaaaagtttcaggccaggagggacaggagatgagggatgagaagtaaatagactagatcaaggagggtcttatatgtagtctaaggacttcatcctgcaggccatgggaagcttttgaaaagaaaaaggagggacagtaataaatggaataagagcatagaggtaagtagaagggatgagatcaaaggcagaggtggaaagattgaccttgatcagaaggaggaagaactttcagttatgttgcaatcctctactaggtaattcagttaacaaaacattgggttatgatagaacagggtttagtttcctctaaacttggtatttttctaacctgtttctgaacatattaatggtgcatcttaatagcataaattcagtgtaattctgtcacctaaaggatgtatgtcctgtgacaggtaagtacctggctcctggaattctaagtatctctgcattcacccttcgttgggaagagtttagttagttgtgagtatgcgcaccaggttgttggtactgtcagttcaggaaaatatcaaatccaggagagaaatagatccctttagacttgatttgctctagattgctaacttttttcctttccttttccctactttgtccttaggtgctgttgatgggtaaaagtgggtctggtaagaccagcatgaggtctattatctttgcaaattatattgccagagacacacgtcgccttggcgcaacaagtaagatgttttatcttattgtaaagtcaggtgatcttaactattaataatctgcataacacacttggtttcagtaccttggggatgcagagaggttggggaatttgttatggagcatgtttaccctttttgcattcgttttcaaagaggtgtggcctaataccagttactactgcttgctgtcttgggggaggttcttttctttctaggttgtttatgaagtggattgcccttgtccaactttttgtttattctgctatttcttaaacaagcattgtttgttcgtcttgtggggagagtgtttttaactcttatacaaagggaaatccataggtattaacaagcataacagtaaaatatgctaagattttttaaagcagtagttacaccttgtcttcgttgaaaggtaaattacggtggtgggaaggaaagaagttaacttgatctgtactctgctacttcttttcctggatacacatagatgatctcattagagttttggttctgacttagggaatatgttgttgccttttatagtttgagtgttagtatatactaattgggctgccatggacagtgaatgtaggatcctgggagagcccttctgtctctgggttgtactgccatttcattctgcagcattcaagcatttctggattctgcttggtccttgatttttagggaaaggccacccactactctacacatttcctgaagtttcaagaacaacattttaaaaacacagtatgtttcagaccctaggaaataaaggagaaggaaacctcatttctgttattatcgtgcttggagtgtaagtgtagactctcataattggggcagctttgttgtctagaaagctgtttcttgaatgtatatatatgtattttttgagatggagtcttgcgctctgttgcccattttggagtgcagtggtgcagtcttatctcctgggttcaagtgattcttgtgcctcagcctcacgagtagctggaattacaggcacccacaacgacgcccagctaatttttgtatttttaccagagatgaggtttcaccatgttggccaggctgatctctaactcctgacctcaagtgatctgcccgcctcggcttctcaaagtgctgggattacaggtgtgagccaccgtgcctggcctatttctttttttttttttctgttagcttgttctctttctgttctcttaagcctctacaaatatttgaggatagtcagtgtctcagtttgtcctagcgatctcttgcctcacaaatcttttttttttctttttggagacggagtcttgctctgtcatccaggctggagtgcagtggcatgatctcagctcactgcagcctccacctcctggttcaagggattctcctggctcagcctcccaagtagctgggactacaggtgtgtaccaccacatccagctaattttttttatttttagtagagatggagtttcaccatgttggccaaactggcctcgaactcctgacctcaggtgatccgcctgcctcggcctcccaaagtactgggactgcaggtatgagccaccatgcccggccatcttgcctcacaaatcatgtcttccttaagttaaaaatgtccagctcttccatctatttctcatttgacatattttgaaacatttttggggacttgttcaaacttgtttacatttttcttatggtattgagagttagatgcaggtggagtctgatcagggcagagtgggcctatcacatctcttattcaggacattacattgctgttagcacagtctaacatgtatcctccttttttggagtaactttcgttatgaggagacttactaaaaaactctttcaaatagttcaaattccctttcagatatgttgttattaaaacacatacccttctggctcttgtgcagttaatattttgaaccaaagaataaatgcttacttctattaaatcatttagttttgtttgttttagcccatgatatgttcctgtaccctttgtttgttaactgtgaaatccagaacaagtccaatccctttttcctcatccataaaaaaagggattggatcctattttcattttagctacttattctcttatctgatatattagttatctttcctaactctaatatctgatacattagctatctttcctaactccatggagtttgtacatttgatgaatatctcatctagttttcatctaagtcattgaccaaaagttttggtcaggatagtgtcctatggcctgtcatgcctctataattgacatctgtagctctggcctctggaatgtctacctgtccaaacttctctctgcttgatttgatagattaaaactttttttttctttcaagttaaatatctgggcctaattacccttatgatttcagtagattagaggaagctaatggttattgaacaactgttatttgtcagacttttgtttactgttttatttactttagttctcatgttaacttcatttttatagagaataaagaaggaggtacaacttagaaattaatattactcagctaggaagtatcagagctggaatgtcaatctatgctcttgctttattccttatgccacattctatctagcttaccctctgctaacgattcctggcagacttatttttatttctgttttaaattctgaacacttttgttgaagcatctttttctagtccaattgctgttgctgtttttatatagctgatcagagttgacttattaccctgaatccagagaacagtcttgcaaccagcatttcagagttattcaaactgcttgaaatagttttgacataacctagcagccttattgtgaacagaattttgcaaattatatgaaccccatacattaaggcaaaccatttattcagcaagtacttttctgaaactttttatgtagcaggcacagagaacgggacagagctcttgcccttaagaatatctcaagcaggacctttattactaatactttgttagtaatcactgtatctccttacaggtagtgaaagtatactttaaaatattatgttggtcttaaggctttaggatatcatcattagctagtttgtcattgctaaagaaatacctgcgttctattgctaaacttatagacaagttcaaaatgcatatatagtgctctgctttttatttgatagtcctctttatgtagttgctgattttctttaaaagtagtaagagtacttttaaaatattgcattgattttaatgttttagtgtttttctagtttctcattgctgaaaatagtccagttttattttgttaaacttagagcctgctgtgttttgaaatttgaagtaagaatacatgatggtgatattattaacttattagggggctgctaaaatgtatttgttggaacagtaaacttgtcaataaaaatgattatgaagtattttagtctcaaacactgttgacggctccaagatttcctaccttctcaaaattctctgttcccttggcttttatttaatgctctattaccctggttttcttccattatctttaattatcccatccctctttaaaaaaaaatctttatcatagtattttcttctttctgccccgtaagtgtgtgtcattccccaaagctctgttcttggttctttttagttgttcttgtgataatagggtaggaagactaggagagctagagatccatatatggaagacatgagactaaagagggaagcaggaagtgggtggttagatcataaaatgtcttgtaagccaagttagatagtaggaactgagggtaaagagagttttaaacagaagagcgatattttacaggtcccagggattaaggaaaatgttaaaaaaaaaaagaaaagcaacatgagctgatttatattttattgtttttaattttcagttttaattacaaaagtagtacttgtgaaaaattcaaacattacagacgtgtaaaaagcctcttttctccctcactctcaggcctgcttcctagggacaaccacaattagtagttttgaggttatccttctggccctttcttttctgggtgtatacaatcgtgcatatgcggagagacatggtttttttctgtttaaagaagaataaaaatctgcattttggagagagatcactctgtctgtaatatggaggatagattggagggagggaaggctagaaacaggttggtaagttaggaaactattttaatagaccaggtgagagatgatgggggcttgatttgggctagggtgatgatagtggatatggtgagaagcaaatggatttgagatctatttaagagatagagtcagccggactttctggtagatttggggagaatgatgaggaaaaaagtggactgaaggatgaaactgaggttttggcttaggcaactggttgaattcactaagataagactgaaagaggaatagattttgtaggaagaaagggggagatgatgagttacatatacttggatacgttgagttttggatacttgtggttcattcaaatggagatttgtaatatatgtcagaaaggtagagaaatctgttctagagatacctgtttctgagtcgtcagtgtccaaatggcaaataaaataataagaatagactagcttgccttggggaaggtggccaaggatggagtcctgaagagctccaacatttaagggacagaaagaagaataggaattgtaagggaggatctgccagagaagttgtaggtatgatatcagagaccaagagaagagaattttttgagaagagagtagtcaacagtgtcatgctgcagaaagtaagacaaggactaaaaagtccactggatttggttatggggccattggtcacttgatgagaataatttctatgatatgggagtagaaacctgatttctatcccatgtgccccatgtctaaacagtcactgactcctgtcacttcttttgttattgtctttccctttctcagtagcacttctttccatttttttttagtactagaccgtatacatagtcttcaaattaatagcagtttgagcacctactctctcgtagactctgttggaaatacaaagacatgtaagatatgattccttttccaaggagggggaagtaaaggggagaagggaagtagtttgagcacctactatgtgccaggcactttatgtatgataattcattgaatcctcatagtaatcctgtgaggtcagtgctatgccccgcccccccgctttcttttttaatagaagcggaaactaatacccagagcttaagtgacttgcccaaggtcacatagagaggtagagctgatatttgaatgaagatttgttcgattccaaagcctgtgctttttaaaataatgctctgctgcttgtgatgtagtttataagaagataaaattgcacaaaagttagatagcagtcaatttaagcaacagctttgagatagtcataggagagatatcactgtgtgattgattatcacaaattgtatagatgataattcctagactttgataaattttcaggataaaatctttcattattactccttggggtttttagtgcctggcagagagtagatgcttaatgagtgtttgaatgaattcagagggagagatgatggtaagtaggggtagctaggcagggcttttagaggaggtgggatttaggctggctcttaaaagatgaatatattttgaaagaaagatggggagggatttccaggcagatgaacagagtaggtgaagaatagaggggagggaagtgtaactcagaggtcgcaaacaggcagcctatatcctggataaggcctgtagatgtgttttgtttggcccatgtgatgttttctaaaaatgggaattagttatcagcatgtaaaagttttcataaaaatatggatttcccactactgctgaaaaacttaaagatctggtaacccagagtccccattcctgcatggcaaatgaaccagagctgagtaactgctgctcactctactatctcattgggtagatgtttacactccatatgtggccaactttgctcatgtacggttactggcctggcccctgttagcaagtttgcgacccctggtgtaaagtattttgggggttggggaggcagtggggtttgggaggactgtgaataaaccaaattgggctggagtgaaaggctttattaatgtggatcattggggaatgtataggtagattggaagccaaattgtgaaggaccttgaatgcctccccataggcatggaggagccattgaaagtgttttgaatggggagtgacatgttcaaagtagtgttaagaagatgagcctggcagtagcctgtcggatgaagtaaaattgagtaaggctttttggtggggaggtgagttatggagctattgtagtagtgtagacatgagatgataaggggcttccttaatgtttgtggtaggttataaaataaggaatggatttgagagagattacaaaggattagcaatgtattgaatgtggatagaggagtcaaaagtgggaaaaagttagggtcattaactggaaaggaaatcaatagcaggagttcatttggttattgttttatgtttgttttttgttacttttttttttaatttttgtgtgtatgtgaggttggtgggggcaagtgggacagggaagactgattatatggtatatatctattacatgttgaaattttaacagtattatagttggagattgtttctgctctaagtattaaactactaaaaagtgaaatgacttaacatgagagccagttctatagcccagggtagtttaggtgcctaccttgccactaaaccacactactcagctgaaaatcaccttcttgttgtggctttgagcatttcactccactttggtccttctaaatttcatgggttagtgctttgcttattttgaatttcacttcacctgttataattactagatttgtcatatttgtcttccagttgatgtagaacattctcatgttcgatttctgggaaacctggtattgaacctgtgggattgtggtgggtaagtaccatctgcttacttgtttgtgaagccgatgtcagtaatcgtggcatctagtatatcagcatggcgaatacacctagagtaactatcatttgtaatagattggatagaattactttaaaattgacacttgagtcaataaacatctctgacttttatggaattgtgaaaatgccctctgtatgtgacatgtttaaatagcgctaatccaagctccatctaggtatctgtagtttgggatagattatcccctttcgtggaggaataaattaggtttctgtctcaggcagcctgacaccagtgctgagctcttagctgtcacaccatactactttgttcttagttataatacgtcaataattttctccaggcagtctcaatactgtagatcagacactgagcacacattctctagctaagttacctactttttggaagagtaggagttagctcttcctcttatgagcaaaatattcaccacatattccatcacaaatgtacacacactgtggatgtatgctggctatggtgcatctctgtgctgaaggaacagtgtgcactgcacagtggataggagcataggttttggagtcagattggggtttgtacctcagctctgttagctgtgttatcttgggtaaatcatttaaactctctgagccacagtttcttcatctgtacagtagtgaaggcaatggtaccagctcatagggttgttttgatgattaagtaagataatttatacaaagttgcatagcagagtgcctcacaaaatacatagatattgttagctcagtgtatctcgctcttagcatagagccagccatagagtgggtgctcagtgaatatttgttgaaagaataatgcaatagctaaatactctttaagaaaatgactccattcctgctagcagatggatcacttaacatcctagcacatatctccatacaaatccttcctcattatcattggttctaattttctaatctgtgttaagacattagtcccaagtcccttgcttttaggcactaagatgtgatgatcttcatttttagagataaggcaactgaggtccagggagattatcattctgctgagttcacacagctaattaatagcaaagtgcaggactagaacctaggttcctgatttttttctcctactaccggatgctactgttttctgctggccaagtggtaattgagaacttcctggaaagcagcacttagcctaacgagcaaagagcaacattctgttaaaaagttaccattggagtcattttaatgtagtttagaatatttgactattgagttattcattcagcaaattttcattgagtacttaacactccattagaagctgggaaacaatgaaggatagtaacagacatggaacttgctgtctagggaagtgaatggtgttaatgaaaaactcacaaacaagtgtaataacttgtggtaaatgttagaagtaagaggaatgtattgatataagagcctatgcttagtggattgacctgtcaggaggccatgggtagtttctgtgaggaaatatggattgaactgaaatctaaagagacaagcaggagttaactagatgaggaggtggggggtagcatctgagacagagtgaacagcatgtgtaaaggccacatagtggataaaccatgtgccacttgaggaattgagaaaaagtcagtgtgtttagaacataaggagaggggcagagaaatggatctggtacaggagaatcaatgagaccgggtaagaaacagaaaaggggctgcaccaaatgattgacacgctctgcaaacttcttttgttggctcaagttgtggctcaagaggtgagaaggtaaggccagacttatttgttatgatttgccctttaaattgaagccttaagattatctttcacattgatcaagccaacaaaaataggctataagtaggagtgattgaattgaggatttgcttactatatatatattttttctatcaggcaagacaccttcatggaaaattatttcactagccaacgggacaacatcttccgaaatgtggaggttctgatttatgtctttgatgtggagagccgcgaactggaaaaggacatgcactattaccaatcatgcctggaggccattctgcagaattctccagatgccaaaatattttgcttggtacacaaaatggatctggtacaggaggatcaacgggacctggtaagaaacagaagaagtgctgcaccaaatgctcgacatgctttgcaaacttattttgtagaggtataggtaaatttgtaccattttttcaggaataaaaagtcagcagaagttttgaaagtaaagttttgtcatttactttaactaaacactcttttaaacacattttcaataagggaaagatttattagtaaataattttcagaattaggcaaggattctgtccaagtgatctcactaagcagcatttatttatttttaaaatatatttgctgccccagttttattgtccttcaaagcagggagatagtgtcaaggttaagacccactaggagtgagatgaagagaggttgctgctttcattagattgacttaggaaactggtatgcaccagttcaagtgctaaccacagtgtgttaggcactatgccaggtccctcataatttcactgatttactagatttctcttttctgacatgggagttagtacacacaaatttaaaccagagaaggcaca

SEQ ID NO: 137520 - DNA, 1951 bp, Homo sapiens
ttggttaccattttcctaggtagaggtcattctaatgggttccacctggcttttccaccacaacagcctgcactccacaggtcaagagaccaatgagggattctgccagttgttgagcatgtctgtttcaattttgtactctggaacagggaaaataacccacaagaaggttgcaaggacccactgggcctacatgagacagacctgagctaaaactccattgattacttaacctttataaggccctactttgactggtggaccacagttacattttaggtctcactggaattagggtcatttcagagctaatgctcagtagtagattatttccttttctgtaacgcacagtcaccctgctaaaaggccacataggtccatttggaggaggctgggaggaagattaacagtataaatacttggcagtgtccttcctcaaggggacccaggctccccttcattcaaggggtctggttttgtaaactggtacaagtctgggtattgattgagaagccgtgagtctccaatttaataattcaaattaaattttttatcacttgacctagaattcttccacatatacagatcaagtaaaaaattagtagacttcccatccatttcacttctaggaacatcatgataactagccaacaccataggtctctacgagtcagactattctgattaatgctttgactctgcttcagttatggtactatgaccaccttgtctttggtgattaagtgcccccacttggttcctgccattctaggatccaactactcccgtcgcatttaggtttcccaattcagtggcagcagttcccactgaaagttctagcctacagagaagaatgatcacataattgaggaaagaagctggggctgcccttacaaatttatttttcatagtcatgatgaaagaaaggtgtgtcttctggaacctcgcaggtttggtgagtaggccttaaatgaatctgttaatacttgaacattacaatgtccctaaagcctctttttctatggatctcttcttctagagtataccaaggcagttctggcatttcaacttcatgtcgtttaggccaccttttggtccatgtttcatccaaccatccaaacaaactgttaaaagctctttcttaccccatgggctgcaacattaagtgtggaacctctgcttaatgagctcctatcggtaaatttagcctgatccaactttatattttttccactattatcctatacctttaatatctattcccatacatatttccttggtttttgtctgtaaattggagaaattatgtagttctttggagtatagcataattcctcatgggtcatacttcacacgtcacctttaggagtctgctgagacttgaactagttataggtgtagaagcaaagaggggtagtgggagtgaatcaggagtgtcttgcatggcagatacctcagaggagaccattgcagttttctcaggccaaatagagttaatatcagatatggatggagtggctgcttctactggcaaagaagactgagaatttaaggtttcaattttgccagcttcatcaggatcttcccaaataacctccattccaaattttagaatcctacttcttcttggccaatgccctcactttattagcagatgccctgtgaggttgtgaattcagttcgcattgtaattcatccacttaaaggatgagattctgaatttggtttcatcagtctcagctctgcagctatagggggtaagagttttttttcagggcagtcatagaaactttgtggtcgtttataaagtatttatactgataattcagatctctgagctcatcctttctctactttgttcagcacaattaggatcagccagccaatctcatatttgttattttgacaaaaatgttcgaaattatgtatgtggtcacgtggtaccttgcct

SEQ ID NO: 137521 - DNA, 1318 bp, Homo sapiens
gttaattttgtggttcgggtcagaaagcaatctggaggcaaaattcttttttcttggggaaatgacaggctttttctcttaaggccttctactgattagatgaggcccacccacattatacagaataatactcagagtctactgtttcaaatgttaatcttaactaaaaaaatgcctttgcaacaacatacagattggtgtttaaccaaatgtctgggtatcatggcctagctaacttgacacataaaattaaccataacagtgtgtatgtacatatttaacaacaatccactgactcctgggaaaatatctgtgtatatatatttatatagatatttttccatatctatatatgtgtctgagaaagatatatacaagggttaaaatattttcatttatatattcttggtatgtgtataactatcttaaaatgacccagatttggtgctttggagtgtttgatgtattttattaagactcctctgtatgataagctttatttataaacatagtgctcgtagtgagtattcagcataagcaggataggcctgaagaattctaactattgtgcttttagacctgaccagaaacagtttctgccatcctagtttgtgaaatagacatacttaaaattcctcttagaaaggaacaaaagctcctggttaaaatatgataaaataactacatcttagcttgaaagatgggaactattatatgctgatcagtatgttgggctttttaatttagatttttaaagagcgagaagaagatttgaggcgtttgtctcgcccattggaatgttcttgtttccgaacatctatctgggatgaaaccctctataaggtgtgtatgtctccctgagttccctcattttaagagcatgaaaaaaaacctagaaggatattaacaaacctaaaagattttaaactatttcatagccatctagatttgttgtactaaaaagaaaaataatctgcaacaaattgtttgaagaatatcaaacttaacattaagagacttgggttttgatcttatattgggttgacatagctaccaagtcacactgaattagccagtttggtcatgattaatttgatactggtctttgtaatagcagaggtttcacttactggccatcatccattttgacctgttgtggtctcaatgctgattggagttgtatctagtattcaggtacttctacatgatataagctagtctgcctaagtttggatggcaataaaatgaaaatatttagggaagagattggagaaggagtcttagaatcagacatgttatgcctagcatatggtataat

SEQ ID NO: 137522 - DNA, 1581 bp, Homo sapiens
tgagatacctgtctaggaaatactgttctagattaatatgggccgaatttctctcaaagccttattcccatagaacaggtaaccgtgaataaggatggacatgacgcactgataagaaccaactgcggtgtgaaggatggcaatacataacacgaccaaagacaattggctaatcacaacactgctgtgagtgacaatgtctctgctgtggttagctttggtgccttctccaaggtaaattcagcagtgacattaacaccgacctgggaacttggaacctgaaccctcatgcctaagtaataaaactaattggaacagagacatggcacttctgtctcttacatcaatgttgcatagagctaacttaaatttttatattaagttttattcaacaagcactctttacatacctgcttgatgctgttggatacacaaatgactaagaccaggttcctgccctcttgtaggggagagaagaacaaagtacaccttaccagacaaattggagtgagagtgaaggaagtattataatgaaaatacaaataaaagagcctacaagaatagagggagagtgtggttaatttcaactgcttacattagtcatactcctggatgaagtcagttttaggcaaaaacacagtagaccattttgaattcaattggatcaataatttatatggataacaacaaacctttgggaatgataatgccactagtttctcttttaatggtatattattctattgaggggaggggccatttgtctatgtggctctgctactttcataaaattgattcttaggtatatgttaaatatagcataattaggttctgatctttagagaaatctacactgttggacttaaatatttgtgactagattaggagctttttaacaaagtagatcatatttttcaacttttttcctaaggcaacatgatggcattaaatatttgtttgctttcaattatcaatggaaagaagtttctccagcattttacaaaagtgtttgaacttaaaaaaaattcaactcaagggtaaaaatcagatgctagcttcattttctcatttcatttgtgttatatcatatttaatgtcagtatttgtttgggactggattatcatcatattttgctgtccacatattatagtgtacttactaatttcaaaggtctgggactgactagctgttaataatagtacactgtgtttctgttctgttaggcttggtccagcatagtttatcagctgattcccaatgttcagcagctggaaatgaacctaaggaattttgctgaaattatcgaagctgatgaagtacttctttttgagagagctacttttctggtaagaactttctgctttgcagatgtacttcacactgtacgttctttgttttcagcaacagagaacagcatgtcactactttcaggaagaacctttttccctcttgtcaactttagcatgtacagacttatttataaaatagtattgtcagcaagtgacctgaaagaagccctttggtgtgtagctctttggaagttagtgaaacttagatttttccaggtatgtattattaga

SEQ ID NO: 137523 - DNA, 1100 bp, Homo sapiens
gggtttatgctgttagctccaaaccaaaagattttggaaatttattttggaaattttgtgtttagaatatgaataaatctgcttattcagaaaaattaaaccttgataacttgggacctcctattcctgtatgttctctgacatacattgagggatttggctctcttttgtttatttgttttactagtcagacattcctttggctgcccatacttaattctgttgggtgtttccgcccccgccctcagcttctgcagctactctgatcaacatccgcaatgccaggaaacactttgaaaagctggaaagagtggatggaccaaagcagtgtcttctcatgcgctaaacattgatgaatattgtttcacacaaaaattaaaagtttcctaattaatgttgtattcatatatgtaggctctgaaatgttgtgatgcttattgcttctgtatttcttctctactccctagtcttaatgtttaaccttgaatgctattaacttaaatagccattgaggagttagaagatgaattgttcatgaagtcggtgttacataaaagtaggtgatatgtaagttttctgataacaaggttctaatagtgtttaaatgtactggtaacctggttccaatagttgtgtttgcccaagcctttctcggcatcatcttgtattccttatcagatagtaagtaacctgtaagtttggagtattactgttttctcagcatgcattaaaaatattccttaacttcaattgtaaataaacttttggtgttagggatttcagtgtctatttttcttttccttgtttcttcaactttgtcctaagaaagagtaaaggaatttcacagttatcctaggtgaaggggaccttctggttgggaaggcacaaaataaaattggatgggaagaatgtagccagattatggccttaaagcgaggcagaagaattcagatataagacatctaaatgcgataggatataggaaagcattgtgggcctttgagcaagggaattatgtgaaagcaattttgaaagaaagttaagttagaccatatgtactgactgatagcagctggggaaactctggtagtaatccatgc

SEQ ID NO: 137524 - DNA, 1073 bp, Homo sapiens
ggtttttgtgttctgtcagatagtcagcttcaaaaaattatgtccaaaatcagaacaaaaaatgacacatggaagttgtcgaggcagggccctaggaatgcataaacatttgactgtgtgaggattggagggttactaaaagcaaggattatatggtttactcatggataacctcagcaaagtgactagaaaaactggaggcactttcgaagtacaggcggaaggcagagaatggactgagtacctgttagaaacagctgttgcaatggacagcagtcaggaaagggctggggccaggaaatgtgttgtgatagactgactctttatgtcttttggagtagatcatggcttactcttttttaaaaaaaagcaccaggatctctctatgttaacattactttgcatttcaaggcttccaactgatcttacagataagtagtcacctgttctgatctgggccttcttttggttctgtgctatccctttgggtttgctcagacagagggaggtgcttatggtcccagctcttggagattgtgcagtcctggacattctgaccaagtgctttgtgctttgtgaacccagaaaatctgagacaggtgtcaattaatttagaaagtttattttgccaaggttgaggatgcacccatgacacagcctcaggtagtcctgaggcatgtgcccaaggtggttgggacacagcttggttttctacattttagagagacatgagacattaatcaatatatgtaagaagtacattaatttggtctggaaaggcgggacatcttgaagcaacggtagaaagactggaagctgggagggtgcttccagatcacaggtgagacacaaatggttgcattcttttgagtttctgattagcctttccaaagaaggcaatcagatatgcatctatctcagtgagcagaggagtgactttggatagaatgggaggcaggtttgccctaagcagtttccagcttgaattttccttagtgatttggggggtgcaagatatatatcctttcacagcttccactgaagattgtcctttaagtcctttcagcatgaat

SEQ ID NO: 137525 - DNA, 1019 bp, Homo sapiens
gaaatagcctctttcaaggaaaacctttcagggtggagcagagtggggttggtaagaaggggaggggaagggaggtggtgctttagagcctaggggagctaccacgggcgggacaggcgcgctcagttcgatggctgtgtggttggatccttgatttctcctccaggtattagagcctcgacttcctccctcctggcattctttctttttatcaccctgcagcaaccctatcaggttgcctgaagcctctagctgtgagctaggagggctccatcttgcctggcttcttaaagggacagtgcactatttaactggaaattcaattatgagaagggtggcagtacctctatgttggaaggaatttgtgtggcgaggacagctttttcttactcagaccagcttccatacttggttctaatatccgtgtggttcttaggaggtgcaccgtgggcaatgttgccaagttacacattagttaactgcagccagttgactgctgttttagctcaaagggaaaatttccatttcctgaaaggcgccatggcagtgcaggtatcttgaacaaattcattctacaaattttattgaatgccaggtgcattgcctgtggctgatcacactgctgggaggtttgtgtaaaatgtcaaggccatgcagagtgttgtcaatgactccctttttaactgattagtagccttcccaggatatggagacaaatgttgaatttgattccaacatttaccaaacatttcttacatgaatggctcaatggttcacttttattgtcttctgttcagtaccaggtgtccatatgctcaaagccaagtgactgggaattccagctagaagaaataggaactcaaatcaaaatggcatgcagagaggaaagagcaggaaacttcagtaggaaagctaatgccactttggcgttatccatgtccagtaagggagattgttttgggaaagagggcttcaccatctcccttccactgttaaagaagagctggtgtggcagaaac

SEQ ID NO: 137526 - DNA, 1077 bp, Homo sapiens
tatttagtaattcaacttctcactatctttccttgaatggaaataagattagagagataacaggagccccagaaagtaagtagataaaggaagttgtttctacctctgggttcccatagcactagactcagcagtctaaggatatcttaatcatgattgtccccagtgcctagaacatagaaggaacccagtgaatacttgttgagggaataagtcaatcaatgagtttggggaaattatctacctatcttgagactttctggcagattatacatcatttttcatgttcctggtcaactatatgtagatcatgcatataggtacccagacagagatatacatgctcattcagaaattgccatccaatcctgatacatgcaaactcataaagatatatctccacacaaatgaatacttggcatatttgttttctgatgctgtaaaatgtaccacaaaatgggtgccttaaaacagcagaaatttattctctcacagttcttgaggctagaaatctgaaataaaaaataaaagtattggcaaggccatgctccatcgaaaacctctagaaagaatccttcctggtctctttcagcttctggtaagtccagatattccttggcttgtggcagtataactctaatttctgtctctctcttcacatggctatgtctgtgtgtatatgagcgtgtccgtgtgtgtgtgtgtgtgtgtgtcttcacttgtcactttcctcttctttataaggacaccagtcataatgaattagggccaccttaatgatttcatcttgattacatttgcaaagactttattttcaaataatgtcacattcacaagtactgatggctaggacttcaacatatcattttaaaggtcacattaccacccaaaatggtcttcctttggccctccaaaatttatgcccttcccatgggcaaaacacattcactctatcacaacatctccaaaagttctaacccattccggcatcaattctaagtcttaaaaatctcacctaaatttaatcaactcaaagagtcccaaaactcatcttctacttcatctgcgtaaggaagg

SEQ ID NO: 137527 - DNA, 1021 bp, Homo sapiens
aatcatttagcctcaatataatgctggcacaacgctagcttctacacagaagtattgtgaggtaaatataaggtaatgtatgtgaagtatataatatagtgcctggcacagagtgagtattcagcacatttgttgagtagatcaatcaaaattgagattcccaatgctgaagccctagaagctgtcatagtagtttgcattaatttgttttccttccattttaattgtgattttaaatgtaataactcctggtgatagacatagtaattcttagttaactagactgtaagattgataagaatctgccattcatttcctataccaaatgaaaacttactggaaacaataacaattcacatttattagacaatataatcatgcactcttagaagtacttcacgttaaataagccatgaatctccactgtaacattataagaactattattatccccatcttatagatgggaaactaaggcataaagcagttatttaacttatccaaggtcaaacaactactgtggttcctgagtctacattttaactactatagtcaaagaggaggagtgacctgcctagtgccacacaatatgttaatattagactaggattcaaattagatttttctattccttctgctgcacatagagacatttggattgtcaaatccattttactatgttactacatttaccttataagtttattttttatagtttttatacaaatatattttaagtgaaataccatgtggatatgttataaagtaaactttttataataaagccacatttttatatgtccagtagttcactggagaggttagtggtggattgagggaggtgctatatatctatatttaacatttgattttaaaataagagaggttgtttctattatagaaaatactacagaggctggtctagaaatctgtttcctgctcccaaccttggtcaaagtctaacctgaagggaatagtagcaggatctatatgtttttatttgttattaatttttccctgt

SEQ ID NO: 137528 - DNA, 1012 bp, Homo sapiens
atgataagcttgattaataaaaacagaatagagaattgaccacaatcaagtattgatgtgtcgtggcatctgaccagtcagataaaagttaggtggaaggcacaacaaagtttttagttattatatcccttattctagaattctacatacaccaaatatgaaaggagttctaaaacagcattttgaacataatggaaatcagcatgtattcagctggagtgctatttaggacagcacttttatttagagaagataagagctctggggaaaaaaaaggaaagattgtgaagggcaatataaggcatgctaaagattttggtgtttagaaacatcctgctacagcagcgtggagcatgcttagaaaagaggagaaactagcagcagaaatactgtctagaggcttttgtgataagtccatgtgaaacagtgggccttaaagtaaggtagtagacattgggctgtagagaagcaggtagattctaaagttataaatgacatgatatggtatcaccaatatttggctattgattggttgtgggagaagaggaagtaaaggtgattcacaggattctgatttgggcaatggagtgaagaatggtgccaaggtaccaaaggaagaacaagttttagtctgtggatgcagtatcagactgaagatattttgttccagagtgtctatgttgaggtgcttccggaacatttagatagacggcctattgtaaatacatatatgcaatatatatggtgagagtagacttaattttgggaataaacaagtcaaaaccatttttaaacactcttactgtattccagaaataaaaggcttgctctacctctccacttttacctataagtatagctgtgctcctgccctactgaactaatcaccattccaataacacagaacacagcatgctcttcacatcacaatacctttgtacatattgttccctttgcctcaaatgcttcctttctctcctcttcagtcagaatatgtatgtttacattctga

SEQ ID NO: 137529 - DNA, 1029 bp, Homo sapiens
aatatcatttagcaagtacttaccttgtgtcaagcaagtttgtaagaactttatatggaatatctcattgaatattcatgacaactctataaagtaaatactgttattaccacttttttcagatgagaaacctgatacacagagcaagtaagtaccatacctaaggtcacagagctaataaagagaagagttaggcttcaagcatctatcttttctgttccatgtgaaagctattccattactgaattctcccactaaagttaccaggttcactttgttaaatatgaattcatctaactgatggtcagcttttgtatagaacagcatttcttccctgatttgactttttattctgtgctttcttagctctttgccttggggcccagactgcttctgctctaaaattaaagttgttactacatggcgtgaaactgctttggcagtctgaggtccagcatctggccaaagagatcctggctgcaagcctgaatgctcatatggagctgtacctggcaggaacaggtgtgatgaggaggatccagcccgggattctgagagaaaggctggatctgttgcaatatagtatttatgagagagaaggtagcctgatgggatccaatgagaagaattgatgaaagagctagtgaaaaataactaccctcatctccattcagttgagagctaattctgaagtcttttcaccctggtggccttttctgccagaaatcagtgttatagccagaggcccagaatttgcaagttcctgaaaagggcctggaaagctggaggaggaatggtcatgagagaagatgggcatcagctggatgtgggattttttcccccagctttattgaggtatacttcagaaataaaatattgtctatatcatggtatacagtatgatgttctgatatatatatatatatatatatatatatatatagtgaaatgattcccacaatcaagataattaacatatctatcaccttacagttaccgtattttctttttttgtgtgtagtgagaaca

SEQ ID NO: 137530 - DNA, 1042 bp, Homo sapiens
ttgttatttttttgtctttttttttctttttgtggagaatggggtctcactatattgtccaggcaggtcttgaactcctgggctcaagctatcctcctgcctctgcctccctaagtgctgggattacaggagtaagccatggcgtctggcttagtttttatcttgagggcaatgagacacctttgagaaatttctgattttggaatggtaaattttagctgcagtgcatgagggcagaaacggttagggagaccaattaggaggtcatttagatagtgcaggtaagaaatgttatggtgggtcttgttactagtattacatacttgtgctccttgagtattctttcctgaagctgatatgacctaggtaaatgaacagtatgataagatgttgctttaaaaacagttcatcttgttttatctaattatatcaaaactacaaatttgtcatagaaaatttgaaaaacaaagaagtataataaaggaaataaaaaccaccataatccttcagctacctacaactacagtactatgtccaacttgatttttttattataaaagcaatacatgatctttatagaaaaatttttaagtaagataaaattttcttataatcctactagctatcctttgttttaatgctaaactgtgtttgtttctgtggcaaagttgaatggcatgtgtgtcggtctaataaaatgtaaatgatagtgtaactatactatgtcctgtttttacacttaatattattatacaaatattttctgtagtgattgagaattcttgaaaaacttaaattttaatggctatataatgtctatctcttactctgttcctgctcttataacaaaataccccagacctggtaatttatacataaaataaatttatttaccacagttctggagattggaaggtccaaaatcaatgtgccagcagatttggtgtctggtgagggctcactgcttccaagatggtgccttgttgctgcatcctccagaggggatgaacactgcctcctcacatgtaggaagggacagatg

SEQ ID NO: 137531 - DNA, 1073 bp, Homo sapiens
cctttttaaggaactccaccctaggtggagtcctcacgatagtcacacctctcctttgggcctagcagggccagagaaagacggaatcactctacccactcaggttgcccagagagcactttaggttctgactcgcgtggggcgcgaggtaccccgtggggcagctaggtgcctccaagaaaccccgccccagaggacccgcacgagttgctgccatttttcgctgaagcccctgccctggggctggtgttcttctctatgattctaccaatcgtcggcatttttttcctcccttctttctttttaggaaggcgctggggtgtgcggcggcaacggcggcggtgaagggatcctcttgtggtatctcctcgtgggttcctgtcttgaaggatttcttctccgcctcaactttatgttcaagtagcgctttgggggttgggttggttttcatagcccccacccccggccctctccttttaaagggtgtgtggagttcagaggatgggtggagagcgggcttggccggaactgaattggtagaggtaaaaggggaacggaggaccttaagctctggccacttcggcccagcgaacccactttatttttgtccaaggaaaagctgcaggggggaggattctttttaggaagtctactctgccggcccctgatttttgggttggatgcttgagagctttgtttcccttgttccgagagtggcccagctgggtctgaatcgactccctcccctttcgaccccctcctcattttccagcccggagaaataggggagtgggggcccaagaacgagaagacgagaacgcgtcgccctgcgctatgtcagaatggggcgggtgtgaggggaacagctctcttgcgatcagctcaggagtatgagcctcccggaggacggcatgagttctggacacttcaggagtcctcagctagtgacatggtcggtaagtgactctgggactaatacccacccactcccacctctttcgtctagattctatccccctcccagtccccctgctccccccacacaccccacttggggtttcagcagtgggggc

SEQ ID NO: 137532 - DNA, 1007 bp, Homo sapiens
gcacactggccatgtctcaggtgacaaggaccaggagtttgtgttctataactacgcaatgctggcatcattctagtgtggagaagcctcctggtttgattcattataggatttgtttatttcaaaagttaggactagtgggtgggtgtgtagctcagggcacacatgctgctctcccttctctaaatttctgtatcaacataccatgcagtgaaagagcatttggttgtcacctgccctttatttttcgtttctgattacttcctacaagtgggatgtcttggtcaaaatgtatgagcagtgttagggttaaattttatcatacatgtctctcctttaccctaatttaatattgttaatatttggcacatattttcacacagcctaattctctctctctctctccccccattttattactattgtaagttgcatcaagaaactttacccctaaattattctgcatgcatcacctacaaataatgacattgtcctacataactacatcagcactgtcacgcccaagaaaatgaacaatatttccatgatactatctaactggctcatacctttcttttttttcctctctttttttaaagctgggctgctttctcagggttcatacatttctgtgccacttttccccacactgttttttctacatggattgtgcctcagtgagctagtatagctcaccaaactctttacttttcttagggttcaaattccaattctacctcttccatgaaacatacatagaaaaccccaactgtctcgaatctctagtgaaatcatgctcctggaacactaaattatctgtattagtcactaatgtggtacctgttctctattgtcaactgctttatgtaaatatctcttgtctccccagtaatattttttgtctcccaaacttcaattatttacttaccactttcacgatttttgccacatccttgccatcaatattatttacatactttaaaattatttaaataaataaataaata

SEQ ID NO: 137533 - DNA, 1050 bp, Homo sapiens
aatttttcttttgaaaaatcttcaaatttcccataaagtgtagttatgtactgtttctctctgtaagtttaaaacagctttgtctttcaatattgaaactaattggaagtagttggcttgtgtttagcaacaactgttgtatgaaaaacaaatttctttaagcaggaaaatgaaacttattgaagtgaaatgctcacactgtttgggaacacaaccactgaaggaaacactaccacctcccatgctttctctgagcacctactgagggacctgtacctactgagcagaatggcctagttgacagaattgtttttactattccaattatttctttttggggggacctagcattaaattcacgtaaattaaaagccgatatgatgtggcaccaatgaatgtaaattcatttttttagccttcactttaaagtcactgtttggctttatctctatttctttgatcagaccagcagcaatggcccaaatgcagggagaagagtcgcttgacttgaagagaagacggattcaccaatgtgactttgcaggatgcagcaaagtgtacaccaaaagctctcacctgaaagctcaccgcagaatccatacaggtctgcccactcccatctcacccccaacacacacacacacacacacacacacacacacacgagagagagagagagagaggggcagagagagagagagagaggggcagagagagagagagaaaatttctgagagacagagaatgaagtcctgaaacaaagactgatgcatttatactcatgggcacaggctccattcatggtttttatccctatttcttgtccctactctaaggcagattttataaaactggcctaggaaaacactaaactaaatctggtgtcttaatagtcatcattcccagtgagccctgtgggtctttctaattgcggagtcaacacttaagcaaagattaaggcattactcccttccttactaccagggtctcacaagttttactaagcatggaaaagcacaagaacaatttaaactatgtgaaattaaagca

SEQ ID NO: 137534 - DNA, 5610 bp, Homo sapiens
tcaacctccacatgggttgaattccagtgtggcacccatggctgccttcccatccccccctgctctgaaataggacatttttcctacagtaacaaaacaggaatcaaactcaaggctgtgaacaaacatacgctgctttattctttccaatttttctcttgttttctagaactcttatccatatgtttttaaaataagtacctaaaagtggtttgatagtgtcctaaacgacttttttaacttcctaaatggaaagagcataacaatgtagttgattggtaagatttacagggatttggtttctgagtttgaggcacattcccagtgaataagctgagtcccataccacactcaaaaggttttaataaatctaatcctatttcttcttaaagtttggttttcagacagtgctggtgcttctgcttcttaagttcatcaagggaatgaggagttcttgtccttctcctcctcttttttttcttttccactttctccttcaggattaaagattttgctgcacaattgttatttgttaggttaaatttggacaaatattcaaagcacacatagacatataagtaaggagaaaaatgttccaggagagtaggttgggcagtgacaggaacaaacagacctaggatgatcctgagaacaaatagaggggttcctttacttgtataggatatcaaaagtgctgttaatcacaaacctcattcaaatggcaggctgtcgagacagtgtcttgaggggctggctgtactgtttattttttcgtttacacaaagaagcaattgagtatattgcatgatgagaaatcacacactagggtcatgttatacagaagtaaggggttggaaaaatggaatgttgttcactccatggaattattggcattcattcctgtgtttcaaatgaaacatagatgcttttcatgaaaactgacctacaaaaagcaatttgatgttctgcaactgctatgaaaacctaagccatttattttagctgatagcagattgcataatatactcatttagctgcccaatcagattgttttataatattacctggggtacaaaatcctctgttcctggccctggaccacagatctacctccacatggcatatttcctttctggggtcaggggtaggggagggggctttgcatcacttgaatttagactcagcctctctttaaaagattgtctttatattgaacacctttttcttttcaaccctgcttgaatactttaggttactatttcctgaggctgtccattctcactatattgtagaattctagcaccaagaagggatcccgttaaccatctagtcctatccatccctcatattttacagatgagacaaatacgggtcagatttttttctccagatgtttctttgagcccttatacacctgcacgcttattctcctggggatcacataattttatttatttattttttgagagacggtttcactccatcacccaggctggagtgcagtggcgtaatcttggctcactgcaacctccgcctcctgggttcaagtgattctcctgcctcagcctcccaaatagcttggattacaggtgcgtgccaccacacctagctaagttttgtattattagtagagatggggtttcgccatgttggccaggctggtctcaaactcctgacctcaagtgatccccccacctcggcctcccaaagtgctgggatcacaggtgtgagtcaccacacctggccaggatcacattattaaaccaaattaaagtttatgtgattggttgcaatatttgtctaattttatatgttttcttcaggaaaactttagaactcaaaaatcatttacagctgattaaatagcaagtaaaatgtacttgtggtcattgccgtataacattaggcacacgcttctaacacttctataatatctagattttatttacctcattttaacttgcaatgtctgtctatctcatgaactctccataaatccaagaactgcctgtagttttcaaaatgacatgtgggtttttactgttatcattgttatttcgatagggctttttcctgattttgggtatacaagttccaaacttgcataataattgctaacgcactaggcgatatctagggccagtctgttaaaggggacctctaatgtagctataagacaggttggtaaagatgaactaacataagtttaagctaataattcagtagttgatgcagtatttcacagtagagcccgagcttactcatttttttcaaaatttggatcctgatactcctttttcagagttcagaactgaactgctcccctaagacctcagaatcttttgcattgagacatatgatctatttataaataaaggttatcaaatatcttgttgaactaattaggttgatcaaattaggatcccaaatattggggtccctgacatctgagcctttatctaaaaatgtttctgtaacataatgacagcctttatgtttgttaattgcctatagtaaagaagcaattttaagcctattctcatttccctctcccctacaaaaaatgataaaagctttccaattacttacatatgctctaacaagtgtctcaggattcattaacagaattttatagagtacagtaattcaaatatagcacagtacagagtttaccaaaaacacataaaactttgctagatagacagtgaggtggaaaggaactaaaatgtatctctcttgaatagcatttggggttcaattgaatttgttgtgtttacaacagcaaagcaccgttagcctggacagttgcttatggcatcgatagggttggataatattctgggatttgttgcagcagaattcctctatctgatgatcagcagttgaacataaacttcataattatagtaaaatttaggaaaaactatgagtgtgaagagtatgaactgattgggtagattaggcagagtgcattatgggcaagacaaaggttttcgatattaacttcttttaaaataaactttttattttcaaacagtttcagttttacagaaaaaatgtgaagctagtacagagaggtctcatttaccccacacccagtttctcctgttattagcatctcacattaatatgtggtatatttgttacaattaataaaacacattgatatgttaatattattaactgaagtccatactttattcaggtttctttagtttttacctaagatcctttttaaagaattgtttcggccaggcactgtggctcacacctgtaatcccagcactttgggaggccaagacgggcggatcacgaagtcaggagttcgagaccaacctggacaacatggtgaaaccacgtctctattaaaaatacaaaaaattagccaggcgtagtggtgggtgcctgtaatcccagcaatacttgagaggctgaggcaagagaattgcttgaacctgggaggcggaggttgcagtgagctgagatcatgccacttcactccagcctgggtgacagagcgacacacttgatctcaaaaaaaaaaaaattgtttcagcatcttgttcaggattccacattacatctaatagtcatatctccttaggatccttttgattgtgacagtttctcagactttccttgttttcagtgaccttgacacttttgagagagattttcctcaactgggatttgtcagttgtctttctcatgattagactgaggttatgagtttttgaaagtaggaccacggagaagaagtgccattttcatcacatcatacaggcatactttggagacaatgcagatttggttccagatcactgcaatgaagcaaatattacaataaagcaagtcacacaaattttttggtttcccagtgcatataaaattttatgtttacactatcctgtagtctggtaaatgtgcaatagcattatgtctaaaaaacaatgtacataccttattttaaaatactttattgctaacatgttactggcacaaacacgaagtgagcacatgctgttggaaaaatggtgccaatagacttgttggtcacagggttgccacaaacttttaatttgtaaaaaatgcaatatcagcaaagtgcaataaagtgaagcacaataaaacgaggtatgcctgtatttacatgactcatcactgttgtttaaccttgatcacctggctgaaatagttgttgtcaggtttctcccctgtactctttttttcctcccctccatactgtactctctgaaaggaaatcactatgtgcagcccatgcttctggagtggtaagttatatgccacacccttcagagcatgtatcttacataaattatttggaattattctctaagggagattgtctcttctcccccatttatttatttatacaatactttatttatatcagcatggactcatgggtatttattttatacttcgagttataatctaatactactactttattttattgctcgaattgttccagctttggccattgggagctcttttgggtgattctcaagttcttttgacacacccccatcatttttttttagcacgtccttactttctgccactgcaagatcttccaggctcatcttgtatattttgtggcctactcctataatcagccatttcttcaagaagtcctggtttcttttactggaaaattgtattagaaaccaatatctgggcattaggtatgttcattgttactgggctattgttgcttctagggtgtctcagctaacagcaaggaaacatatgtgtgtatactatcctatgtatatgcacattctataaatatttctatatgtaatcacccagatttttatttagctaaacatgagttcatattgatgttttcaactctaacctgttaccacgtgaatcattctagcttcttcctgttagttacatgaagcctcccacactaatactgagaaacctggctctcaacctctgtcatctatttacttaatttttcaaattcagtgtgcacatatagcagtatctgaattgttaacctgtatacccatgggaaacaactttatcaactacagcacagtgtgtatgtacataaaaatagtaatatttttagaactccaacagctctttgaaacaaagtggtctgcaaaattctggaattagggatttctgtgatctgagttccaagattctggggtctatcctgcccccaaaaagttttctcatgaaccaaaccatcaagaatgtacctaaccttaaataagccaagggaacttactgatgctccacagtttgctaattcttgtatgaggtactgtagagggatggatacagaaggaactgggtgggccaaatttaaataaacacatagcactatcttttctcactgttaaatatggctctctgacaacagtgatgctaccctgagttacctctcttctgtattttcccagatctcacttggttgaccttaggcaagtcatatcacctctctgtgcctcaattaatccatttgcaaaatggggatctcaatatctacctcacaggaatgttgtgaggcttctcataaattgattttggcaaaaatgaaagatctttaagtgaacaaccaag

SEQ ID NO: 137535 - DNA, 1294 bp, Homo sapiens
ccctctctgcctcgcctgctctgtactgttctgttctcttctctctctccctttgtttctctctctcccttttttcttttcagtgcagaagtttttaattttgaccgagccaaatctatcaatctaggcctggcgccgcgtcagcagagggggcggggaggcgagcgcggaactgggggaggggaaggggcggggatcagcaggcggagcggctgccagagttgctgggagtgcgcgcggtcggatcacaaggcggcggcggaggaggcccagagaccggagcgcggagacctcagccagcggcctacgcccaggcctttctccaccggaggaccagggaaccgcagtcttcatcacagaggtaccgtgctccgcgctccccgcctgacccggcccagcccgctgcggcggtgcctccttccttcctccttccctcgcgctctctctttcgcccgcccgcgccttccctgcccgcctgcgtcaccgcggccgccatggctgagaatggcgagagcagcggccccccgcgcccctcccgcggccctgctgcggcccaaggctcggctgctgccccggctgagcctaaaatcatcaaagtcacggtgaagactcccaaagagaaagaggagttcgcggtgcccgagaacagctcggttcagcagtttaaggaagcgatttcgaaacgcttcaaatcccaaaccgatcagctagtgctgatttttgccggaaaaatcttaaaagatcaagataccttgatccagcatggcatccatgatgggctgactgttcaccttgtcatcaaaagccagaaccgacctcagggccagtccacgcagcctagcaatgccgcgggaactaacactacctcggcgtcgactcccaggagtaactccacacctatttccacaaatagcaacccgtttgggttggggagcctgggaggacttgcaggccttagcagcctgggcttgagctcgaccaacttctctgagctccagagccagatgcagcagcagcttatggccagccctgagatgatgatccaaataatggaaaatccctttgttcagagcatgctttcgaatcccgatctgatgaggcagctcattatggctaatccacagatgcagcaattgattcagagaaacccagaaatcagtcacctgctcaacaacccagacataatgaggcagacactcgaaattgccaggaatccagccatgatgcaagagatgatgagaaatcaagacctggctcttagcaatctagaaagcatcccaggtggctataatgc

SEQ ID NO: 137536 - DNA, 1506 bp, Homo sapiens
tgcagccattgaaaggctgctgggctcccagccatcgtaatcacatttctgtacctggaaaaaaaatgtatcttatttttgataatggctcttaaatctttaaacacacacacaaaatcgttctttactttcattttgattcttttaaatctgtctagttgtaagtctaatatgatgcattttaagatggagtccctccctcctacttccctcactccctttctcctttgcttatttttcctaccttcccttcctcttgtctccccactccctccctctttgtttccttccttccttatttcctttagtttccttccttagccgttttgagtggtgggaatcaatgctgtttcactcaaaagtgttgcatgcaaacacttctctttattctgcatttattgtgatttttggaaacaggtatcaaccttcacagttgggtgaacaagtgttgtcctacagatgtccaatttatttgcatttttaaacattagcctatgatagtaatttaatgtagaatgaagatattaaaaacagaagcaaattatttgaagctctctaatttgtggtacgatattgcttattgtgactttggcatgtatttttgctagcaaaatgctgtaagatttataccattgatcttttttgctatatttgtatacagtacagtaagcacaattggcactgtacatctaaaaatattacagtagaatctgagtgtaatatgtgtaaccaaaatgagaaagaatacaagaaatgtttctggagctagttatgtctcacaattttgtagaatcttacagcatctttgataaacttctcagtgaaaatgttggctaggcaagttcagttaaaatatagtagaaatgtttatcctggtatctctaagtatacatttaattgtacagaaaatttacagtgtaacattgtgtcaacatttgcagattgactgtatatgaccttaatctttgtgcagcctgaaggatcagtgtagtaatgccaggaaagtgctttttacctaagacttccttctcagcttctcccataaagagaccctaatatgcattttgatttgtaattggaaatgtaactttcactgaaagtgtcatgtgatgtttgcattacttttaactgctatgtataaaggaaagtgtgtcttttgacttcatcagttatttctcttgtgcacagagaaaaatgcattaaaaatgactaaaaaaaataaaaaattaaaaaatggataaatcttttctttttgccttttggccctaggatcgtgtttaggaggattatcccaccccgagattatataaatcttatcctatatttctctaacttatatggttttatttagaaaatgttttgtcctgtctggaattatcttgatgtatggatttaggtattctaacttttttgccccaaagggttagccagttgttaacatatttaccttttcccccaacatatgaaatgtcatacatgtatatactttattctgtgtttggattc

SEQ ID NO: 137537 - DNA, 1087 bp, Homo sapiens
ctgcagctggcttgtaaagctcttcaataatttatttggttaccgcccacccccgcgtccctcccacacatataagccattcagagtttaccacttaaaggtaaacttgaatttcttctcatcttaaaattgcataaattatattaaattctcaataaatttatttacatttagtgggggtggggcgcgatggaaaaacactatattaaataacgacatcggtttttaacacccatcctaatagaaacattaaaatagaatggggtagggaggaggggtggaggcggagaagggatgtacgtctcaggatacaggaaatacggtaagagcgaaacaggaggaagccagctctgtgcctggaggggactcgccgccatctcaggtctcttggctttgccagggcccaccggagaaaactgacgacccgtttctgtaatccttatgggagaccaaccttgtgcctccgggagatccactctcccacctggaaacgcacgggaagccaagcctccaaaaaagcgctgcctcctcgctccgcgttgggattatccggaaggaactcccaacggaggtagtaccactctaccctccgcacctcctcctgcatcagccggcctgaagtcgcaccctcctcctccggagaagtagagaaataaatttctcccaccctaaaccaggtcagattctttctcatctaggacatctaggctctttgaaacttatttatgcattctcacaaatttccttccccttttccctgttctttccatgatttcaaaatagaaaaaataacatgcagggattaagcagctctttcacaaaatatgcttgaatgaaatgatggatatttaacgacattaaataattatttgtaatattttagatgaaataattgtagttatattttctaagaaatagacttgaatcttttgatttgcttgaaagtaagtcattggtgccaaggtggagggaaagtgtaataaaaatgctcatgagttgataatttaaagctgggtgatgtatatgtagggatttattatattattctctctacttttgcgtgcattggaaaatttttttgttaaaa

SEQ ID NO: 137538 - DNA, 1055 bp, Homo sapiens
tttattctaataatgtatagattttcttggattatctgttaattaattatattttgaataatgacagtttctttacaatatttctttaccttatattactgtgctagctaggatcttcagtacaaagaggaacaacagcattggtagaggatttccttattttgttcctaaattctacaaaagtttcaccttttttagtagattgtctttctcaagttaaggaactttcttaatgttcctagtttgctgagaggttttattacaaatattatgaagttttttcccgtctatatgtactgccactttcatatcctttcttcaccattaatatcacagtgtgaccatgtgataaattacaataatcaattttctaatgtatttcttgcttttgctttcatcgagcctcgtcattggatatttggttcctattttaatcattttgacttttatttttatattgaactttcttctactttccttttattgttctttttctaatttattgagttgaatctttagcatcttaattttcaatgttcttctgtaaaataagaatttagaactataaattttcttctaccactttagaaatatttcacagacttttatatatagtatttttatcattcaatatttattatttttaaatttctcttatgatttttttgacccatggtttgttttttttcaatttctaatcatatgggattccttttttaaaaaatatattatgaaatcattacattattcccattctagtttaactttatcttatttttcttttttaattttttttacatctatagactttattagatgttctttatacagtcatctggtatgtataaagagtgaacaatcatataaaaggaaatatggtcataactgattgaattaataaaatcctgaaactaaataactcataattcattgcacaacatatattaggtttcattagatcagtatatagcttagtagtaaactctcctgatggccataaacctctaaggtgttgtcatcctgaaaaatgaaggaggggagggagctggtggggt

SEQ ID NO: 137539 - DNA, 1053 bp, Homo sapiens
gtttccattatcatttgtttcaagaaatttttcaattttcttcttggtttcttcattgacccactgcttattcaggaacatactgtttaatttccaggtatttgtatagtttccaaaattcttcttgttattgatttctatttttattccattgtggtcaaagatgcttcatattatttcaatttttttgaatgttttaagacttgtattgtgacctaacatatggtcatgtgacctaacatggtggctttagagaatgatccatgtgctgaggaaaagaatgtatattctgcagccgttggatgaaatgttctgtaaatatctgttaggtccatttggtctacagtacagattaagtgtgatgtttctttgttgattttctgttcggaagacctgtccaatgtttccttgctgttaacatagctactccacctttccttttttggtggtatttctttttccattgttttactcattcacttttttctttcttttatcttttacaaaatgttctgccaaaaaatcaatgcattgatttgtttgtttctgaatttaccaatagaatttataattagtattaaggataagctttatatatccaaacattatctttctttactaattttttattttatagaatttaaactctacagaaaagtcaaaagatatctttcatgtattgtagtgccattcttttccaagggagatacattccaaaatccccagtggatgcctggtaacatgaagagtaattaatcctatataaactatgtttttttcctatacatacatatgtatgataaagttaaatttataagttaggcacaatacaagattaacaacaacagtaataaaatagaacaattattacaatattcatagtttcatggatagaagactcattcttaccataggtcttagcaacttcaacacatgatttttttcttcccttattaagttgaaaacttcctccttttcacttaaaggaagcattttacagcttctctttagcatatgtgaactgccagcattatcattcttgcactttggggt

SEQ ID NO: 137540 - DNA, 1036 bp, Homo sapiens
gggatgattcacatctggagcaaacatgagatttcatcacactactcacagtggtgtgaaatttaaaacttatgagtcgtttatggaattttccatttactgttttcagactgcagttaatcatgggtaactgaaactgtggatgaggggggaccactttagattcatcagggcatcaatttggctacatatggcttatctctttttctaaatactatatacatatatgtatatatacatacacagatttttttgctgagccattgggaagtaacttgcagatatcatgacacttcaaccctaaacactaaatcatatatctcttaagaacaattaaattactattacacccagagaaatttaacattgatacaatactattatctaatatactatccatatcaagttctcacaattttcctaacaatatcctttatagctttttatttgttttggtccaggatccagtcaggggtcatgcattgtatttagttgtcatgctcctttttagtctttttaaatctagaatagcaccctccctttttttttcttgtcctttttttgtgacgttgccatttttgatgagtccaggtagttttcctctatatgtctcacagtatgaaatgtgtctgattgttttcccatgattagtttaagcgtttttagcaagaagactacatgggcgatgttctgtccttcttaggcacaaaattctagtttatcccaagagcatagatacctttggggattttacagatagctaggtgggtattttttacttcccccttaagaaagttacttttctggacacgggtcaaattatggtttataatttgcaccatattccatgtctaggttacctgtttacagaaatgctcagcatgaagaggagtttctatatctgttctgccatcacattttcctacttcagagcatttacttagtccggttggttgtctgtctgtgtattcacaaactttcacaatcaactcaatagggaataaagttttttttttcagcagcttcatgtgcagtc

SEQ ID NO: 137541 - DNA, 1007 bp, Homo sapiens
acttgtggtttggggagggtcgggtgggcacaggcacatcattagggagaacatgcttacttttcctaagaaaattagatggatcctggctgacccctgaagtgcataatcagaatccccctcctctttctgccctccctattgccataggtggctgattacctctttttcttggtgtccggtttctccccatttttcatctctcctcccatttccagagtccttccctcccttggccttatgtactagggacttgatggccccttgaagtgtgctgatgatattcagagggcaagattttgcctgtacctttgttctcttttgctcctgcaaggctacttgtggatcagagcccttgatcccactcagaaaggaccccatcaatgagaagcttttcagtggtgtgtcctttcacccggacgtcactcatatctctttgtcacttgttgtgtatgtcaccacgcagtgatacacccctgaactagatctttcaggacagctttggtgacacgaagctgccacttgttgttgttctttttctcctctttctttcttcttcttcttcctttttcctttcactttcagctctctgcgggacaaatgttctatcgagactgcttcttctgctcattggtgatgggtgtgtccccttgcagcaccaggcctggaaggaggcttcactttcatttttaaagaagcagagatgaaagtcaccagttcagtttctctggtgaacaatgagaacacttggacacagggtggggaacatcacacaccggggcctgtcttgctgtgaggggagggggagggatagcattagagatatacctaatgtgaatgatgagttaatgggtgcagaacaccaacatggcacatgtatacatatgtaacaaacctgcacattgtgcacatgtaccctagaacttaaagtatatatataaaacaccacccaggagttacttttaagtgaaatgtcatcgtgaattcatggatttcccagtacctct

SEQ ID NO: 137542 - DNA, 1272 bp, Homo sapiens
tctgagaaatcaggaaaatttgaaagccatcaataaattatttactctttgataatgaaaatattttaataaaaatgctaaaaacacttaattttaaaccaaaatacagtatagtatctggtaaagagatttaaacctatgttgcaaagatgattaaaatgattcatacgcaatgaccctttatagagattcatttaaattaaaatttatttttctacatcaaaatgaggagatcatcatgactaagaaattttggattactaaattcttaaaaaattgtccacttttaaaattctattaaggtacaataaatcaaacatatactatgttttctttatcatttatagaaatttaaagtatgataacaggtatttcttgttgaggtgattagcttgtctctcatacattggtgtttggagaattgtttactgaaacatttgaaatggtaatccacaaattgtttaacttttttattataccatctgagaatatgtttgcatatttgtgaaaacaattggaaactgtctcagttatgttcattttgagaattactatgttttggtggacacatttgctggaattttgtgcagatatttttaaaatatttaagtttatgtggttactatgagatattattaaataaataaaacatgttcggagtaatgtgtataatacaaactcattttttgtaacaacaaacagaaagagttacatgttggtaagtatatgtgtctttgattggttatggaaaaaattattaggcatttattccatacttttaacatcttttaacctccacagatttagaattgtttttctggaagaaattgttaatcttctcttttatacatttcatgttgttttcctcattttaatgccttcgtattatatttctaaatataattttcttttataaaacatgcaaattttatacgaagaaaaacagcataagtaaacttaaagactatttatatacaatgtggttccatttaaaagatagataatggatgccattaattcatagaatatataatacatttctttatgttaatacagaaacaaagcctgatagaaatatagtcaaagaacaggcaattcataggagacaaaaatatatggccaataataataataaatatagttgactttaatattaggtcatcatatttgccacaatcaaaaaagtctccagaattctcagttttagaaaggatttggttaaatatctactgtctataaaattgtacgtttctaaagtattttatctctatc

SEQ ID NO: 137543 - DNA, 1150 bp, Homo sapiens
aaaggtctagacagaattgataactatgttttcttctgtaaataggagaaagactgaggaatggtaaaagtttagcagtaagaagaattatgtctatgttgtttgaattatatacagttagattgtattcatgtatttattcatgtattatttgtgtaaataaataaataaatataaaatttccaaggaatataggagtttgtcaaggggctatgagggaacaatgaggctgattgattagttttggaagcctaataaaacaagagtaatagcggtagacatccctgtactttttgggggagaaatatgcctaagataatagaaacatctggtccacctaacagataaattattttgcattcaaatacattagataccaaaaagatgcaggttattgacattgtatgcctttgatttaatatttattaagcactcatctaataattttgcattctctttaacttgcttaatagggaaattggggtgttttctgctcaacagacatatctgacctgtatgataatggaatttctcattataagtcaataaacttttgttctttctgtatctttcagtcttatgatgtaatcagcgcgatttcacttcctgaatttcgatgaattctaagacatgggcaagatcgggttgtaagacctctgagatttaaggccatgccctggatcatggtgaacttaccaaagcaaacaatgcctgtgagatggtcctgcagcagccaaccagtgaactcttttggtgacatcctgttcttgttgtataactttatattcctataaatccattaaggccccaataaagtttgtctctaagcgctgtgttagatctatatgactacatctagtaaattgtgaattttaagtaaatattttataagaactcctatgtaaagcattactaaaattagtgttgaaatatgaccttcttcctacatttattcatttatttatgtctatttattcatttattttagtgaaaaatataaggaaagtagaggaaggttaaatccaaaaaagaattgtttccagtacactttctttaatttgctgtcagtttttgcatggaatctacatctttttatgctaatcctcatcctagtattttacatcttaactatttttttctgactgaaatg

SEQ ID NO: 137544 - DNA, 1083 bp, Homo sapiens
tggggaaacgcttcgtatttcaccgaaccgcagatcttagccagactgagctggggaggaaggttactgcaggcactcagccagggtgccttgatttccagctttgctatctagctttcgggaaaaacaggtgtgggtttactgggtgcgctgattaggagaaaaagctctccgtgttatgcattgattttgttaatttcctttctcggtccacctggcaactgtgctcctcttcgcaggcatgaagaccccgtttggaaaggcagctgcagggcagcggtccaggacgggcgctggccacggcagtgtgtctgttaccatgataaagaggaaggctgcacacaagaagcataggagccgacccacctcccagcctcgggggaacatcgtgggctgcagaattcagcacggatggaaagatggagatgaacctctaacacagtggaaaggaaccgttctggatcaggtacctgtaaatccctctctgtatcttatcaaatatgatggatttgactgtgtttatggattggaacttcacagagatgaaagagtgtcatcacttgaagtccttcctaatagagttgcatcatctagaatcagtgatacacacttggcagaaataatggttggcaaagcagtggaacatatttttgagacagaggaaggttccaaaaatgaatggagggggatggtcttagctcaggcacctgtcatgaacacatggttttacattacctatgagaaagatcctgtattatatatgtaccagctcttagatgattataaagatggtgacctccgcatccttcaagattccaatgattctcctctggcagagagggagccaggagaagtcatagacagcctggtaggcaaacaggtggaatacgccaaagacgatggctccaagagaactggcatggtcattcatcaggtagaagcaaaaccctctgtgtacttcatcaaatttgatgatgatttccatatctatgtctacgatttggtaaaaacatcttagaggtcatcttgaaatttgccaaatatatgagactctaaatctgtagacacagaaagtcttgattg

SEQ ID NO: 137545 - DNA, 1023 bp, Homo sapiens
gacgtttttcagtgatgtggcatgcgtttttttttaactgcccccccagccctgacatgttctttttttggcaaacatacataatgttacatcatactatgatgaacatccatgtacttttcactcaatttcagcaattatgaatccatgaacaatcttttttaacttagcctcactcactccccatgttctagtattattttgtaacaaatagcagacatctgatcattttatccataaatattctttatatatctctgaaagctatgggatgatatggaaaaaaatgataattccattatcgcaagtgatatttacagtaattctttaatatcagtaaatatccagtgagggttcaaacttccaattgcctcataaatgctacttgttttattatttttaattagtagaatcccgtaaatctcctaagtgtcttcttaatccgtatgtttccctttcatctttctttttttccttgcgattttgtttatgaaatgaggttgtttcacatgtagcatttgccacaatttaagttttgctaattgcatccctatggtaatgtttgctttcctctatcctctgtttctttaatttgctagttatgtctagagacttgatgagattgaaacatggcttttggcatgaatgtttcataggttatgttgtgttcatttagtaggtggcgcataatctgtggttttctctctttttgtggtattagcagctgctgcagataaatgcattaattcatgatgcttctgatatgatgagtcatctttgtagagttactaagcattagcaaaggaggaaatgctatgtaatagaaatattattcaatgccaaaatattttcttaaatagtcatagaactaacaagaaaaaatagatagcaaaaaaatgtgttggctgttctcactgtttatcttcctaacttcttttgatgatggaaggcagttttgtggaaattgccagccaggactttgacatgaaacagacccagggctaaattttggctctgtggtgt

SEQ ID NO: 137546 - DNA, 1368 bp, Homo sapiens
gcctttctgtcctcttttataatggatatatctttttcctgccattatccctcagacattctcctcatggcacattttcttcaaatgctaacatttactgagtgtacattgaagttctgtgcatacaggaagaagttattttctgagcttagataatactatgtgtatatgtgattaaaatgaagattattttctaaagccttcaaattagaagtggatttctgtttcattacttccgttttaaaagtttttgccagagagttttgctaaatactctcttatttgctctagtgtactagtccagtagtgtttgcatgtggatgtctgtggatgacagttattgtagcactttggcagtgcactaaaattttgccactatgaaatgtttctttattgtgtgtgcgtgtgtgttttgaaatacgcacacagccacacccacatatatattaaaagtggttgtattcatttagtgaaaaacaaaaagtagatgtacttctgtaaatcagataaatgcttggaatttgattgtctacccaatcaacagttttccctctttgctctggaaatatttgtactcatatagcatatttcaaaaatgttgtcattcattaaggcctcttaaatagaccactattttttgtgtctggcagatgagtatgtcaaggattgagatgaacacataagtcttggaaattaaataaatttataaacataaagataatttaatgctgtgacttcattttttaaattctttaaaccaactttctcccaataaaaaattataaactatgtcttttcctacttactcctggaattttcaaaggaaaattttacgttctcaaagggaacagcttttatttgtccatgggctcacaaagtttcactgaacaaatttgttcaaatgatttctctttcaacatcattttctagcaaaatcatggagaacagctttacactttcaaggtaataggtataattctgttggtggtgacaagctgcacttaactagtctgaaaaaagttgccatcactccttttaaataatggtacttgttttaatttcatcctgtttcctttctgcttctcctcaggcattgacttattaaaacttctcgtcaattgcaaacacagtaacataatggcttaaaaagaattatgtttctaggggctccattgatcatgttggtcataagctaaaaatacactgacatttgtattttttaccaattagtataattaatacaacaaaatgcttgagtagtagtcgagaaacatggatagactatgaagtttgtctctgtgacctacattgttcatgttcatgtccaggaaacatataagaaagcaatttgtaagctggagattatac

SEQ ID NO: 137547 - DNA, 1095 bp, Homo sapiens
ttttacacagtacgaaaatctaatgatagagctcaaaaaaaaagagctaaaaataggagttggttcttcttagctgtttatccttctaaccttttttttaaatgatgaaggtatgtttttgttgtggaaaatacaagggcttttgttatcactcagacccagagtgaaatgtttgctttgtggttttgaataagttggcctttaataagttatttagtctctcttagcctcagttttctatctgtaaaatggtcatagcaatgtgaacatatgtgttacatcctagacttatttttctaccccagtaggttgtattgaaaggaaaatgttatatgtgtttcagcatgttttggtgaatcttcattccctttcctgccccttgttttccctcctcaaaggggagaaattagcacaaattagtatcaggattgtgcaggaaataaacatttgtgaaggttaagaaagaggaaaaggaagttatttcttcaacagattaaggatttttctacacacagttcttttgtggcattggccacatgtccattagaccaatttgatagtatcttcggtctgcattcaaagccagctcatgcaatgagtattcagcctattcttccaagacaatctggacatagaccagagggagatttttctcccctctgtgccctagagagctcattgctggcttactcttagagttgaaatgagagggttttgtctgcattttgagtagataccatctatcttatgtgagtatagcattttacaatttagcactttcacaactattatatttgatcctcacaatcctgtgaggtaattatggcaaagtcagatctacaattcatattaaaatttacctagctcagattacaaatgtatttcacttagtaatgtgtgtgtgtgtgtgtgtgtgtgtgtgtgtgtagctcaaaacaaagaggaaatatttcccactctcccattcgactcttgagtttcatgactattttgtttataactgtttgctgcctcccaccttaattgatttctcttacattctttgtactccatgctatttccttgtaggtgtacaccagtccttgccatgaatct

SEQ ID NO: 137548 - DNA, 1080 bp, Homo sapiens
caccacacccgggtaatctttttttttttttcgtatttttagtagagacggggtttcaccatattggccaggctggtctggaactcctgacctcgtgatctgcccacttcggcctcccaaagtgctgggatttcaggcatgagccactgtgcccagctgatatctatttttttaaaaaatacttggtttacctgttttgttcactcatatgcgagtgcctcataattcagaatctaatttggtgtgtggctagactaacaacgttcttcttggactgccaataacacctgcaaaacctatcccacactcatgggaacacatcaatgctatttattattggcaatcaacaggaaactcaagcacaatgcacaacagtcacagcaaggaggaacatgcaattgccaactacaccaaacgtgcctatagccttagccacagcaacatataaaatggtaaatctaacctaatgcagggcttgcttctgccaacctgattttagaaaatatagtgtaatacttcttccctggcaacgctgcatcatatacctcacttatttagatgagccgattctcctaaccgttgacattcaataaccttatccagagacttatctcacgtaaatgtatagacaatggtgggctgagcccatgacaaatttagttaacccaggtgctgaatgcaaggtggataacacaagcttgtttgactataccattttctgctcctattaacacaacctggaacttctggaacttcacaaagccatgtgaacttcccttcagtggaacagagaattcaggcagcagagggagcctggaggtcctgtaaaggaatcagatggcttccctatcacaatcttctcctcatccaaccctgaagaatatttcctgcacttgggattggtgcaaaattccagtagaattttattcaacagtggaaccccctccctcaagtactttccgccaccaaaccacactagatgtgactccccaatgtcacaaatgagctttccaaatagttcctcatggtactaacttccctaggatcactaattttggaggcagtaggaacagcatatgt

SEQ ID NO: 137549 - DNA, 1015 bp, Homo sapiens
agccttaataggtctttttgggagtaattatttttatttttaaatatctagtgtaccaccatggcatgtattctttaaattttatacaaacaagcacattttttcagtgttttgatgtattttcatatttttctaacttagacgtgtaggcaatacattttatctaatgaaccaaaaattttggttggggtgacctcagagcataacacaacctctgaaatgatttcagctaggaccacactagtcaaggtaatctattacacattgacccaagtagtttgagcaatggaacacgttaccttagggatagcagtacaatcctattctagaatccgtatcagcaatagggtgtatgacttcgatattggatcaggatattccaatgatgtaactacaattaatggctcatatgtccaatgattaaagtcctatgtgatctgagttcagaccagagtaatccaggtaagctgctatctattcaatatttctctcagtacaaaaggacaagagaaacagggcccacttcaaaaagtgccctcgagttaatagatgatattatttaaatcgaatacactatttctacaccctgtccaagaatagagtttgttaagatggcagagctgtaattgtataaaactttataatcagaggttaaatccctcttcttaacagcatgtttataattaaccttctcctatttattgtccctgccattctcatcatagcagtgttaacattaaatgaaagaaaaattttaggtcacatataactttgtaaaggtcctaatattgtaggcccatacagactacccacaaccttttgctgacacaataaaactatccattaaagagcaactatgaccactaacatcatctattcccctttatattatcactccatccctcaccttcaccttcatgctcatatatgaatccttctccctatacccaccccttaattaatatgattatagaagtattattcatcttagccacatcaagcctagctgtctact

SEQ ID NO: 137550 - DNA, 1065 bp, Homo sapiens
tcctcacctcctattgtcattgctactttctaaagtagtaaagcccagaatcgaaggtaggtatgcgtgcccataaaaccacctttgcgtcctgctggaaagatatgcattgttggtacctggaaaccctttgttcttcaggtaaggactgcagctgagtcacagtgagcagatccctgcacacagtaggagctcaatgaatgaatgttggatggaagatggatgagcagagcaaagtgcattttaacaaaaattgtagcaagttaaaagttaattctgtacacaaatggaagatttggaaccaatttccaggttaagtttagtttacattttcaaaacaactcagaagatgagggaggaacatccctttgctccggcttgtgtttgtgaggagagaacacagaagccccacacagctgttaacgccttctggattagcgttcctctcacctccatgcacatacctgtcagctctcagttcagtgttttataccctacaaagcagatggtagagtagaattatccccattttataggtgaagaaactgggacccagaggcagaatagtttataagttaagagcagagtctctagagccagactgtgcctctactggaataatggcttcagtagttattggctgtgtgaactgcaaattatttaacttctttgagcttcagctacctcatctgtaagatatgaatagtaatagtttttccttaaagggctgctgtgaggcttgaatgaattaatgtatataacgtgtttagaatagtgcctgacataatagcgctctttattagctaacatcatcataattatcattacacctttagctagtagtataacaaggtcttaaattcagattattttttctacctgtattccctctctgtggtgttatgttagaaaaaacactagtccagaaggctgaccatttgatgactgtaggcaagttacttttgttaaacctcatctataaaatgagggcatgaaggtgatgatctttaaaattctgtccaattctgacagtcattgattctaagtaggccctgacaacaggct

SEQ ID NO: 137551 - DNA, 1971 bp, Homo sapiens
gtctgtaatgtgctaaattaagagttatcaaattttggtgctaaatttgaccaccaaaacccaaaaacgtctagaaggaaagggatgagagcatggaaaacatgagctggaagcaacattccagtttgagatatgactgcttgtctgtatcagatggtggtggtggtttctgttgttattgctattgctattatttttatatttctgtttcctctgagaaagctcttggcagagccaggaaaaaaaatgtctcatgccagtctgtataatacttgtttttttgcgttttgattttctttctcccctgttaatgtaggcaggctttccccattccattgcttacctggcttgaaataatgccatttatggctcatgtattatagcagtgaatcaggacacatacacatctacacacatgctccccctccacccatgtgggtggctgttcatgtctgatgtgcaaatctgctggcattatgctgtcaagttccatgtccggttgttcagtctctttggaaatgattatgaaaggagaggggctgtgaagggggcctttgaaattgtcttggccacaggacccagagagtattatttaatggcgtcagagggtgttttgggcctcaaagcatgctatccttgacttggtgtgggtgagaagctgaggtttttgtgagattagtaccatggtgtaaacatgatctgggaggtttgctggcattggttcttattaattactctttggtccgtttgtggagaccccctggatggaactgagaacctatttctttgcaaagataatttagtgagtttttttccccccttagcttcattgtattatttaaagtaagcttatatcttttctgggcactttgttttgatacagtgttggagagtggggaatggctctatgctgggcagctgcagacctgtttttttgttttgttttgttttgttttttgttttttccattcagcagctgtttgaccttggacaatttttttcctcctcggtgggtttgggattcccagtaacattggcattttttgatggctccactaggtgacttccaagttcttgcattttatgattttatgacccctagacacttgaagttgtggggggtgggggggatgagctggaaagacaagtgaaaaggaaaagaaaatgttaatcaaagggtgatgggaggaggggaaggatatctggtactacagcctggataacaagtttaagcgaaggggttttttttgcctagttatttgggaaggaaactgggacagcaataagggaatgctttttgactttttttcccccaaggggagaaggggtctctgagactagtctttgatctaggtttatgacttaaatagtgtcacgaaatgccttctcctctgtgagcctgacagacctttggcagaaagcctctgggaatgtatgtgtgtgtgtagggtgtgtggcagtatgttcatgggggtgtgtgggggggagcacactcctgagtgtggatgcggggtgtggtggtaggaatgaagaaagacagtattgagttccacagttctgaatagcctccttgtgctaggacctataaggatttcacaaatgctgggatggatgggtatcacccatgccattcctcttttcaccacctaaaacccctcaggctaaggaggtgtcttgaatgagcccttccattagtaatttagctgttgaaatgggttagcgcttttaaaattgtctccaggcaaataaagggatgttgctagccagatggcaggccaccatctagcaaccagaagggaatttgagagtagagaacaaaaggtagcagtgtgactttttacttgtgtgaatcctaaaggtttggcatttctgcttcagacttgtgaggatatttttctctagcaaaaagagaaaagagtgggagaaaatgagaaatgcagcccagagaagcggaaccctatgcattttgac

SEQ ID NO: 137552 - DNA, 1037 bp, Homo sapiens
cctcgtcttttcttctttttctccctcttcacgtgatctcctccccttgcatcctattgggtcccttccctccctctttcccagtccttttcctccccatctccttatataccccctctatccgcccccaagaagctccccacccccaaaccagaactggtggctggtgactctcgccggtctggggagagcgagcttgcttgggagccttgaggctctgattggcggtcgcggctagcacgccagcgcaagtcccgcccctgggcagcgaacgtgctactgcggcatctgttattggtcggcgggtatgtcagtggctctggccgcgcctcacgcaagcgcccgcagtcgctcggtgaataaaaaggcagcctatgggctgagcgggggatggggagagaagagggatagggccagcaaggcagggatcgaacgagtgtctggcagccgggagcccagcgaagagagcgagcaagcttaggaaaacgagcgaagtaaagggagtaggggagactgagactgaccggtagccaggcaggcggacggacgcacgcccggacagactgagcaggcgccggagaaccactcacaggttccccccgcctttccctttgaaagctaggattttgcctttcccgtggcgcccgagagagaatgctggactctgccgacttcagcgcaagctaagatttctcagctagggacaaacgatcagcccaatcctgagaaggggggaaccaagcaccccgtccccatccccctcccctcccccgactaaactcgggcgccaaacccagcccttctctaaccaccctacttcctcctctcctttctagcatggtggctgtatggacagtctgacagaacagagactgacatctcccaatctgccggccccccacctggaacactacagtgttctgcattgcaccatgaccctggatgtgcaaactgtagtcgtttttgccgtgattgtagtcctcctgcttgtcaatgtcatactcatgtttttcctgggaacgcgctgaatggagtcc

SEQ ID NO: 137553 - DNA, 1041 bp, Homo sapiens
gtgtttagttgtagagcctaatctcctggataattccactcctgagcctcataactcattcagtcagctaagcccctctgacctccatgtccaggtgtatttgtttacaagctttatttgaactgcaagccattggacattcgggacacaatcactcatcatcaaattaagcatggagctttgcttataagaggtactcaacaagaatcacatagataagcaggtaggtgggcaggtaggtagccaggatatggtaatatgttgaaattgcaaaacaagaaaggaggtaagtatagctggggagtttgtaagaggctagattatatgtcggagggagactaaggaattcactttgaggagctgtattttctgtagaaggccaagatagtctagcaatgagactctaagtgaagatgttaagaaagggctggacatccccaaatattggtaaagaagagaagagtgcaggacacataaatagatgggggcttatagaaattcatgagggcctagctaagactgctgaagctctctgtggactgatagggagagattttgaagatatgcaatgtggaaaaagcaagatgcagaatactgttgacccttgaacaacacaggtttgaactgcacaggtccacttataccgggacttttttcaataaaagttaataccaagtatacctgcctctcctgcctcccattctacctccttaacttcgtctgcctctgctatccctgagacatcaagaccaacccctcctcttccttctcctcttaagcccactcaatgtgaaaacactgagaatgaagatctttgtggtgatctacttccacataatgaatagtaaatatattttcactttcttaggattttattaataacattttattttctctagctactttattgtaataatacagtatataaaacatatacaaaatatgtgtcaatcaactgtgtttgttatagataaggcttccagtcaacagtaggctattagtagttaagtttttagggagtgaaaagttacacgttgattt

SEQ ID NO: 137554 - DNA, 1793 bp, Homo sapiens
ctgccacttattgcagggcatcttatccagtgagcaccagtggtataccatagcaacaaccagtcaccttgggggcatgtgctgatttccaggcctgtcctagcctaggtaggaatcacttgccactttctgctaccacacaaatgcctacctgtgccaccaaccaagagaaggtgattgtgctcatggctttggtttctctaatccagattcttacccttgctccctggcaagcaagggcatctggcacctgctgtagatgcattcctgagttccccccaactgcaatctctaagcaagccaaaaggcctgaaatagcagttgcttgaaagtgctgtgggcagtgctgctgcggatataattgaagggatccctagggccccttcccaggccagcaaagaagcttggtggccctcagtatttcatgaatcaagcaaagccaattaaaagcaaattagcaagacaaaaaaagagaaacttacgggaggggagttgatatttcatagaaattggattaactgtcctgggctgtccagggagggaaggagcaggcatgattgctaaaggaacttttggagcaagaccctctgggaaagtccataaaatctcattatatctattagaaattcataagggtcctggagtctgagaggcctgtgtttctgccaatttttgcccccagttaatcaactgggctgtgggcaaatctcatctttggcaaatcttgggctagattttacttgactggttcccatatgcaagtcagagtctgggctacctcaaatgactcaggactttttcaactacctaagtgcaggatttctcaccctgattctgactcaggtggcccgtgagggagtattttttgttttacccatatgatgctggtgtattgaacctgctggacaagagcttttcctgttctgccatgacagatggctgcctttgctgtggtcccctgaggagtgctttgcagtgcttattggggtgggggtcgggggggtgggtggcgttgatggagggaatttcttaagaacttccttttatcatcaagaaactcactttggtcagctccagcactgttctatggtctgtttgagggctggggttgtgcctagcaagtggtcagcccttgtttccagttaatgtttaaagcagacgtaaatccaacagataagagagctttttgtaagcctttttgaaactgctgtggacaagctgctagttccccactgccccacttccaaggaagttgactgggctctgggccctactgatcgtgttcttcctttgcttaataactcctaggctttagctgagctgcctggcttctgggaaccaaaactagccagtaagagcaagtgacctgagcgtgacattttgtagtttgcaaactctttccatctttgttatcttctaaatggccctaaaaagtagatgaaaagagcaggtaatttcatccccactttatagatgaataaaagagtcatggagaagtagagtgacttgctcgtggttatatagaatactgactgcaagtcagtgtggaaaagggtagggcaggctggggtagaagaggtagaagagaaagtttactgctaataattctccaagcacaggatgaataacatcattgatatgtgccaggcactaaacactacattttcttgtgtaatcctcaatttaaccctatgaagttgacatttggtgttatccctattttcagataagaaaactgagactcagggaggttaagaccctttccaaaattcacccaactagctcactggact

SEQ ID NO: 137555 - DNA, 1048 bp, Homo sapiens
ttgttgggctttggaaggtcacacaccacagagtagggcctggggctgagtgagagttcatggtttggacagccttgctgcctgcaagtcccttcactgccctagccagcccaggaataggatccttaccacctgaagtggggcagccaggatatgtggctgcagaagcaggttcctttgaatttctagagctaagcagtttgtggctgaaacccaatggcagcctaggggaggaaggaagacctgtctggggacccatggtgttgacagcacagggtgacattgggagagccagccaagcttcaggcctgtttccaaacacagactagtgctggcttgggtggcagcaaatacaccccagaccactaaaactgttgatatcatgtccacacctccaagagtactactagatgaacaacatgtctccattgcaaggtcctggaataatgcttttggatgtgattttaagggaaaatgggacttagtggaagtagctgccttcatcttattacccaataggcctagtgccagacagctgtgatcctgagaattcccagatgagactggtccttggaggaccagtgaatgtggatagagaaggccacctagtaggcctctcccagggccaggatgccagtttcttggtgctttagagtctccaaggaagcactgccttggggcccagttcaagccagccctacctatctggcctcagcttgggtaccaggccacaagactgcccggataatgggttcagtaaacaccagtctctctccctccttagtcctatgccaagaagggaagtagcttcacacactcaggaggctgggtgtgtacccttcatcctgctgccagcagctttccttacctgtgccagtgccaccaccccacctgccctcagcccccaggcccagttgctagagggaggcatggggtttagcagggagacttcaagtttacccatgtgtatgttgcattcaagttgtttttaatatatatatatatatatatcaaaagtcaattatctatttttatattgtttgcattt

SEQ ID NO: 137556 - DNA, 2593 bp, Homo sapiens
ctataacctccagccacaggcctcccagagcatgagggccaggcctcgagatgtgctgctgcctgttgatgagcccagttgctcttccagttctggaggcttcagccccagccctctaccacaggccaagcctgtgggcatcacccatggcattcctcagctgcccagggtccggcctgagcacccccagcctcagcccactcactatgggccttccagccttgacctgtcaaaggagagggctgagcaaggtgcctctcttgccaccagctactcctccactgccatgaatggaaacctagccaagtagttattatcaattctggagtagggacacggggcctgagcatgtgaatggggatcaggggttgggcagaagggtgggggggtgggggttgttgtttaacttgaaaaccctttgggccaaggaaaactcctgtgagttttcaccttggttttcccacttgcctcttctgccatctatggccacgttcaactcaagtgcatctgcccagggaggctgctgctgctactgcactccagtttttgctttcgaggtttcttcttgtgacccacgctgggtttgggatgctgtaattttgtgcctattccagttgccaagttagtgattatatatatatatatatatatatatatatatatatatatatatacacacacacacacacacacacacacacacatacatacacacacacacacaaacacacatgcacacacatatatagcatgcatccttgacacaggctaaacctttagtgccccctgcccctttcccccaatgaatgatgaaccactgattagcagccaagtctgcattgcctcccgcttggggaagtggggcttatttgctattagcaatgtgaaattatggtacagatcctccccacccctattccttttggcctggcatagctgccatcattatatcagatgactataagctattcatcccagctagctgtccttagagaggatcaagtagcgtgtgtctcacagcctatcgctgtggactttggcatcatgaccagatgggggccttttaactgtcctgccatagcttgggttaaagacaaaaatgctaatccccttgatggagtgataaaattcatccatttgcaaacagaagacaaaacaaggttctgttgtggacactgccatagagtgttgagctccggaatgataggattttttttccttcttttaagcttgtgactacctgagttgcagatgcttttgaatttttgttcttttttcctctaaaggaaattttcataatctcatcacaaggaacacggtcttttaattgagataagggaagagaagcaacctaaattaggcttgactataggggctggggtttttgtggagtgtaggggaaagatagaaaatgagggtccatttatcacagccagcaagaaaggggatttcagaccatgcagagcttaaggtatctcagtttcttaaaagggaaaactcccttctcaagcctcccaacacaaaatgttccttaagccttgcccatcccatcatttggactctgtaataaggccccaggtttgcactcccaagacaggataccaaaggcatctcagctgctgttctgggccctttaaagagcttttatcttccaattagccgagtccttagcatcatcaaatgacagggcttcttggcagttgcagccctttatggaatgaatggcaccctcccttctcctgcatccatgcagttttcatgttaaactaggttggaaatactggtggggaagagcttgctgtcaggaagacattggaacaggctaatcttgccaagctcaacctctcattaatcacctgtaggagagggttccttttacatgtctttattggaaatggcatatggaacattttttgcttggctgtgttcactcaaattatgattattgcaccctcgccctcacatcccaccatctccatgcctgttgagagaagaagtcaacagggttcttgccattcctgagatatggcaatttagcttgggaacagatgctgtttgccccctaagtcaaggtgactttgtgggcaaactgtttcttggccaggggatgtgtccatgctggtctttgtcaccatttctcagattggggttggcccagtgcccttactcacaaatagcagacctggctggtagaagctgcacccctggaagcaccacatgaatttgcatggcactaacaccaccactcaagggacccagaccagctcttcaggctgactttggctacagatacattgtgaagaaatgtatctgttgtggagctggagaatgaaagagggtgaggaaggccctccttaccccaagcacagcattccaagagagaagtgcccaaattccaactttctggcctcttaccaaagctgctctgggatggtggggctgaaattggcctggctatttggcaggaagtaaacactcaccaaatgcctttacaacagggaagaacccacctcttgcctcttctttcagggcagcttgagctcctgtctacatgtggactgtgccagccacagcaggcggtagagccatcacc

SEQ ID NO: 137557 - DNA, 1051 bp, Homo sapiens
caaaagtttctccaacaccagaaccttctccaccagctactgagaaaatggcctgtaaagatccagaaaaacccatggaggcctgtgcctcagcacatgtgcaacccaagcctgcccctgaagccagtagcctagaggagccccatagcccagaaacaggggagaaggtagtagcaggagaggtaaacccacccaatggccctgtgggggacccactgagcctcttgtttggggatgtgacatccctgaaaagctttgattcattgacaggttgtggtgacataatagcagaacaggacatggacagtatgacagacagcatggcctctgggggccagagagcaaaccgagatgggaccaagcgaagttcctgcctggtgacctaccaaggaggtggggaggagatggccttgccagatgatgatgacgaggaggaagaagaggaagaagaggtggaattagaggaggaagaagaggaggttaaggaggaggaagaagatgatgacttagaatatctgtgggaaactgcccaaatgtatccacggcccaatatgaacctgggctaccatcccaccacatccccaggccaccacggctacatgctccttgacccagttaggtcttatcctggcctagcccctggggaacttttgactcctcagagtgaccagcaagaatccgcccccaatagtgatgaaggttattatgactccaccacacctggatttgaggatgattcaggtgaggccctggggcttgtccgcagggattgtctaccccgagacagctacagtggagatgccctatatgagttctatgagccagatgacagccttgagaactctccacctggagatgactgcctttatgacctccatggtcgaagctctgagatgtttgaccccttcttaaactttgagccctttttgtcctcccggccacctggggcaatggagacagaggaagaacggctagtgaccatccagaaacagttgttgtattgggagcttcggcgggagcagcttgaggcccaggaggcacgtgcccgaga

SEQ ID NO: 137558 - DNA, 1036 bp, Homo sapiens
agtggtcccctgagcttaggatggtctgaagggagtggacccagcaagaaggtaggggatgaaggcttcttgttgctcagtgtagagttttgcttccttggggcccagagagagctggcccagcaagccaagcatatcgagtggattaagatttgccccacattttccatcattttctttcttgttccactcaagcctgacgtccggtgaaagcaaacccagcctggatgcttgctcactagtatctgtctctctgtctttgtctctcctatctcctccagaccccactgtgatgcttcctgactgataatgttataacagtgcctggaagcctgaggctgcatttccagctggacgtacctcagttgtccccatcatcatggagacccaaaaggatgaagctgctcaggccaagggagctgcagcctctgggagtacccgtgaacaaacagcagaaaaaggagccaagaacaaggcagctgaggcgacagaaggaccaacctcagagccatcctcatccggcccaggtaggctgaagaaaactgccatgaaactctttggtggcaagaagggtatctgtactctgcctagtttctttggagggggacggagcaaaggttctgggaaaggcagctccaagaaaggtctcagcaagagcaagacccacgatggcctgagtgaagcagcccatggccctgaagatgttgtcagtgaaggaactggcttctccctgcctttgcctgagttaccctgccaatttcccagctctcagagtgcccatggggctttggagacaggctccagatgtaagacatctgtggctggagccacagagaaagctgtggctgagaagtttccctctatgcccaagccaaagaaaggcctaaaaggcttttttagcagtatccgccgtcaccggaagagcaaggtcactggggctgagcaaagtgagccaggggccaaggggcctgagagggtcagagccaggcctcatgagcacgtgagctcagcccctcaggtgccctgctttgaggag

SEQ ID NO: 137559 - DNA, 1034 bp, Homo sapiens
tggattcaagttcatcagagtaccaattttcctaaccatgtttccataaaggccatcggaagatgtcacactattcaaatgcccaatgataagacttctgatgagaccaaacaggtcacattaaatcaatagaatatcttagaaataaaaccaatatgactaaatccaaaacatatcacatgaagtaccacatgtgcaatacaaacctactttaataaataaaagaaacacaggtagctgcactcagggagaacattcagttcctgatggcctcttagtcttctctgagactccactgccacttctacctgggcaagtctaatggtgcagccatgaagtttttaaccatcttgtctcattaatgccgtggtgccagactgcaccacaacaccagctggcacatgacagaggattcatgctcatgggaatcatatttgtcaccaatgggtgtcagcttctcaaggccatgcttggcaaacacacttttcagctttgcttctaaaagtgacaaccgttggaagaccttctccagagtgagcttctggtccccaggctctgattcttcagaaatgcactctgtagtcttctccaaaatgtcagccacctccaccaagtccttacagaaactctggattccaaatatcttggcgtcttccacacatctccgggttcacctccttatgttttcacaatcagctatagctctccggtatctcaccattaaatcctggacttccttctccagtttaacaacttttacccttaaggcttgttcagcaagagagggcccaaggtcatcaggaaggtcctcggaatggcagtcctcaccagcggttccctgggtggcagtgctgaatggaagtgggcatcccttgctctcccatgaggcactctaagccagtaggtgctacacccgctggcagcccgcccacgttgaccacatggccatgttcccgacttgggctgatggaagcagcacaggcgcacttgctcaatatttctttttttagttataattttttttttgagatggg

SEQ ID NO: 137560 - DNA, 1031 bp, Homo sapiens
agaccagcctggccaacatgaggaaaccccaattctactaataatacaaaaaattagccaggcgtggtggcaggcacctgcaatcccagctattcaggaggctgaggcaggagaatggcttgaacctgggaggtggaggttacagtgagccgagattgcgctattgcactccagcctgggcaacaagagcaacaccccatctcaaaaaaaaaattataactaaaaaaagaaatattgagcaagtgcgcctgtgctgcttccatcagcccaagtcgggaacatggccatgtggtcaacgtgggcgggctgccagcgggtgtagcacctactggcttagagtgcctcatgggagagcaagggatgcccacttccattcagcactgccacccagggaaccgctggtgaggactgccattccgaggaccttcctgatgaccttgggccctctcttgctgaacaagccttaagggtaaaagttgttaaactggagaaggaagtccaggatttaatggtgagataccggagagctatagctgattgtgaaaacataaggaggtgaacccggagatgtgtggaagacgccaagatatttggaatccagagtttctgtaaggacttggtggaggtggctgacattttggagaagactacagagtgcatttctgaagaatcagagcctggggaccagaagctcactctggagaaggtcttccaacggttgtcacttttagaagcaaagctgaaaagtgtgtttgccaagcatggccttgagaagctgacacccattggtgacaaatatgattcccatgagcatgaatcctctgtcatgtgccagctggtgttgtggtgcagtctggcaccacggcattaatgagacaagatggttaaaaacttcatggctgcaccattagacttgcccaggtagaagtggcagtggagtctcagagaagactaagaggccatcaggaactgaatgttctccctgagtgcagctacctgtgtttcttttatttattaaagtaggtttgtat

SEQ ID NO: 137561 - DNA, 1057 bp, Homo sapiens
tagaaaaaatagctaatgtgtgctggacttgataccttggtgatgagttgacaggtgcagcaaactatcatggtacatttttacctgtgtaatgaacctgcacatcctgcacacatatcctggaacacaaaataaaataatgaaaaaaaatgaaaagaaaataaataaaaaatgaaaaaaaaatgaaaagaaaataaataaaaaatggaaaaaggaaagaaaaacttctcgagcagggcaaaacctgacatgatggtgcctgaagtgtcctagcgacctgatgtgagaaactcacttgagacattgccaccatgaaaacagctgaggaaacaaaggaacctgctgaagctgagatcactgagctgtgctgggacatgttctccaaaatggacatttatcttactggagaattgacgaccaccaatgaagactataagctcccagaaaatgaataaactactcagcttgaagtatcttgaaataaaagatatttctataaacattagtagatacttaaaggacttaagtttaagttcagtagtatgctggactgcagccttatctggatcagatcaatgtcattgaagagcaggtagcagctcttgagcagacagcttaaaagttaaatgcatttttttaaaactggaagccaagtacaagaagttggagaagcgatgaaaaacttatttgtatgggacaaagtcttttttaatgtggaagatgttttataagatgtgaatactgaggctgatgaattgtcaaatctccgcaaaatgaaactgtgctgaactttctaggaagatctcaatgttggaataaactgtaggactggggctacttctgtacctcctttgaggcagtaacccttgaaaactcacacataacttcttatttttacctgaatgcttcatcatccattcagggtagagaatctcaaagttcaagtaaaatcaaataagaggacctattttctctagtagtggttgattaccacattattttcctacatgactggtttttaagttattgtaaatgatttttttctgttaatgatgct

SEQ ID NO: 137562 - DNA, 1040 bp, Homo sapiens
cttctgatgggaaatcactttgctttctgggcccctggggaatcagaagtctaagttgttgcctggaagaatctgactactaactttctttttcctgtgtccctcaccaggcctgcttgtcatgtcaccagcaaattcaccggaatgcacctatatgccctctttgcaaggccaagagtcggtcccggaaccccaaaaagccgaaacggaagcaggatgaataaagaaagggagagcacatgaagctttgctaattataacccctcaccttgaccagagtcattgatgtcctgatgtgaaacaacccttgcccaaccccacgaagtctcctatttaatgtgatggaagcacaacccctctctcactttgctcctatttctttctgctcttgggatttctggtttaggaagagatgtggttcaggtgctaaacagtgtgtctgatgatcccttctctcccactcacatttcaacccctgcccttgtttggagctaagggaagggcaaaaggctcagatatgattctctatctcttgtgcctgaggcctggagcctaaggagctgtagggtctgaggggcaggggaggcccatatcttgtttcaggtaaaggacccagtatttcccctccttgtacttttgccttaggttctcaagggacaatagtcttcatgttggattctccaacaggctgggtgcatgtatccccctactcctaccctcatctcatccttaaggcccagaggtagcttggacaagccctccttttcataatcatttgggaggcatggctgtaattctttagctttctccacttctgtctcccacatatactaaaattcttaggtactaggctgtgtgtcttgggatcttaagatcaatgaacctttccccaatatctagtctttgcaaattctagtagaagatttccacagtgaaatcagtgagccagaccaactctacatctcctgcctaacctactgcctaagtcattagggctgagggctcggctgtaggggcttccttaggctgagagtgccccc

SEQ ID NO: 137563 - DNA, 1072 bp, Homo sapiens
cttaaagccattgtacagtattattatcactataacctttcacagccttgaattacatagctcctcattatgctcactttctgtacctcacttctacttttcctaactactgtgtatattgatttgttctcactgtcactcttcagctgcttctttggcctttaaattagtttcacaaaagatatctatctttttataaagttatttaggaaagattttctgtgattgtctaaaaagccaaacccatattggataaactgcatttaaaactgggtgatttgactggaagtggtattcagaggaagaattgtccaggttcttttaaaatactgtgactaaatcaggcaatttttgagtcactaggtttttatttcaaaaataatttattttctttaccctaggaggtaaaaggtcagaaggggttgggtccttctggaataaaagtagggatcctttcatttggattgtttcagatttcctcattgcgtgtttaccatctaaactttatgtagttatacttatgaactttttcattttagaataaagaggaataacttctctgttcttccaggctgtcttattactactgctttgtatttatgtagcatctttcatcagatgaattcaaatagttattttttatattatgtgacatttcttaccatctttttggaattaatttttctttcaaattgaatactagttgacatatgggggtgtgacataagtaataagtttcattccacaggtcatatataagccagtctcattacttttaagttgctccttgcccttttcagggctgggtatatattatatactaatatatgtaatgattcttgctgagtttaatctttaaatgtgcacatagatccttatattctgtttctcttcctgcatacttttaggactatcattaactgttttttttttttttgcttattatcaatagatttaatcttggattacatagttgttgctgccaaatttgttcagatacctgtgagtctgtagaaacaaggaaaaaaaataggggtatgagaaaaatgagtcttagattttatatgtttca

SEQ ID NO: 137564 - DNA, 1063 bp, Homo sapiens
tttagcaactgaaagtctctgaggcattctaaaactggatgatatggcaaacacttaacattctggataacactggctgactgttctgttatggccactaacagtgtgacttcagtggaagaagagtatcttggttatccttgatttttggaatgatattttctctatgaatttccaggattggtcttccagttagcacttacttgaaattatattgacacaatctaaagaaaagattaagtgtttagttccaaaattttaaaagaaatgtagcaaacagttccaaagttttaaaaagaaatgtatcagatagacatctgggagctgaagcatacaataactgaactgaaaaattcactagagagtttcaacagtggactagatcaaacagaagaaatgccagtgtagtagaagacagatcattggaaattatcctgtctgaatagaaaaaaaaaggaaaagagtaaagaagcttaagggacttgtggcacatgatcaaacaagcaaatatatgcataatggagtcccagaaagagaagagaaagagaaaggagtaaaatttttatttaaaggcataatggataaaaacttcccaagtctggagaaacaaatggccagtcaagtccaggaaactcactgtgtccgatatgagatgaacccaaagacatccacagtaagacacattataatcaaattgtcaagttagaaacaaagaattttgaaagcagcaagacaaaaatgacttgtgacaaaaaagaaaacccataagataatcagggaatttctaagcagaaacattgcaaaacataagggagtggaatgatagattcaaaatactgaaaggaaaaaaaacttgccaaatatggatacaatgcctgccaaaactaaacttcagaaattaaaaacaggagtaacatcttcaagatggctgactagagatgccttgtattcatcttccttacccaagaagggaacacagcaattaataaacagctaagattttactgcagtgtcaaaggagattgttggagtgtagcaggagagtggagatgcagctgtggtt

SEQ ID NO: 137565 - DNA, 1064 bp, Homo sapiens
cgtgccatgacaccaggctaatttttgtatttttagtagagacagggtttcgccagttggccaggctggtctccaactcctgacctcaggtgatccgcctgcttcgcctcccaaagtgctgggattacaggcatgagccaccatgcccggcccattgttgttggtattcttaaagaaacagagccatgagtggttagtacacaaatagtttatgcagtaaataactgtggttacagttcattgttgtcagcaatacagcattttccatcacaattataggtgaaacaaaacctcatgaagtagtcatagcacattcatgctagcgagagcatattacaaagcaatgcacgtgcattataggggcagacaaaactggggaagggctatattttcactcacctctggttaactttgtgtattttgtcattaagacttacattatgtttgggtcaaacaaaaaacccaaagagattttataaaagtttacaaccattaaacagtattgtttaatcccacaaatggataaagcaaactactatagctcaacaatacacaaaccaggactaaaaatagtcaatctatgtatatagctagctaccatacaatagatattgaatatgctgagtctttacaaaggcattgactattttagacgagcaggttccagaaatacacttgtttgtttccaatgagaactaactgtagtgccatttcagttgaagactatgcactcctcagtgtcagacgtgaggataagcaaactaggggaaggcagaggagggttaggagggagacctgagcggactctttggacagctcagcattactttctctgtgcagatccagacctggttcacaaagtagaacaaagtgtattgaaatttttggccctcaaaaagggcatttgtacaaagtcccatacttacagcacagattgaatggtaactgagtgcctctcaaaatgaactcttctatgttagaagaaaactcagggccaaaggttaatggaaatcagtgtttgaattactgtataaagataatttattccaaaatagaaaaaaatg

SEQ ID NO: 137566 - DNA, 1267 bp, Homo sapiens
caagcctggccttgggccccttaaccaggtgttgggtgtgggagggatccaggcccccaagctctaaggccttgaaaggatgtcctgttaaggcagctactttcaatgtcttgggagtcaggttatgtggggccccctcccctacctcaacccaaacagctctgctttaatctggtttatctactagggctctgcataaaacttcatttgaaaagttcttgcctccttccctcccttcctcaactgaggagagggccaagtcaaccctggggcccacacgaagtcgtttctcggatttgctccagtctctttgtaaagccaggcaggagagtgggcccatcccacagatacacacatgtcaagcactcttggcccctccagagcctaaagctgcctccttccctgactgacctcccactctctcctcagcaccttgggcctgagctgtggtgtcggcagtggcaactgcagcaacagcagcagcagcaacttcgagggccttctctggagccaggggcagctgcatgggctcaaaactggcctgcagctcttctgatggccatccctggtgcaagtgttcatccagccgtgccagggcaacagcccaccccctagtacaactgatgctccctgagacaacctgggagacagcctggatcagccacatcaactcagttgtccaccacaggggaattttgaatgtcttttgtttttgttttgttttgaaaaataataaacaggcaactgtagttttggtgtttgtgagatgaagagggtgggtgctggggcagaccagtatagttttcccttatctgtggaggctccagacaaggctttgaccaggagctaggtcctgaggtcctttgggcctctggctttgattgctcctataaccaggctccacccatatcttattccggactcctcaaaccatttctgttctcagctgtagtatgaggccagctcacttggaagcatcaggctccagaggcattgctggctacagagcctagcgagtggccaggtggtttgcttagagcctccctgacagcgggaagagccaggccaccttgctgctacccagcaggcttcctgctgttctccacacctgccctcactatgcaccaaacagcagttgaaagccagagagaatattttctttgtcacttctgcactcttttggcctagaaaagatgagagtgggcttccctgtggtgtgcattagagccagagaaacatcttagggactgatccagagccccttctc

SEQ ID NO: 137567 - DNA, 1050 bp, Homo sapiens
catccagaccctccatgatgtgtccctgtgtgtgtgtctacagacagggaaataggggtgaagatgaaaagttgaagcagtgatacagcctggtcagaagttgttgtttgtgtccgtgtggaacatgcctggggaagtaggaaaagagcaaagagggacaaaaatgtctgtagttgtatacttgtatatgtaagcacatagagggggagaaggaccataaagaatgtgtggtgaagcactctggtggagaggggctcatgagaagtgataccgagagcagtgaagctggagatcctgagagagcccacctgtgctaagtggggtgggtggatggacagggtgagcaggcctgtgcaccagtcggagaaccagctcatcagcccagtcttgccacttccctttgctccacagaagacgtgcgatgggacacatttcccctaggccgaatgccaggtcagaccgaggacccagcagagctcatgctggagaattatgacaccatgtatcttttggaccagcctgtgctagagcagcggctggaaccctcaacatgcaagactgagtgagtgcccatggcaacaggatttctcaccccctttctctgccacctgtgggagggagagaagacaaggtgaggtgggtgggggaggtagctgtccccagtcagggcctaaatgagtgaagtgtaagccccagtccctggctgggcccttgccagctctccctgtccctagtgtggggagccagtgaagtagccacacacagctgggcttggcatccctctcagattgcattcagtttgtgcttatggatggacgtgtgtgtgtgtgtgtgtgtgtgtgtgtgtgtgcaggcacacacacacattttgggaggagaagggtccatagctttcagcagattctctaactggtccaccactcctaaaaagtcaaaaatagatgctctcatccagctttttcacgttactgaggagaaaactgaggcccagaaaggggaagggatttgtctaatggtgcatagagtaatcagtaggcctccccacactgt

SEQ ID NO: 137568 - DNA, 1010 bp, Homo sapiens
tgttctgggtccatggtcctgttgtttctatgttctgtctgctctactacactgcctttcagaggcaggtctggaagttcagagaccaagttcaaaccctggagtgttggggtatgaagtggcttgagattttgaatctttcctaccccatccctccctttgctcagcatcttcaaagccatggggcagggcctgccagacgaggagcaggagaagctgctgcgcatctgttccatttatacccagagtggagaaaacagcctggtgcaggagggctctgaggcctcccccattgggaagtctccatatacactagacagcctgtattggagcgtcaagccagccagctccagcttcgggtctgaagcaaaggcccagcaacaggaggagcagggcagtgttaatgatgtcaaggaagaggagaaggaggagaaagaggtcttgccagaccaggtagaggaggaggaagaaaatgatgaccaagaggaggaagaggaggatgaagatgatgaagatgatgaagaggaagacagaatggaggtggggcctttctctacagggcaagagtcccccactgccgagaatgctaggcttctggcccagaaaagaggagctttgcagggctctgcatggcaggttagctcaggtaagaactactttgtccccacatggacttcttttctctttggctggctcttgaggcttccttctaccctaggaagagatggaaagtagcaggaggtagccaatgtgaggcaagcctggaaggcagcctggtgcatagatgacagctggcttctcccacctcttaggatggagcctgtgagtgccagggaccactgtcaggctgctggctacctcacataagagcacattctgagaggatgacatgggtgtgagccctgggcagtaacatagaggcagaagatagcaagaagtagggagtgtgtacatatatggttctgcacgtgtttttcacttgcagtgagacagtgctttctgtgtatgtg

SEQ ID NO: 137569 - DNA, 2364 bp, Homo sapiens
gatctaaaagaaggtagccagggagaagagaaggggtagggtactgaagaatggtcaagataaacagactgcaagaactgagtctaaaagcccttgaccccatgatcccaggcatttatttccttctgtggatgtggaactttttcctgtctgtgtgttgaagtgtattcagacactactgctctcgttatgggccatagatcagcattagtgcttggtaagcacttgttcaaaacccactgatcccagcctctaaccagcccctgcctgaggaggctgaagcctaagatccaattgtcaactcccttcctccccactcctacccacccaccacccctcctccctatgctgcttcagccacttgagccagaggcattagctgctttggaggtgggtggaggagtaggagagggtcttctgccagcatcactttgctaaactagtgtcctcttgttccagggaggctgtgctggatgcttttctggatgatggcttccttgtccccacatttgaacagttggcagctttgcagatagaatatgaaggtagggttctgggggctcactgcacccttagggttctgattcctgggtggaaacagctggggtgggctggggggccctgggttggggtgtgaaggctgtttcctgccattccatggcctctgaaagtccctcagccttcctggctgagcagaacaggtagccccactgacagttgtggggctgcccttaagtgctctggaatggggtggggtgggatggggtggggtcggggagtcttaatgacattattgtgccatgttcgttgtgatttagctgctagctagagagctagaacagcagaattggaggggccttgtgaggtcatctagtccaacatcctcatgttacagatggtcagactgaggtccagagaggggaaggtactgacccaaagtcacacagtgagttattgacaaagctgaagctagaaccagatctctgttttgtttatactttattttgagtcagttgttggttgccagatactaactggtttctctctccccactgttctgctctcctctttcctttgttctgcggtggcaactctgttgttggtggggggcttggctcatgcgcgcgcacacattctcttgctctcactctcacttcctttctcttgctgtctcttgctctctctttcgtgctctcctgctctctctctcctattgcccccccaaatgggtgtcccttacaaaccagaaaacgtggacttgaatgacgtcctggtgccaaagccgttctctcagttctggcagcccctgctcaggggcctgcactcccagaacttcacgcaggccctattggagaggatgctctctgaactgccagccttggggatcagcgggatccggcctacctacatcctcagatggaccgttgaactgatcgtggccaacaccaagactggtgagggagactagccctagccctagggcctaaggcagcccaggcaggagcctctgccactgtcctcagctctctgctaagaagcaccaggcaaacacctcccgtgttaaaggtttaggtttgcccaagagggccccacggcagcagtggacaaatctcccttttccttttcttctcagagccaactaaactgggctggggcaaagtgccctgaattctttgagcagttgggaggtataggtggggagtctggggggatggggagggacagagccaaactttctgaggtgaaatgttgggtggggggctcactgcttccttctccttagatcctctcttctctctcaggacggaatgctcgccgattttctgcaggccagtgggaagcaagaaggggctggaggctgttcaactgctccgcctcccttgactggccccggatggttgagtcctgcttgggctcaccttgctgggccagcccccaactccttcggatgtaagtctcttgaattccatccggtaagagggtgaggcccttcaagcctcagggccacactgccctagaatgactgagttagaagggccctttggggacagtctagcccagtctcactcccactgacagatgggacaactgagtccagagaggggaggggtagggttttcttacctaagatcatacagcttaagacctgactgaactgagtccagtgtgggaatggataagacaatccccctagagtgcttagcacagtggcctgcacagagtaagtgcacaataaatggtagctgctgtttattattgaacccaggtcttctgactccaagcccagtgctgtttcctctattatctttccaaagtatacctctgatagttgcttagcaaccttcagttgctccctattgcctt

SEQ ID NO: 137570 - DNA, 2475 bp, Homo sapiens
ccttggacatccaccccatcccgattaagaatcctggatttagcctcactctttgtgatgggaaaacagatctagaaaaggggagacttggccaaggccatgtaactagctaatggggctgattcctacttctgccacttactagccccttaactgtttttggcatctcgtctctaagtccaataataggtttttttttctagaaaaagtgctggtaagcaggataaagcaaagaacagggggataacccagagtgaaagaggctgcttctggatatttgagatttgaaccttggagccaagccttttcctggggccttcctataatacccacaagatgaggctggaggcctgctagctgcctgcctgatcctgtggcactgcctgccttcccccctctaggctgctactttgtcctggattggctccagaagacctattggtgccgccaactggagaacagcctgagagagacctgggagttggaggagttcagggaagggatagaggaagaggatcaagaggaagataagaacattgttgttgatgacatcacagaacagaaaccagagcctcaggatgatgggaaaagtacggagtcagatgtaaaggccgatggagacagcaaaggcagcgaagaggtggattctcattgcaaaaaggccctgagtcataaagagctatatggtaggtgttttggagggcagaaagcggcccatgagcccagaaggctcaggcttagggttaacgctgtttatttccctggctcagcatttcctctggggctgtggtgaatcttagcttaaaaaattactgtcacaaaccatcctcctggctagtttccatagtataatggctgtcacatttgcctcacaaaccatcttgagccctgtgaagtagttggggaaggaattctagttcctcaattacaactcaagaaatgaggtgagagaggctcagaatcccatcaggagaaggggtctgggctggcagtcctatctgtctccccattctgttttcagaaagagcccgagaactgctggtatcatacgaagaggagcagtttacggtaagaaagtgccctggacttggtgtgctctcatctgccccagccatttcttccctcttgccagctacctgagagaagtcttgagaaggaatttgaaagaaaagtgacaaagcgtgagggaacttctcggaaagagagaggggggaactaggaaggagacaagaggagcagagtccaattggctgatcctccacaccgatggaagggaacagatgatgaagtttgcggataatctgccccactgggtggtagggaacaactgggaatgggtagttgcgcagccctgcaattccgcagctgaccagtagatggggcccaagagcttccctaaatcaggtgagctggaggggtgctgtttttagggaggtcactcagaaaccatttagctcagcccttccttttcacagattaagaaattgaagccatggatgagtgaagggacaggcccaaagtcacatatacagttaatgatagaaccaggattagtacctggatctcccagttatctttcttctgtaactcattgcctctcctcatctctggccctttggcctaagagtctctatctccagccaaattcccccattgaacatctcagtatttacccacaggaaattcagttggaggaggaagggagggagaaggaggaggaagtctcacatttgagagtcaggctatttttagttgcaaggccagtaggggagttgtgggcccccccctgcatgccctgccctgtcccctgcagggcagtgctgagaggtcctatgggaagggatcctggaggggtggaggtgggttgcttggctgaaccagccttctgatgggaccctctttgctggcaggtgctggagaaatttaggtatttacctaaggccattaaggcgtggaataacccgtccccacgtgtagaatgtgtcctggcagagctcaagggcgttacatgcgagaacaggtgtgtaactaggtaaccgggagctgcgtattctctaggatagagggtagcagcctcattgaaatcggtttccctatcctagcttgccaacctctgctgtacaaaatcccagggataatcctgatcccctccacagtgaccctacatttggcagaactgtctgccctcaaccctgccaacttccaggtgggggttgcctatactagaatggccagaggcaggaatgcccactatcatccatctgctggccagctgctttcctgtctgtcgggtggcatgtggagctcttgacaactaggaaaatcccttgataattaccacctcactcactgcctagcccttgtctaagtttgaggtaaaagatatatgtatggtgggcactgctagtcttgtcttgttttttttttattttttatttattttttttgagaaagtgtcttgctctgttacccagg

SEQ ID NO: 137571 - DNA, 1114 bp, Homo sapiens
aagcaggggtaaaggatactcagggagaaggacaggctagagggaggctggagaacgtgattgttaatgctcattcacaggtatttctttgttgtagaagggtggttggtggttaggggaggtgtgtgccttttatgtttctgattttcttttctttttttgagacagagttttgctctgttgcccaagctggagtgcagtggcgtgatcttggctcaccacaatctccgcctcccaggttcaagcaattctcgtgcctcagccacccaagtagctgggattacatttgtatttttggtagagatggggtttcaccatcttggccaggctggtctccaactcctggcctcaagtgatccacctgccctgggctcccaaagtgctgggattacaggcatgagccactgtgcctgacccacttttctgattttcaatacctcctccatagagcagtaaaaaaagaataagaagagctgtttttttttcttggctctgtcactgtgattggaatcttctttcaggacctcagtttctctagttgtaaaatggggcaggaggtggtcaggataattaatctctggctcccttccagctttaataattattttccaatttctgtactcacaccctcccctgtaatcaggtaaatattccggattggattgttgaccttcgccatgagttgacccacaagaaaatgccccatataaatgactgccgcagaggtgagtcctcagaggttatacctatcacagttaagcccaggggcctgggcttggtggcgctgagggtagagggataggcaggagggtctccacctggagtcaaggctgggactagggtgaaagaagtgaggcctcgccttgggcacaacatttaaagtggggagaagtcaaaagttccataatcaagataaataacatattaatgtggaaaaattcatgataaacataatatcaaaactttaagtaaaacgggattagtattactgatttctccttttgtttcagcttccaacatggcttggcatattttgataccttgactacagaggtttttttgcctgcccttaagttgttttttgtttgtttgtttgttttgagacgagtctcac

SEQ ID NO: 137572 - DNA, 1012 bp, Homo sapiens
agttgatttgggggtgaaagaaaggggtgtgtccacacaactgttgatggacagtctaccagttaggtgtcctgtatacggcctagtcagctcctcatgccctgtatactgttggatcccacagacattaccgtgtctcctcccaccttcttgttttgtgtctgttcatgctctcttgaaccagaatatgatgggtgtagcctgcaacaacctaggttctgaggtggagggtggaccagtgtaagggctctttatgatggtgctggactgtgaccctttaggtcaggcaacgaactccctctggcagtggcttctactgctgacctgatacgctgtaagctcttggatgtaactggtggcttgggcactgatgaacttagactgctctatggcatggcattggtcaggtaagacctgcatggggtaggggtggaggttggctttggggactggaggcaggggaggcatgtgataagcaaaacttggcttcaggtgttacctgaagcaaaaccctgcgtgtacctcactgtggatcagcctgtgattattgcttgacttatcagcttttggtaccctcgtcaacgcattcctctttttcttcctttttcctgaaagccttctcttccatttttctttctatcttggaatgtggaggaagggattcagaccaggtgatctctgtgggtctcttggtggtctgatattttttcttacctttgaattcctcacccagaggaacttgtctgaatggctcagggtcctcgcctgtgatttaatgtggactttccaaccctgtccctgtctattcctagcactacccttttccccttctctccctcatgaacactgaaagattgctgagttatggaagtggagacatgggctgggaattcctgacttacaaagtgactcataatggttctagctgtatacacgtcggaaaaaaaggttgctactgagttttcatatctgtcaaagtctttgcttatctatttccccttgtctgccttga

SEQ ID NO: 137573 - DNA, 1128 bp, Homo sapiens
tgttttactaggttaggtcctgattcacggcaataaaaatatacttaaaatcgcattttcagttcactggatgactacaatcaagctgccacccgccgaggggagcaaaataaaattcctcttgcagtgaagacataccgcttccggtctggtacagaagccggttagcaaccaggaaattggcggaacctagaggctgaactcttgcccctggagggtttgctttgtgaaaagaacacttccggccggtgagtttttaaccccgcatgtcattaggtcggcgcccaattctgacgttccgattggccatgctgacgctggaaggcgggcttgcgtatggggtcacgctctcctattggctgctggtgcggtggcggttcggagtgagggtagcacgctgagctgaaggctgtgcggagcggcgcggcacagagcctgttgttgagctcagtatgtcgtgggaatccggggccgggccaggtctaggttcccaggggatggatctcgtgtggagtgcgtggtacggaaagtgcgttaaagggaaagggtcgttgccactctcggcccacggcatcgtggtcgcctggctcagcagggccgagtgggaccaggtgacggtttatctgttctgtgacgaccataagttgcagcggtacgcgcttaaccgcatcacggtgtggaggagcaggtaaggtggcgggttcggcccttttgcctgcgtgctggtggcgctgcacctcttcctttgtcgagtttctataaggccctgttctccagtcttcccctaagtcgcctaaagttgtccctctcccaaatgcctgggggaacgcggcagccatctcttgcgctaatcccgttagcggaatggaaagtaaggggttgtgcctcaacaattctcttgttatatctgtgaggtttacccattacctccaaaaagtgactttctcccaacttggagaggatgccggagggactagtgaggcctgagccagggcttaaggagtagattagtaccctagggtagatttccgattccaatggggaggaagtcttgcctgcaagacagtgtttgagtggggcgcctcagtccagttggtaagattgagttgggagccgacttacaaggga

SEQ ID NO: 137574 - DNA, 3642 bp, Homo sapiens
tatatatatatatatatatatatatatatatatatatttaaaaaggcctttccccctccctaccttctttaatttttttcttttaggatcacaaaggctttgaggctttcttggatttcctaaaaaaagagtgttttgaattttcgagatgttcttgagtttctggtttccttccttgggatttattagatgttagtattgaaaaggctctccacaactataaagtccaattcctctcattgtatagatgatgaaactgaaactcatgttagggggagactaacctagagtgatgcagtatgccagttgcaaaactaggacttgaatctaggtcttagttagagggtcagtcttggtgaaacacctctttgatctgctggggttttagccatagatcaacagatcaggggaaaggcaatcgagtggtcatttgatgggaccatcaatgtgagcagacatagagcctagatccttgaagtatttgaaggtgtttgggtcggcattcagctaaactttaacagggactatgtggactgtttattctcctgccattcctagcattacttgagccactcgagtggcactaaagtggtacttggtaaataggagccagattcttagtcttttaacccttgaaccagccctgcctacagacttaagtggggggaaaaggatcaggaagagaggtcatatgagagaggatcctgcatctctccacttgggttcttcagttcacttggccctttgtgaaagtgtagatgatagagacagagcaggaaccatcttgggaatttcctttacgcttttcttttaacagccctctgggtagggagggggctggtggggcaggaaggcctttgtgggacccacaccaactaatctatgctctctcgtgttaggcttggagagggaaaggttgctctgtgagtcagtgatagaagtagtattgatcactaatcttctaactttccattctctagctgcctgcaacagtagcttgttttagggtgttgttcttacttttctcttacctcctcctcccatgaaactactttaccgaatgatggagctggaaaggacatttggaagtcatctagtctatttcccctgcctccaaatctaattctctctggatgagataatatgacagctacaattattctgaactctgttctagtgttgcatggcaacagcctgtcttaggtccctttgtatctttctgggagtttcccccactggaatttctagactcagggtccccagaggggagaatatctggctaccaacactaccagagttaggcctttcataaccatagctgctggaaatttggcattgttacagattgctaatagtctgtctctaatctttcaaagatagaattgaatttatcatgtgcctctttcctaactcagaatcttctttccctgccacctgctctattactttgcttgcaaaaaggaaaaaacagggtacagatgtggtctcctttgggatagtctgttggttcaagtgaagggggtggtcttttcatgactgactggctttgctgtccatccctccttccatttcatgcttgagagagctgaaaaacttttcaattccaggttctaatctgtggtatagaagttgtcactttggaggattagctcaggattccatgaatttggaaggtgggtgctgggaaatggaaagcatcactgaactgagaatttttcttctctttccatataagaagaacttctctcctgtcctcagtaaagtgagccaaatgaagtgggactttaggcaagtcctttcttcaggccctctgtctctccagcttgtcatgagggagctgtaccagtgatgggtaaactctaggaatccctccagtactgatgtttttgagaatcttgatggtataagagcattgagtctcttatatgtatgttcattccttcagacattctttcttcaacatttgggtaccttctatgtgccaggcagtattggaaatacaaaattgaacagcgcttattaaaatgtatcctcttgtcccattatacttcttgagtgctgtttcttcttaagtgctgagttcagaatggactgtttctcacatgggagttggtttgtttcattagtagatccaagaagaatactggcttgagtactcttggccatttcttcccgagtcatgggagagaaagggctgtgtctttccttactgtggaaagaaataaaccaagtgagagtatattatgaagactgtgggttgactgaaaagctttggacaaacactaaaagcctcatagattttcctgccattcttcccacatttttcagtgaccgcctgcctgatagtagaatagtcctttttatttctgctgaaaggaaggcccggaagctactagattatgtttcagattttcttctaacatggtgagtgtggtagttagatatattggtagatattgaggccttcctaagggctcctaaacaaacctcataaagtatctaccaccagtgagctgaggactggctattgtggggtacagctttttttttttttttgatacggagttttgctgttgttcaggctggagtgcaatggcacgatctcagctcactgcaacctccacctcccgggttcaagcgattctcctgcctcaggctcccgagtagctgggattacaggcatgcgccaccatgcccagctaattttgtatggggtacagcattttaaaggcatttgcatctagggcaacccagagcttccctagccttaagctttcctttagctggttgttctggatgggcagggtttctcacaggagtgttttgaaccatggaacaactgagctggccttaaatcttctgcctcagcctttatcttcttgatgggggcactaaagtccagaaaagggaaaggatttgagtgaactggtgatagtgccaggactaaaacctaacttgcttggctccagtgtaggggagggatggtgaatgcctaccttctaaatggcactcactgtgaggtgctcagtgtcttctccctctgtgctggtggtgacatgaccgtggagttatggccatgggaagagcaagttcctctgagtgtgtagagctgatctcatgggtttctttatttggaaatggctcaggctctgaccttgtctcaggaactctttgtagcacttcccaggaaggtaagtgttttgctttggcttgtgacgggtggtggaaggcatatgtgtaggctgaagggaggtagagagaggacactagtcacattttcctgcttgagactaggccttgctgtcctaagaaactttagagagtaatttcttcatcgtattcatagccagaggggttaggcagcttgttcgaggtcacatatagttggtaacagtattgaaaggagaacttggatttcctaattcccaagttagtggtctcccactggacttggctgtcttagaaggatgactccacccagagagcacagacttccagagaactggctctgtggtgattacattaacaagatgggtacaatggagttcccctaaaatggttttgctatagcaagtttttctgggatctccgatgactgtcttctcttcctgtctacccctcaccccagttccctgctttctc

SEQ ID NO: 137575 - DNA, 1100 bp, Homo sapiens
agagggtcttttcttcatgcttacacatgaactaaaccaaagaatagagcttggcaataactttatgtcagcagcctagaaacagcttttaattctctcattgactttgctataaaatcaggtatttgggaaagggtggagatggcagggaggatttctcagtgtgtggttgttagaggtggaggagtatgacgttttctggccagggcacagctgcagcatctgggtcttgaatttggagaaaaggccttttgggcgactttcaaagcacagccctttgtctgtgcctaatgacacagataccagatctgatgctcctttcaatcggcttgttgtggcataaggtaagtgttgacatagctcttaggccactaatatggcaaatggctctgtgcttgcttagtagaactgttttgccagttatcttctgtgattggtgacttcgaatattgaagtttcttcccattcctggcaacccttctaccttgtgggaatttgatagatactttgtgcatccagggtagtgatcagggcctaatgagagaagagttgagatatgacaatttggttgtacaaaacaagatataatcctgaaaatttttttcctgggtatatatttgggaagtgactggggccaaggcctaggagggggaacaaggcatacctgtcaggcttgatcagtatttctttccctctctttagccttggcctccattaaatacctgagaaggatcaagtcttatttttctcaagttgtgtgtttagataaggttcctgatcttactttcgtgatctaatctgccttccctccaacccatgatccatttccttttttttcttttcttttttttttgagacggagtcttgctctgttgcccaggctggagtgcagtggcatgactttggctcactgcaacctccatctcctgggttcaagagattctcctgcctcagccacccaagtagctgggactacaggtgtgcgccgccacgcccggctaatttttatattttttttagtagagatgaggtttcaccatgttggccaggctggtcttgaactcctgacctcgggtgatctgcctgcttcagcctcccaa

SEQ ID NO: 137576 - DNA, 1680 bp, Homo sapiens
ctttctgtctgccatagcctgggcattttcctaaggttgggagtttttttccttctggtcttaggccagttgccagaggaaaccgatgactaaaggcttcctccctgcaacgtcaacttctggaacctttcctgatgattcctaccagtcaagtctgccttatttggctattttctcccccctcaagttactccctctccttgccaccccacctcaactagtcctctgttctcctttagtacagggaatgccttcttcaagtttatacaataccacctgcaaacttcttttcttcttgtttagagtcctaatataggggaggagtggggaaggagagaggaagatgggagagctctggaatgactgtgatttctccaccctgctttcttatctccctttatcctcttggcactgcctggtcactcctctacagcttcttacctagatctctgacagcctaggagtggtctcgattggcctaaagaggttcagagtgtgggggtgggatggggctagggctttcagcatttgaaactatttctttggagcaggtaaagccttccagttggtaagtctagttctttaagtatgcctgttgtatgcctagccttctcacttggctttcctgggtgggctgagtctaagttccctctacctccccttcccagtcctgagctgtctaactttaggttagaagagctgagcttttgacacttacagcttggggcacttgtctgggtgtctttaaaaataccttttagtaaaaaatggtacaatggaaagaagagtgagatatttggtttttaatctctgcctgtgtgaccttgggcaagtcacttttatgaggcttaattttcttatctacaaaatagagacattggctttttctgacattctgattatttgtgcccagtctttaagaggctaggaaaggggtcttggaaagcgtgtagcagagcagagtggtgacttttcggagaagcttccttttcccatttagaatggcattgagtgtgtcattttctcctctggctatcaacatgtaagcagccccctctatttcagtgagctctgctctgggatatactgaatctacctaccagagagctcactgtggagattctggcttggagagacaactgttgactacatgccttgggtggggtcttggagtccagcctgcagactacagttgctggctatttttggtcatctgtgactcaggaagaatagaagacccttggattggtcattgttccatcagggaaagggaagacaaagaaacaagctaaaactgaggacatatgagatttcacttcctttactccctcccccacaacatccctttttgtagggctatgaaattgcttttgactgagtcttaaattgctaagctccctttccccttcctctatctgaatcattgttgactatgttgcccttggacggggagagctaggtgatatgggcttgggtggagcaaaagggagaatttctagtcaggaagattgccacacacctagtgttgggctttcaactgatcctgtattttgtaaatatggtttcctttggtattagtcctggagatcaaaggagagggacttctgaattttctgtgagggcctacaaggctgatagggaataagcaagtttatgggaaaggtgtacccttcactggat

SEQ ID NO: 137577 - DNA, 1097 bp, Homo sapiens
aaaatgggtttaataatgcttaacttgcatgtgtctcttgtccagtgtgctggtaaatgtttaacaatcaactcttcggcaaatccatgatttttactgtttgccaattcccatggtataaatactcccaccatggctgatttcaggttaccaatatgcagtccttgatggaggagttgggaagagatgtgcatgatcagctctagtgcaagctggttctagtgcaccattgctagtcacacctattttagactcctaccctcaccctccaacatactcacatctgtatgcaaatgcagcatcctctcaaccatgcctcttcttttcctcaagttccaagagcatcaaggaaagagagagcttcatttaaggtctgctccttgcctgaaagttcttccaggaaagagtgaatgtggagtgtttaagacgcagagaactcaagagggctttgagtggggccctaattatagcattgtgatcatcatgctttggctgctgaagtatctgaactgtctgttttctcccactgtttgattcttagctagatgggaggatggttgaagatcctggacaatggtctgagggtctggtgcacttagcgttctgattgtaatttcaaagtctcctcctcttcctgcctgcagaccttactttgctgggtgctaacctcaaggttcctgtcatggggatctctgggccagaaagcattttggatgaccagagatccctggtcctgttctctcatttcaacagcatcaaggccatgtgttgtttctttgaacttttcagatggaaagaatcacctgaggcatttgttaaaatgctaattccccagcgtcttctctggagagtccatttcagtaagcttggggtggtgtccagaagtctggactttttgaccagtgccaaattcttatggtaagctaagtttgggatatacctcattaagcactgcacaacactcctgccatggtggcatcattatgcccacgttacaagttgaaatttaagagttcatggtttattattggtagacctggatcttgagatcaggttttcagaatacaaagctatgttcctcttactacagagacatt

SEQ ID NO: 137578 - DNA, 1031 bp, Homo sapiens
tctagcatagccttcaatgccctccacttatcttcctagactctgccctctcttcactttgcaggcctcattcaccctggagtaggactgacttctaaagggaccatctgcatccttgcctccttctgggccatcatacatgttgttttctctacctgggacatttgagtgctcttgtgcctaccctcacagtctttcttttccacaatccagcttattctttggaaatcagtgcaaacactactttgaactgtggttcctaatttccacgaaaggttttctctgttcttctattatggcacttttcagggtctcccttgtacattttagtttttgtgtttttcagtaagtgccttgagatcagggaccggttctactggtctgttccaaccatagttccttaaacattgtgttccattaatattgggtgaattgaaatgaatttataggaagctccttaacctggggtcctcagacctctatggggtccatggacagaatttgaagtgggaaggatatatgaacttggatggaggaaaattacttatttgttttttaccaacctctcctttgtaatttagccatttgttcaattataatgtaggcaaataaaaataaaaataaaaataaaataaaggcagcaataatagcagtacccatgaccttgttaccaactcttaggctgtggagtgttttcctggattctaccctttttttaaggtttcttaataatagaagtttatacagaaactatctaatgtacttttttttttagatgaagtcttgctctgtcacccaggctggagtgcagtgacgtgatctcggctcactgcagcctctgcctcctgggttcaagcgattctcctgcctcagcctccagagtagctgggactacaggcgtgcaccaccatgcctggctaatttttgtattattattatttttttgagatggagttttgctctttttgcccaggctggagtgcagtgacgtgatcttggctcactgcagcctctgcctcctgggttcaagc

SEQ ID NO: 137579 - DNA, 1060 bp, Homo sapiens
ccccctaccccatcctaccacaccccctatgtcccttgggtatatgcattcattattttctgctgcttaaggattttttccatgggagctttgagaaatactggctcagatccgataagctggctgtcgggtcaaagggagccaataaagaattttctttttcctcagggataggaccatttctcagagtggaatgataaggaccctagtcactggagccacagaggttattcctggaactggaagctagatgctaagctctcacttgaaaataaggtttctctttcctctggaatggaggtctcaactggaagcaaagctggaagcaagaaaaacttggcttggaaaaggggtttagagttgcctgataaaatggttcacagcacccccatgggccttagagatttccttgtagcctggggtcaggagtcatccatttttgttctttgttctttttcagtttcaattctgatttcagaccatatttccttcccgccacgtcctcaatttctcactttgagacttcagtgcaggctgagagatattactcatctctttaagccctagagcctaaggaagtggaacatttatgtttctgatttctttatgttcacaaaggaagagacagtgctcagagagatcaccctccctccccccagcactgagcctgaattctctctttttttttttttgacatcactttaggtattactttgcccaacttctcctgagttactctggatctcagaactactttagtcaccatgatccttctctctctctctctcttttttttttttttgagacagagtttcactcttgttgcccaggctggagtgcaatggcgcgatctcggctcactgcaacctctgcttcctgggttcaagcgattctcctgcctcagtctcccaagtagctgggattacaggcatgtgccaccacacccagctaattttctatttttagtagagacggggtttcaccatgttggtcaggctggtcttgaactcctgacctcaggtgatccacctgtcttggcctcccaaagtgctggcattat

SEQ ID NO: 137580 - DNA, 1039 bp, Homo sapiens
tataggcacgcaccaccatgcccggctaatttttttgtatttttagtagagaccaggtttcaccatgttagtcaggatggtctcgatctcctgacctcatgatctgcccatctcagcctcccaaagtgctgggattataagcgtgagccaacacgcccagcccattttatgttcttataataaaatacctggagctagttactttatacagaaaagaggcttatttgtctcctaattgtagtggctgtaaagtccaagagcatggcaccagcacctgctcagcctctggtgagggcctttgtgctgtttcataatgtgacaaaaggtcaagtaattcacagggacaggggtccccatgactgaaacacctctcattacatactacctcttaatgattctacctcccagcactgccacaccggcaatgaagcatcaacatgagttttggtggggacaaaccacatccaaaccatagcactgctctactacttctgttccaagtctgttctccccccatgacctaatatcctggccctcatggtccatcttcttctcttcagcatcttcagtgggtcttctctctctctctctttttttttctctctctctcagctggattgtttcttggatcttgccttttcccaccaattgcatctggacacactattcttctgcaaccctgtggaaaatgattagaactgttaattgggccttgggccctgtttagatctaggatgatatacaaggtgctttaaaaaaatcttttctgttcacgcccacccactaccttcatcctctgcaaaaagccaatattacatttcaacataagcattcacatttctccatctgaaactttctggcagttccagctgcctattgacttagagtcagggaatcaactggccattgaattctggaagccttttgaactttcctcattacctcccacccccactgatcttttctaaacatgtttctaattatccacatcagcaagaggtagctgggaaatgggattgtttttattaaccatttgcaa

SEQ ID NO: 137581 - DNA, 1887 bp, Homo sapiens
ttaccaggggagttgccacccagctgtctaagattatgcaaattgatgatctttcagtgttttctccccaccctacagccactccattacccttaaaacctattttttgagagtccataacccttactcttcccaggtgactgcccaggatgtgcggaaggaaagccccctgctctttaagttccgtgccaagttctaccctgaggatgtgtccgaggaattgattcaggacatcactcagcgcctgttctttctgcaagtgaaagagggcattctcaatgatgatatttactgcccgcctgagaccgctgtgctgctggcctcgtatgctgtccagtctaagtatggcgacttcaataaggaagtgcataagtctggctacctggccggagacaagttgctcccgcagaggtgaggtggttccctgccctcctttgccttggccataaggggctgcagcccacagctgaccaatccctgcctcacagggatgccagatctgttcttctccattggggtctgtctgaagactgtgttatgctgctcaagagacatttgcatatagtgtcagactctgttgttgtttttctggctttccaaataaaaagcctttttgttttccctctgtctacctggttacagaactttattaccctggaggcaggtgcttatatagaaccagagattgagtaatttctttcacccatccctggttccattttctcagttctttttactgatttagatctcttatatcagaagttcacaggggagagagagaaataagcaaaccgaggacatggggagctcaaatagtcttttaatattgacagctagtgtacagagctttccccttttgtaaacttcaaagtcaaaagctctaaaacactcattatttttgtttttgtatcacaataacacacaaaatgaacaaagcaggcaatatccttatttcctggcgaaggaaatagaggtgcagaggtactcacactgactttccccatctggtgcagctcatctgaggcagagccagagccagacctggaagcttagcaccttaatattttaacactaagttttttcctactatacccaatggccatttccatagtcttttggattagaaggaaaagctttgcttcattctgggagcctcagtcccattggagttatggcatatatgtacaacacacccataagatattagggatagtgcttgtaccctggggactctacctgagtcattgccatgatatctgagatggcatgtttaaagcaaaccttgtttataatctagtaggtcttggaggttgggcctgttggtttttctgaaagccattaggactcagttcattgctctgtagccaaaggccatcctttcatttctgagcagtattcttataaacatagagtgttggtcctaagaggatctaggagagagtgtacctgactccatgaggtccatccctactgttagcccctaaagtcagcacaaactcctgacacattactgctatgcttagggaccacagcacatcatttgatttgtggatgaaggtacaaaggaaggtgttccccttgttgtttttgatcatccattcttgtagctctcttacctttcaggcaattccttgtgtctagtttaacaccttcttgctataatttcggtctgcttccagtgtgacctcaattggctgactctacatcctctttgcatcagccccttagaaagctaaatgggcttcccttctctcctgcacagggactttgtgctttaaactactcatcacccattgtctttccagagtcctggaacagcacaaactcaacaaggaccagtgggaggagcggatccaggtgtggcatgaggaacaccgtggcatgctc

SEQ ID NO: 137582 - DNA, 1050 bp, Homo sapiens
ggtaagggagggtggcccaaactcacaatccctaagtgtgttgggaaggttgggttgagagacccagaggcagcaagccttggaattccccaggcttttttttttttttttagatggagtcttgctcttttgcccacgctggagtgcagtggcgcaatctcagctcactgcaacctccgcctcctgtcttcaagcaattctcctgcctcagcctcctgagtagctaggactacaggcgcatgccactatgcccagccaattttttttgtatttttagtagagacggggtttcactgtgttagccaggatggtctcgatctcctgacctcgtgatctgcccacctcggcctcccaaagtgctgggattacaggtgtgagccaccgcgcctggcctccccaggcttttgtggagcgttgttatcctgttctatccattttatctccttccctagtgctatgctggaaaatgagaagaagaagcgtgaaatggcagagaaggagaaagagaagattgaacgggagaaggaggagctgatggagaggctgaagcagatcgaggaacagactaagaaggctcagcaaggtgaggcttggagtcaccttggagattggatttttccaggcctaactctgagctggagaaccttctgcctgagctgtagactcagacaatgtagttcaggtgtggctacagactagaagaagaatgggcaagaagagagctcagaactttctgccagctttgtcttggggtggatcatttccaggaacgaagctattgtgtcgtctttatctctgtgctcttcactgccttctcccctccttttctgctcagaactggaagaacagacccgtagggctctggaacttgagcaggaacggaagcgtgcccagagcgaggctgaaaagctggccaaggagcgtcaagaagctgaagaggccaaggaggccttgctgcaggcctcccgggaccagaaaaagactcaggaacagctggtaaagctgtagggtgggctgggattatgggaactgaactttcttccttgtctg

SEQ ID NO: 137583 - DNA, 1455 bp, Homo sapiens
cttttttccttgttcagatagctttgtgacacttgagtgtctttcctgtacttgtcctgggaagactcttagtcgaatcctgagcattctaggatatcaggaaaggatctgccacttcaggaagtgacccaatgatggccaaagctttactgaggcccccagctgcatacttgccaagaggggcagggggagagataatgaggaagggacagagatggcatattgtttgtcttcaagaggcctacagtctaggtgggggagctctgacttaaaaggaagtggtggtcagggaagatgggactggaatgaagtagtctggtaaaagagtctctgaggcagcaagcaagtggagcagtaggtcccttactagtcccccaggggacttgggttgaagacacctgggtcctgaggaccagaaggcccagctctcacaggcttccaatttatccgtaggccttggaaatggcagagctgacagctcgaatctcccagctggagatggcccgacagaagaaggagagtgaggctgtggagtggcagcagaaggtaagacacagggcctaaagcaaagcattgaaggaatgggtgccatatgcataggtaacagctccttagattccttatgttttggctccctccctctttcatacttcccacagcaggcagcatgggagaaggcactcatggtttcgtcaaatacttactggagttctctaatacctctaggaagttggtacaattgctcttgttttatggatgaagaaactaaggatcaggcagatgaagtgccttgtcctacctggtgcctgcctcttgccagaccgttctaggcatatacaggatgccacagtttaactggtctcactgacagtctttctctccttctgtcactggacaggcccagatggtacaggaagacttggagaagacccgtgctgagctgaagactgccatgagtacacctcatgtggcagagcctgctgagaatgagcaggatgagcaggatgagaatggggcagaggctagtgctgacctacgggctgatgctatggccaaggaccgcagtgaggaggaacgtaccactgaggcagagaagaatgagcgtgtgcagaagcacctgaaggtatacaagtagggccaaggggcaaggaaactatatgcattgatttagtagcccatggcattccctagaccatcatgggggataggtataagatcctgtcccagtgttgtatgggagcccaagccgttcttaagtgacagctttaaggataggcacctctcacttattaatcagaccttgggctatctcttccctttttgagattttctctctgccccacctcccactcactccattcacctcttacattaagaaaatatctagctgacaaaattcccacctgaatcttttgtatgttgttctactcttaaaggatacccattatcaactgg

SEQ ID NO: 137584 - DNA, 1021 bp, Homo sapiens
ctctgtgttcccatacatcctcacaggccctcacttcggagctggccaatgccagagatgagtccaagaagactgccaatgacatgatccatgctgagaacatgcgactgggccgagacaaatacaagaccctgcgccagatccggcagggcaacaccaagcagcgcattgacgaatttgagtctatgtaatgggcacccagcctctagggacccctcctccctttttccttgtccccacactcctacacctaactcacctaactcatactgtgctggagccactaactagagcagccctggagtcatgccaagcatttaatgtagccatgggaccaaacctagccccttagcccccacccacttccctgggcaaatgaatggctcactatggtgccaatggaacctcctttctcttctctgttccattgaatctgtatggctagaatatcctacttctccagcctagaggtactttccacttgattttgcaaatgcccttacacttactgttgtcctatgggagtcaagtgtggagtaggttggaagctagctcccctcctctcccctaccactgtcttcttcagggtcctgagatttacacggttggagtgttatgcggtctagggaatgagacaggacctaggatatcttctccaggatgtcaactgacctaaaatttgccctcccatcccgtttagagttatttaggctttgtaacgattgggggataaaaagatgttcagtcatttttgtttctacctcccagatcggatctgttgcaaactcagcctcaataagccttgtcgttgactttagggactcaatttctccccagggtggatgggggaaatggtgccttcaagaccttcaccaaacatactagaagggcattggccattctattgtggcaaggctgagtagaagatcctaccccaattccttgtaggagtataggccggtctaaagtgagctctatgggcagatctaccccttacttattattccagatctgcagtcac

SEQ ID NO: 137585 - DNA, 1277 bp, Homo sapiens
ttctcatcactcccctccaaagaggtgactgggccctgcctctgtttgacaaacctctaacccaggtcttgacaccagctgttctgtcccttggagctgtaaaccagagagctgctggggattctggcctagtcccttccacacccccaccccttgctctcaacccaggagcatccacctccttctctgtctcatgtgtgctcttcttctttctacagtattatgtactctactgatatctaaatattgatttctgccttccttgctaatgcaccattagaagatattagtcttggggcaggatgattttggcctcattactttaccacccccacacctggaaagcatatactatattacaaaatgacattttgccaaaattattaatataagaagctttcagtattagtgatgtcatctgtcactataggtcatacaatccattcttaaagtacttgttatttgtttttattattactgtttgtcttctccccagggttcagtcctcaaggggccatcctgtcccaccatgcagtgcccctagcttagagcctccctcaattccccctggccaccaccccccactctgtgcctgaccttgaggagtcttgtgtgcattgctgtgaattagctcacttggtgatatgtcctatattggctaaattgaaacctggaattgtggggcaatctattaatagctgccttaaagtcagtaacttacccttagggaggctgggggaaaaggttagattttgtattcaggggttttttgtgtactttttgggttttttaaaaattgtttttggaggggtttatgctcaatccatgttctatttcagtgccaataaaatttaggaagacttcacagtgactcaatcgttctttgtggtatgagtgggtagctgtaagatatttcactgcagtttctatttatatattaccttcttatctttggtctcatttcatctatacctcagttctatggagaggggtgatatgactatccccattttatataggagagaatgggctcaaaaaagtataataacttcccaaggtcacaggactgtctaacttaatagtctgtgccctttcggtagttccaggccaacttttctactgtgggtgtggatcctgcattgaccatgtgatgctcctggacttgcctggcattgggacctaagaggtacttatttgtatctcttgatttctcttgggatgctcaggccctgtcctgcctctttgtcaggaaggtcttcaggcttttcctgcctcct

SEQ ID NO: 137586 - DNA, 1053 bp, Homo sapiens
tccagccaaattctcctgacttggaggttgccttggaaactgctggggaaagccataatgtagtacagcagaccactaggtattttagtactccacaagccatagatttattcctaaagtactccacaaacatgcaaccttaagatgtgtgaacatgagtgaagttgctattactcaatttcagtctgggcactgactgaatccttcctctcccctcccctccctcataggatttttgttgtttggaaaccatgtgttctggtttccattatgcctatccagtcaatttgatggagggtggggtatgcttggagcctactcagagaggtttctttcttttttcctattagatcttcctggagaaaagacattttaataaccttggctgctaaggacaacatgatagaagatgtctctggctatagataagtagatctaatactagttcggatatctttagggtttagaatctaacctcaagaataagaaacaaaagtacaaattggtgtgatgaaggtatattcctactgtttgggattgggctttacttattaaaaaaaaaaaaaaaactctgtcgaggccaggtgcggtggctcatgcctgtaattccagcactttggaaggccaagtcaggcagatcacctcaggttaggagttcaataccagtctcgtcaacatgatgaaaccccatctctactaaaataaaaaaattagcctggcatggtctcaggtgcctataatcccagctactcgggaggctgaggcaggagaatcacttgaccccaggtggtggaggctgcagtgagccaagatagagccacagcaatccagcctgggtgacagagccagactccgcctcaaaaaaataaataaataaaatgaaataaaataaaataaaaactctatggaggtgaagggtgaaggattgaggtgaagagtgaagggttatgctgtaacatacttcattgatttcctcagccctttatggctctgtcttactatgccccctattttgttggttatgctaatatttgtggaaagaggtcttgcatt

SEQ ID NO: 137587 - DNA, 6670 bp, Homo sapiens
tttaattccatctgcagagtctagtttgccatgtaacttaatgtacatagacataagaccaggccatgaagattatggcaagggagatggtatcaaaatcctgtttcccacaaaggtttctttttctctagagaaattgattattttctctgatccagtaccagctagcctcaatctgatacctgaatgtaagtatgtttctcaactgtgtcacctcagcctggtgctaggtgctctagaccccagggagaggaaggaaagaatcagctcccagacctttacctgtcttgtactcagtacccagtgcccagctgagaagagcccctgcttttgggtaacccagtggctttctgcttcgagttgcaggaggtttgctgcagtttgaggctgataaaacagcaaaggaggaatctctcttccccgtgccacccagcaaggagaccagtgctgagtcccaagtgagtgagaacatctttcagacccagccacttaaccctatcctcgaggacgactgcagctcgactagtggcttccccacacaggagtcctttaccatggcctcctgcacctcagagagccactcccactgggtccacagccccatcgaatgcacagagctggacctgcaaaagttttccagctctgcctcctatactggagctgagaccttggggggaaacacagtcgaaagcactggagacaggctggagctcaatgtgccctttgaagttcccagcccttaactctaatgaggtgagctggaaaggtggatcagaaaaaaacaaaaaaagcaaaacagaaattaaggactaacctcaaggaattctcttttggaatagtattattcactaggagtggaggaacagcagcaagctaggaacactttgggtggaggggcaacagtggtgatgctaaacttttaagccagacagatatcacacttctgggtctacaattgtcagggaactggcaaggttgtcatgataccagtctctccattctggtctttcgtaagctctctcagggccccactatctaatggtcatattcaggtatctccctttatgtgtgcaagcagcatagcacagtagaaaaagatatacaagccttgtcatctggaaaccctacatttcaaatcaaccttcattccctaataactatacaaaccttgtgtgtatgtcacttcattttacattttacagaggcaggaactgagacacagagagggaaagttagtttctcaaagtcacagggcaaattagtgggctagaactgtgcaagaacccaggtttgggggctacattttagagttggttcaactccaccattgcaaccatttgatagccaatgttactttctcaaagcttatgtagcatgaggtaggagagtaggtagattcccagttttcaactaaccaaatatcttgcagtgcccacttccgtatttcttcagttaatacattttcagttctcccaatgacttccctgctccctgcatccaacctaagaaaacgtgaacaaatgtatatttgaaagtcataactgatatcaaatttgaaagttataactgatgtcaaatcaatcaacttaggtaccttcaaggttatctagtccagttcttcttccaaggtttgggtccattttataatatccccactaagagtttgtgtagtccttgctcacatactttaggtggcagagggctgactacttctcaatgtatattacagtatacacaattgtgactggtgggtttgagctcaatgtaagaaagagctttccctgtagtacccgcctatccatcctggctctgttcctcgtgccagacagacctcatcagtttcctctgctttaagatagccctgcagaggcttgaagacaacaccacctctctggagaataccactttaggttcttctaaagtatgtggagcttagaactaaacctatcttcaggataaatggtttcaacaatgtagaatagggtagaattgtcatatccctatctaggtaatgtctttctgctattacatcctcaaccattggcttaacctatgatatttggaggggtagagaaagaagggtgctagtgagatttccccacatgtttctaacttggtttgctctctccttaggtctcttgggcccctggcagccttgcccagttgttctctctggactctgttcctataccacaacagcagcaggggcctgaaatgtgatgtccacaagagctaataccctacagatggggcatatcctatcccatcccaccagaggattgattctccatttcacaaggactgatctggagcatttcttgcttcccttttgtagtctggggagccagattccacattcatgggactaccagacatgttcctagctcaacttgattatagagaagaggagagaggacagtgaatggggtagggttttcatgtctgcatttttggtcaggtaagcctctcaaaattgtgttggcacatctacctagcactttagggacaaaatcaaacccttctccccttttagctcctccacactgtctccctcctcaacacacacacacacacatacacacacatatacatagacacacaaacacacacacacacattaatatctatcttgggggaggcctcgtgccataattcccaagttcatgtctcagactgctgcattgcagcatgaggcagggcaaacactttccctctagatccctggggcctcaccctgtatttgaggttctcaccaccctcagcagggagaagggctgaagttcgccattttggaaccttacagaacatttctgagccaaagtaatcttccttctggggcctgagttccccaaactaccccacagcagtccctcaaagacagccctcaatccatgtagggacatctgagtatgcctctttctattgaaatgtcaattcaatcccagctttctcaccaccgttcccctttgattctttctcaattgtctttttgcctttagctcccacctatacatctcatgctcagagaaaaacaagttccttagaggttgtattctttattctccaagaatctgtctgaaacttgtacagctagttcctgtcccacaactattaagtggtttattaagtacattaggcagaatgtgcacttcatcaccaggttctagctctggcaaaggagtgctgtctacagcaagatttttgcttttagaattttattaactacatcttttgggttcatccatctacaaacactgattaagggcccctggggcaaccaattgatcagattactaaaaggacttgggaaaaagcaaaaaggtcccattgtactggactgaggattagaagcaattgaaatacaagcctgtaccaagcaagcagcctggccccacacaggtattagcaaatatgtggtaaccaaggttttaggccttggcctttaggtttcctgttttttttttgtttttgtttttgtttttgtttttctgcaacaggttattcttatctcactggctttcactgatcatgtttagaccttctggtagaagaaataatatccagacaggggatgatttggcttcagcaggctgcaggtgttcaaaggttgccatgtggctggcagtggttcaagcccacatttgacactgctgctctagaggaaagataatgatggtaacacagtaataataataataataacaaaaatatgataaagtgaaagagtaagacttcttcagtgtgcttgctcatggcatgaatgctatgtggacagcccaagccatacccagaatcaccttaattccaactttttgaggttcagcaattggaggtggcaattggctttgcattttaaagtatttcgggtaaaggtgaagtgaaggattttcgtctttataatttctgtttggccatggcaaataccatagttgagtatttgcttcaggagagttctttttacagttttacttttcaatgctgaggcatatttctttgagcactgtgcttttatgtgtctttctacaaaggggttattggtcagtggaagaacaaagtacacttgataaaaacattttcaacatacattgagcctaaacagcagttaagttgtctctaaatgaactagcaaaaaaaaaaaatgtagtttttgtttgtaaggaaggggaggtatttcctgagaatgaatttttttttttttggattactgtttttctctccatataccttgacttggattttgacaggagggagcctgggaaaataattttttcctccaagattctcagatccaggttaggaaaggattcagcactacagcatacccctctacaacatacagccctgtcacattgagatcataatccctcctgtcccactcctctctaccaaccccaccctactagctaggtcttcagtgttttacattgaatattggtacattttaattattttttctcataaatgggttatttatagaaattttgttaactcttgagccatatgcatgtgtagatactggcagggctatgtttgtttatgatgctctgcaaacatttcatattggccaataaacagaaatatatccaaaaaccttgtttattcctctactttcagagaacctggtgaatcattttgctcatgtgtcttttcttagtgagcacagcaaaaaaatgtgtttctgatcattggacatggcatcagtagtgatgggattcactgacttgtcacacaggagatctgggttatagttcaagctctctttctttttctaaaattgtttatgccatttatattctcctctgagataaggatctactagaaattgttgtgttctaaactaatacttatcaaacagggttccatggtcctaagggaaccgtgcactgcacatcttctgaggtctgcaaaatctttaggaatttcagtgtgtgtgtgtgttttcattttgatcataatgtcttaaaatacaagcatattctagctagacctgttaagagtactgccttgccatttcaaggtctgtatttgtgttgataatcttaccaggttaaagagaccacctaaagagaaactatttaattttgaatgctatactttactataatttaatttaagagataggaaaatcaagtttccttccatctttaatattctgtaatctttacaacaatacatgttggcaaggatgtggagaaatgagaagcctcatgtattgctggtagaattataaaatggtatagcctcttttcaaaacagtctgacagtttctctaaaagctaaacttgagtatgatccagtaatatcactcctagatatatactcaatataattaaaaacatatgtacacacaatacttgtatacaaatatagaaacattatttataatatccgaaaagtggaaacaacccaaatgtccatcaactgatgaacagataaaaagttgtggtatatacatataatagaatactattcagtaataaacaatattgaacttctgacacataatacattgtagatgaaccttaaatcatgtcaagtaaaataagtcagatacaagagaccacatattgtatgattccatctatataaaatatccataaaaagcatgctaatcaagacagaatgtagattaatggttgccttggaatgggcatgagaaaaacaattaaatgttaataggcatgatggatcttatttaaaggataaagatgttctaagatttagttatgctgatgtcttccccactcaataaagttaataaaaatcattgacttgtatacatgaaattatgaatgaattttataatatttagaatattcctcaataaagctgttttaaaaatattctatgattactgatctctgatctctgagtagactgctattggtttactaatttactttcttaaaaatgttcattactagggctgattccataaccaatctctctctctctctcacacacacacacacacacacacacacacacactcacaacttaattgctcagttcagagcaaaagaaagagacagaacttgagtccttttccgttctcttctttttagtctctctagaccctatgtagcctagagaaaagagggagagaaaacatctaggcagaacttagaggaggacgatttaggaggtatcactcataccaaaggagaaaggacggaggaaaccactaaggcttaggggtgtgcataggaaaagatatattgggaaataactatcacaggctgtagaagggcttattgagggaaccactacagaatgggggagaagtgactggaattaccaggaggtaagaggccagaacttgtgtatttatcatgcctctatttgagaaaaggcattttttaaatcctaactgggccttgcattctcacttgataaaattatgaatggtggtacagtgggggaaacagaatcctctgatttatggatgatgataaaggcataggaagggttagcatttaggcaacacttctctgttttggagttgatttgtgtgtgcctgtgtcagtcaaagggcagtgagcccccactgtataccccagaaggacatggggaaccagatctctgggaatagatggatcaaagcagcaaacaagtcatcaaactgtcagacaagattcttaggtgattgttaataaccttttcattaggg

SEQ ID NO: 137588 - DNA, 3076 bp, Homo sapiens
gacagttcctgcttgtttttctatgtttctgtaggggcataagagcttgaagctgcctactcctccattttatctggcttccgctatcattcttaatatatttattccaaggtttccaggggtgtcagcatgcactggaaaatgaatgtatgaagaaaatttaagtatcacacaggacatgtttttgagtcaagcctgggaatggcaaacaatattagtatccatatttcattggctagaaatgatgcacatgcccccacttcattgcagtggggttaaagaattttggctaatggtgttcccaggagaaataaagaataggttaagtgaacaaccagccagcttctgctacaactagcatacaattaatatgctttcacaactagaattgtttctttgagaaagagctgtgactggtatcaggcaggagccttgttcctgttgaagttaggctgtcagatctaagaatctctagagagcatttatttcaatttcctcagtgttgggacttctgatgcccagaaactgggggtcggggggaaggaatatggccaaagttagtaccagagctgagacaagagccagctagagtgtttgcctctcatctataccattggcattcaaacattttttaccatgacctagagtaagaaataactttttatcacaacccaatatatactttcatgcattttatctgtaaaacttttataaaacagtacttatgtgggtagtgcttatgactatttgtcaaatatttcagctccccacattctgtcacattgtagaattgcattttcttgtacctgttgtagttattaatgatcatgtgatgtgtatggccaaggacatgtgagtaaagcaatatgggtcatttcttggggaaaactttaagagcttgtacgcagttcacaatgtttcaatcataaaagcagaaaaataaagcttctgtaaccccgggtaccccattgaggatgatgtacagcagagtcctcaggaaccccctggtaggcaaatatgatgagtgagaaataaacttttattcttttaagacactgagatttagggtttgacttttgccatactgcagcatagcctatgctgactgatacaaatacttagctttacttcattccatgtactcttatatttgatactattattctatttcattctattttatctttcaatgctggctggaagctagtgaattggttttatgacttagtaatggggttgcaagttgcaaaatactaccctgtacagtccacttgtcccacaggtgatcccatctccaagctcctataaagcaatattaacaacccccatctgtctacaggattgtggttatggagagggtggagatgcctactgcacagcctgccctcctcgcaggtacaaaagcagctggggccaccacagatgtcagagttgcatcacctgtgctgtcatcaatcgtgttcagaaggtcaactgcacagctacctctaatgctgtctgtggggactgtttgcccaggtgagcttgctttatgagaccaagcttgtctgggcttttctagctgttggaggtttctcccatcctcacctctcagaacttagtcgaaatattcttcttataaacataatattcagtttaagctcccagaagagagaagtggtgtcttcccaagatacctctataaagtgcttagcacattgtcagtcacagatgagtacttgaccgcttttccatcatcactctcagctgaagaccaaagttcaaggtaaatctcactgtagacttaaaagaagttatgatgtacttggtatcaaagcagtgcacccctctcttgtggaattaggtctccttttggctacatggtgtcatgaatgggggaagaagtagagtgtctgggtctctgagtcagaaaaagacacagaggcagataactcagaaagaggggtgggcacttactttcaggttggcaagattcttaggagctgctttcccaggaagaactggtccaagtgcattgcttgtttgatcaccctgccattcctaattgctctgaacacaggttctaccgaaagacacgcattggaggcctgcaggaccaagagtgcatcccgtgcacgaagcagacccccacctctgaggttcaatgtgtgtacccagttctcttcttccctttctcctcatcccattgggtggcagcaagatagggtagtaaagactacccatatcccctcataccttttcatgtagagtagagtggcaagggaatcagattagaagtctggttttacaacatattatctttgcaactctatgcaaatcattcaatctcattgaacctcatttcctacttctgaaaaaagggtgagtcatgataatcatttttcttcataccttgtgtgatgggtatctaggtctaatgagaaaatggatgttaggaagcacttcacaaattataatatttgtaaacctatgagatattattattatatgaagtatataggagcccctagggctgaggacttgtaagaggctgaatgaagaactagggtccaatctatgcctataccactatccatttatctaatcgtctatcttttttgtctaccatctatttacttacttcctattttaaaattattgacatattttttaaatcatgaaagttttcaaacatgtagaaatatttttaagtgcagaaaaatataaaattaaaatgcaatcacccagcatctatccaaagttaataaatcatagcattttgcatatttgcttcagatgttttaaaagaataaagattccacagatataatggaattctcttctagattctctcagagtcctattacctccctacctcctcagatacaaccactatcctgaaattgtatgtattctgttggtaggctatgctaaagtaacaaacaaactgcaaaatctcagtgactttatacaataaaagtttattttttttttactatgcaaaggccttcctacatcatttgactgtgcattctagaccatatgtcttccaggtcaatgacacaggggaagagatggaggagacatactggttctt

SEQ ID NO: 137589 - DNA, 1047 bp, Homo sapiens
ttaagggtaggcctactagcaactcattctgttagttttcctttgcctgagaatgtttttatgtcccttcatttctggggatactttcactggatataaatttgcagttgacagtttttttatttcagtacttgaaaaatgtaatacttccttcttggcttccatggcttctgacagaaacccactgtcgtatcatttgaatgggtgtttttctataggtaatgccatttattcttggctattttcaatatattttttttagttttcagaagttttattatgatgtgtattggtgtgcattactttggatttttttctgtttgggatctgttcatcctctttaacttgtaggtcttttaccaaatttgtgaagttttcttccaatttgtttgaaaatatttttagataaacatttaaaaaattttcttttcataagattctgacaatatgatttttctatattttgttatagtctcataggttcttgaggctttgttcattttattttgtcattttctccctgttgttcatattgcataaattctgttgttctgtcctcaagttcactgattctatcatctgtctcttctctactactaagcccatccagtgaatttttaaaatttctgtcattttatttttaataattaccatctgtttatttaaaaaaaacttctgtttctttgatgagattttctatttttaagagaattttaaattgttttttaaaacatttttattatgggtgctttagaatccttgttcaatcattccaacatctgctttatctaagagttgctgtcagttaattgacttttctcattcatgttgtgattttccttattcttattatcatgggtggtttttcgttgtgttctggacattttgtcaattatgtcaggagactcagggtcctatttaaacttttactttagcaggcagtcatctgtttatgtttagcatacaggttttggcctacgtttgtgagctgcagttctaaaggctatttaatttccagaacctttgtagtgtgatttttggtctgcg

SEQ ID NO: 137590 - DNA, 1888 bp, Homo sapiens
agccagatacacatgggcatgagtcccatctttgctctgggcaaattatttcacctcagaatcaattaggatgtagtaagttgaaagtaacataaaatttaaccatgacatgaaccataagtatatttatttatgtaatgaagtctggagacaggcaacctttttgcttgttgggcagatcagcaatgttatcaaggactcagcctcttttcatccttcatattggacatcttgctgttttgttctcattgtggcctcatgattgcaaaactcaaagcatcatatctccatacaatagtcaaagtcaggaatcaggggcaaggtcaaaatagcttgccttttgtagggaagaagtcttttcccagaagctgtccaacagatttttccttatatcttatggtccagaactgggtgatgtagctatctttagctggaatagagactgggaaataagtatctggccaatgagaatgggattgtgtgattaagaccaatcaagaatccgttctggaggctagtcttcatgccacctagaatgaaatcagtgtttttatagtaaggaagaagaggggcaattgtttgaataagcagctagaagcatctgatagccttttttaaagtaacttttatttacttttaaattttactcatgaattataaacatcactgtaaataaatcattgcagaaaattaacaccatttcctcaggacatttttcttgatgtataattgccaagctaaataatgcgtacgattttaagactcttgaaatatatcagcagataacacttctgaattttgtttatactaatttctattaccattacatttattttcaacagtgcatagaattcctgttgtggccctctgttcggggtccctgacttcccacaacaaattcccatgtcccagaagcctaaacgcaaatgaataatagatattttcatgatctattaattttatgccttccttttaacagtaattactaatttatgaggactttatgagaattttggttttactttttatctatttgataggggaaatgtaccaactttactgtgtttatttgcccatttgcctttccaattttgtgatctatttctgattgtttctctttctattctttctattcattatgtattgttctttgtctactcacataaggaacctaagtagacagacatatagtagataacagagtattttaaaaatcgtttaaaatgtaagtatatttgtatttaaaaaccagaaatgcttttaaattttgtttcattttagtatcatctgttgatttgtaaatatattttccctttgatgtattaatttgatgacatgtattaataaattcctaaaatttaaatatcctgcattcccagtataaaccattcttgattatagttttaaggtaaatacccttttatgttgtataagttagtattttaactaaaacaaataattattattgtaacactatcagcatcaaaattttggatcagcattgtgctaccatggcaaaatcaagaatatcaatgttttctggctataaaagtggttaatagcaaaagaaattttgcaccttaatgatttgaaagaacttcctttgcctcctaattatgaaggagaattctcaataaatttttaatgataatttgctccttaatttattaaaaattattcatttatttaatttttattgagtacaatttgatagtctttggttttatttcactatgccaatccctgtcttttaattggcttacttagaacatttatgtttaaataatctttgatattttaagatttaaacctaacattttattctttttgtgtttgttttctctgtttcttttgtccctctatttgtcttttcttgccttcctgtggg

SEQ ID NO: 137591 - DNA, 1098 bp, Homo sapiens
gatgacaatctctataatgcttacctcacatggatgttgtgtagatcaaataataatagatgtgaaagtactttctaaattgttatgatctgttcacacatgagggattgtgattattctttaccccctgggcagaagccaactccttgtcttattactctctttacaaattcagctcctggtatagccactgactgtgaatttgagcaaattgcttggtctctttgcctcagtttcttcatctgtaaaatgttgctaacaataattcttaatatgattgtcttgagaatggaatgagttactacatgcaaagcatttacaagaactcatggcacatggtcagagctacataagcattaactcttttgtgttggcttcctcgtccctactatctcagatctagagaatagattaaggggacccagaagccaagtggcatggaagccactacttatagtcccttcccactagcttgctagttcttgtgttctctacccacagccttcccaccatggattgccaagaaaatgagtactgggaccaatggggacggtgtgtcacctgccaacggtgtggtcctggacaggagctatccaaggtaagttatcctattcagtacacttatttctgttgcatcttaggaaccagcccggcaactgaaagaggccaagattaggggagtcagccctacttatgactgatccagttcagcgggtaaaacctgggatccacagagtatgcaatagcagtcatgattccagcatgaagtcagcctagcaggatcaaggtcaagggaagtttccatgagataacagagtatttcaagaatagatgtgtaatgcagagacccatgaggactgttcagcattagggtaatctgtcatctaaagcaaggcccaaccacatggtgttcaagagccagatatcaggtcttaggaatgagaaagagagaagagccaagaagacctctgttctagagggtctgcgctactgaggaagctgtgcaatggagaatatagggatagggaaccacggagggtctaaaatcccaattaaagataaggatcagaataaaatgaccagcaaggcagagacttt

SEQ ID NO: 137592 - DNA, 1050 bp, Homo sapiens
ttcgagaccagcctgaccaatatgatgaaaccctgtctatactaaaaatacaaaaatttgctgggcatggtggcatgctcctgtaatcccagctactcgggaggctgaggcaggaaaatcacttgaacccaggaggcagaggttgcagtgagccaagactgtaccattgcactgcaacaagagcaaaactccatcaaggaaggaaggaaggagagagagagagaaagaaaggaggaaaggaaggaaggaaagaaggaaggaaggaagggagggagggagggaaaaaagaggggagagaaagtccctctgctcaatttggcaccaagcctgccttgcctagacagaggtttcaaagccatggttagagagacatgttggggtttaggacacatgatgtttattaggggggtggagctctagaaaccaaatgaaataggatgtctcagaccctcaaatgccagcagcagttgtcatggagattttaaacgcctatgttgggaacttagctcaaaaagagggctacttcttggttcctgccaatgtttttctgttttgtgggcaaaaagggatatgagaaagttgtccagagcagtttcctggccctgttactgtggtgcttaacttcctggtcatgaaggctatgagaatactgaagttttctgttctcaaggagaagagtgcatggcaaggggagggaagcatgcctactgaggccaacaccatgggccagcaatcaaatcagcacagaagacagtatgtttatcttatgcaagcatggatcttgtagcccactttcctttgaatgaaggaatgggaaagaatggcccagttgatgatgaaaaaaaggtgcacttatggaatgccatttagaatgacttaacctgtcgcttttggggaactttgagtggaggagtggtggcctctcaaggtacacatgtacactctcgtctcttctgactaagagtacacatttaggactttggcacttttagaaaccacttgaaattcaccctagtatgaagtcatgagtaagtaaagaacctcatgcta

SEQ ID NO: 137593 - DNA, 1053 bp, Homo sapiens
cagccacatgacagacaggcaaaataagggaataattctagtcatattgccacttgttggcccttgtaaacacaatcaaggtatatacaacacatacttggataagtttgggtgagaagttggatgaatcaaattatatttggaggcctgtgtaaaaatattcatagcagctttaacattttttggggggctaacttaagcaatatcctattggaataataaattcaaagtattaaataaagctaaagaaccatcttttaaaatgagatataattcacatactataagatttacctttttaaagtgtataattcactagttttagcatattcacaaagtcacacgaccgtcaccactgtctaattccagggcattttcatgaccctagaaagaaacatacctattcagcagtcacttcccatttccctttctccccaggccctgatatccactaaagctagtttatgattgattgcctattctggacatttcatgtaaatagaatcatacaacatttgtccttttgtgtctagcttcttttatttagcataatgttttcaacgttcattcatgttattgcacatgttaagcacatcattcttttctctgactgaataattttcattgtatggataaaccacattttgtttaccatttatcagttgatgaacatgtggattttccccactttttggctattataaataatgctgctaggaacatttgtttacaggtttttgtatgaacacatgttttcaattcttttgggtatttacacttaggagtgaaattgctgggtcatgttgtaacatgatgtttaacattttgaggaactgcaaaattaatttccaaaggggctgcatcattttgtattctcgccagcaatacacaagggttccagtttctccacatccttctcccccaggctggagtgcaatggcacgatctcggctcactgcaacctctgcctcccgggttcaagcaattctcctgcctcagcctcccaagtagctgggattacaggtgcctgccaccatccccggctaatttttg

SEQ ID NO: 137594 - DNA, 1137 bp, Homo sapiens
ttctccctagaaaaaaatggatagaccttgggtttctccctcaacagattctctctgaatatgggggagagatacagaaaaacctttttttctgactgcattttattttcaggtgaaacagacaaggtcagaactaaaagaaaagagcccttaaaactgtgattttcaacattgactgcacatgagaatcacttggtgaactgtaaaatgtagcgtgctcatgccacatttttgactaactacaacagaatcttaggggagggacccaggtgtcactattttttggcactcccaaggtgcaaccaagactgagaaccactggtctaagagattagccaaaccaactccctcgtggtatgaatggagaacttgattccagcattgggaagggatattctcctgatggcagagctgggactaggaccattcactatgctgagctaaaacaggaaatgcaaactttacaaatagtggggcagaaggaagatatgatgtttgatagtttggaaggaggttataaacaagataaaccttggatagaagtggccttgggtcagttcagaaaagggaaaggctgagtgccaacaccaaaaggtaaagcaacatttgaattacaggccaggcatctggaaatgatggcactgtacagtttagaagcttgattttcaagaaagcagtgttctcaaggctacgttgagcaacttctttgattctgtcttgtgcatgtgggtggatagatgggctcgcagtagaggaatgggcaaggcatggagaccatctgctgtcttcttcatcgtttttaatcccacacctcctgcactgtccaggcaaagcaaatatcctgaagtactgagttcttaatttagacttgtccttctttcctgcctacccatactacatagagagagcatgtttcaccccacaggcatgtgtgcaagttgagaagagcagcagccacaagctgcagcaaggagcagctgcacccccagcagcctgggtacctcacatccagcagaaacttggccaacatcaattattcagggcatgatgagctaatttggggattactattgatgtcagctgtattgtttctcctcttccctgtctgcttgcattcttaatcgtctacattatttt

SEQ ID NO: 137595 - DNA, 2828 bp, Homo sapiens
gttctaatagaatgcctagcatagaaagtactcatcaagtggttgctgagtgaccagaaattaattctccctatcttgggatgacaacagttattatatcttccaaacaccaccaaaagacatcatgctattctcaaaaataaaggattttccatgtaatatatggtggaatcagacactgagatgtcctacttccaggagattgttagtcaccgttgtggttaagccaaaaagagtgggcattacttcttcccttctacgatccacctctccatgacccagcccaccctttggaattgtttctgttgaggataaaatgagccattattgggctgtgggagttaggaaaaagaagctggagccttggtagtatagtcactgagtaattggtcctaaagctgggccaactcctttcttcgtatatgggaagtagagaagccactgggccctgaatatgcagacttgaattctacttttagctctaccattgaccactgtgtgactttgggaaaattctatcccttttctgagcattagtttcctcatcttagatcatcagggaatggggttaagttgtcctgaataatacttttaggatcccatgactatatgttttcaattatctgatagcttgaagttttaactggttgccaaagaggaggaaaaaaaaaacaaatgatggaatgtgctgtcttatgagtactgaggtgcctgttactaaaggacttcaagtagagctggatggtatttctttactgggcaaaaggccactgggactaagattaattttaaacctccctttgactctaagattgtcagagtctaaaaatggtctcaaagaatgtgcatttacatatgaggtcataggcttcttgttatcagtctcaccttccctccacaacctcacaaagtactatacctttctcccttttcttggacatctaaagaaaaaatgaagaaatattttggcagcagcatttcattttgtacagacatgcctcattctatagttctcattgtattcttccagtcctttgttaaggatgtggacctgggttgggcttgtaaatgcccactggtttgtatctctgctcctttaggatattttattcccaggcctatgaggatgggatggagtacttgattgccatgggaaaaaaaaagagactgttcttgttgacatcttcagatacagctattccagattgcttggtaaatgggacagggtggagggagtgtggggcaagaccaacaaacttaatagaaatcagaaattggagtacttgactgagttttatccagtcccaatcctgcaaataaatcataccatgaattcaatacccaactgggacaactcagccaaaagccttcttgggaagtcagcttatctccccttccagtactgctggttgagtaactaatttttttattataccgtaattttatggaatcttgtggtgattggtacatgaccagtgactcactttggctaggataacagcagagcaaagcaagaggtttcaggtgttagctgagtgccggtctggcttggggcttgtctccaataccctttgttccccagctctgggtgggatagtaacaacaatcatagcaactcctcacatacgtagcacaatctggagtttccacagcactctcacatacattatctcattttacccttgaacataatccagggtagtttctgtgcttttgctcccacttgggaagagtattttagcagtcagtagaagaacgttttccctcaaaatcagcctagagtttgctgttcttaatttcatcctatttcttttataatggtatctttgtattcttggctacacagtctcttttccccattcgtttaacaattatttttcagcagttgccaaacactaaccaaatatttatatttttaatttacagtctgctaagttgtatttgtcttttgaggtttgtgctttgtttgttgtctttgtgcacgtacgcatgttttgaaggcaaaacaattgactcatatggttagcatttacttttggccaagtggaagtagcccagttcagttggttattaattttgtctgtacaatgacaacagcttttagtaaggatttttttttctttttcttccccagctggggctttacctcttgctctgtgcgctagaataaaagacaaaggagaatagatgagacttctttaattttgcgcaggttcattctcctctgttgatatactattcctgacattgctgggccagatgttgctatcactaacagttaaaattcttcagccactttggaaatgttgaaagtagcccattaaaaactgtagtacccacctgtggtctctacattatgtctattccaggcacagattttagtatacttaaacacaaaaagataatttacttttatcacatgcccatgaaataaaataaaaatgacacatcctcagtcctggcctcctccacgtcccagtatcaatagctgacacattactcatcccttacttcttaaagctttgtcctattctactctatcaaggttcttttttttttttttcttctctggcttccccttcttcgttgctgtcatgtattcctcctcttccagcttcaagtatgagtgaccctcaatgtttggttcttcttcctctttcttcttccttccttcttccttctttcttccttcttcccttctcctcctcctcaccctcctcctcctcctcctcctgcttcttcttcttcttctttgtttgagaatctgtcacccaggctgcagtacagtggcacaatctcggctcactgcaacctctgcctccagggtt

SEQ ID NO: 137596 - DNA, 3478 bp, Homo sapiens
ctagggttgggagataaagaagagaaggaggctgggtgttagtgaaggcggggacagtggatcagacttgtggagcatcctgaggaaagcagaactgctaacccgcgtggcttgagggcaagtcagggcttgtgtaaagagcatgctggctctgtttgggggctttcaatccaccccctcacccgccgagcttggtttcacttgatctctcattcctggaagctgagccccgggcagtgttattttgatcctgcctcactccaaacactggccaagacccagcaagctgcaagaactgggggacaagaagggacccgccagag[450 bp omitted]catgctcaccatttaacttgtgttaccatggacaaataaaattacttctccctttctgagtttctgttaacttcaggctaaagtggataataatagcacccacctcatggggctgttgtgaggattagatgagataatccatataaaatacttgcacacacttagcacagtggctggcccaaaataaacactcaataaatattaactattattatttaagatagactgtggcacacagataagatttcaacaggtggagatagagaagacagtttaagcagagaaaataggaacaactgctttaaggcagggaagctcagggcatatgaaaagaacaccagctgagctggattttagagtacgattagcggaaaattggaagttaaacttgccaaggcagattggtggtaaactgcaaaagacagtggatgctagagttttgatttgatttagcagacaatggaaagccattgaaagtttttgagcttaaaaaaaacgtcagatcctctgctttaggaagagtaatctggtaaaaggttagtcagctggattggaataggaaaacacaagagggggataaactaggggcagagagggaacaaggccctggaactgaggtcgtggctgtgggaatagaaaggaggtgatgaatttaacaagccatcacaaaagttgaatctacagaactttgtagttgatacattatatggaattgaaaaaggaagaatgagaaaatcagaatcttttcgggttggcttagaccttacaaggttgtgcattcccatctcacttctgtggataacgcaatagaaagagtatgtaccttctgagctagacacagctattttcaagtcctgggtctgctatttatctgctgtttgtgatcctaagcatattatgtacttgacattcccaactaggatcggtatttccacaagacatttagaagtatgtggggtgtgtgtgtgtgtgtgtgtgtgtgtgttttacacacagtctgaggtactactgcatttaatgccaaacagatgcaacaaataattgttcctcccacccaccatgccagtagtaagcccaatgagaagtagtcaaattctttgagcctcagctttctaacctgaaaaagagggataacagtactcacatcatggtgttattgggaggattaaaagatatatttcctgccaagggtctagcacagtgcctgacaagtagaatttcatgaattgtaattttcctttaccctaatggattccacattaaaacatccttgccagtttctgcttgaacacttctagagggaggttccttactgcttcctgagagagcccactgtcttcagggaaagccttggactgttaaaagttcttccttttgctaagctgaacttagttttcctaaagcttgtacctggatatcctagtcattctccctgaggccacctagagcagtctgttctttttcttccatgacagtttttcagagatctgaagaccagagatcagatccccctgcatcttctgctcccaggtcaaacagctcagataattgtatcatttcttatctggcatggtatcaagtcaaatatgactctgtggttttgaagtatataaattggggtatgagtatgtcttcatagtgatgaggaatactgcaaaaggaacaggatgggtaaatgtgacaaaattccttgtaatttattattttttaaattatttttttctggtcaggaagggtggctcattcctgtaatcccagcactttaggaggcataggcgagaggagggcttgagcccaggagttcaagattagcctgggaaacatggagagaccctgtctatataaatttttttaaatagctgggcactgggtgctgggcacttgtagtgcccgctacttgggaggctgaggcaggagaatctcctgagcccaggagtttgaggctgcagtgagctatgatcatgccactacactccagcctgggcaacaaagtgagaccctatctcaaaaaaaaattaaagaatataaatcattttttccactatgtgctaaatactttcaaatccatcatcccactgattccttatccccaaatgagggaattgcagatttatttatatatattatacaggtggccaaacaggcctagagaaaatgaaacttgctagagatcatttagttagtaagcatctgtgccagaactgcaagacacatttttcttactccaagttcagtatggcttttcattttccacagctgttagggtttaaggtgatagatagctgggcaattacgccaactctggcactaaagaatgagtcaaaaaaaagagggatcctccaattaccttataccagttattccctctttgagagaattcctttctttagatgtcttcttgaccttctccacttgaatgcttcctgcagagagtgagtcatcttttggagccattcctcagtgctgaagcttcatattgaagcagaagctgcttttcactgctttctttctagaaactagctccacccgtgtattctcttcttgggagcttaacaggaaagatatgggtaagtttcaccatcagtatgtaaaatacgactactattattttgtgaacatagatatgaggatggctatactttgtcttggattagagtttactgtatatattttctatgttccccaccagactgcaatctcctaaa

SEQ ID NO: 137597 - DNA, 1108 bp, Homo sapiens
cctgctgggccccactttccccggcttaagcagctgctccgctgaccttaaagacatcctgagcgaggccagcaccatgcaactccttcagcaacagcagcaggaagcagtatccgaaggcagcagcagcgggagagcgagggaggcctcgggggctcccacttcctccaaggacaattacttagggggcacttcgaccatttctgacaacgccaaggagttgtgtaaggcagtgtcggtgtccatgggcctgggtgtggaggcgttggagcatctgagtccaggggaacagcttcggggggattgcatgtacgccccacttttgggagttccacccgctgtgcgtcccactccttgtgccccattggccgaatgcaaaggttctctgctagacgacagcgcaggcaagagcactgaagatactgctgagtattcccctttcaagggaggttacaccaaagggctagaaggcgagagcctaggctgctctggcagcgctgcagcagggagctccgggacacttgaactgccgtctaccctgtctctctacaagtccggagcactggacgaggcagctgcgtaccagagtcgcgactactacaactttccactggctctggccggaccgccgccccctccgccgcctccccatccccacgctcgcatcaagctggagaacccgctggactacggcagcgcctgggcggctgcggcggcgcagtgccgctatggggacctggcgagcctgcatggcgcgggtgcagcgggacccggttctgggtcaccctcagccgccgcttcctcatcctggcacactctcttcacagccgaagaaggccagttgtatggaccgtgtggtggtggtgggggtggtggcggcggcggcggcggcggcggcggcggcggcggcggcggcggcggcggcgaggcgggagctgtagccccctacggctacactcggccccctcaggggctggcgggccaggaaagcgacttcaccgcacctgatgtgtggtaccctggcggcatggtgagcagagtgccctatcccagtcccacttgtgtcaaaagcgaaatgggcccctggatggatagctactccggacct

SEQ ID NO: 137598 - DNA, 1046 bp, Homo sapiens
tacttaatgctctttatttcactatctgttcataaacattctctgaagcaagcatacagtcagtatgaattccatttttcagatgagacagctgaggctgaaagacatagagttacttgtctcaattcacaaagtaaagtgccagagtttgaaccagagcccaggtcttctctctcaacgtagctctttttctccttcattatatcaggcatagtagcaacgtattcttttactagctttttatcttgaatatccttttagcgacttgcctttggtgttagtgtgcctataacattgtcgttgaatatcttaatacatttagtggtcttggcaagcagttttgtcttcagaaggacactgaaatctgtggaaaggactgcagaagattgggtgggcagacacctatcactttcggggctggtagactttctattgaagcaatttgcaaggctactttgtattgtctaaaagcactacttcagaaaagggttgtgatgtcaaaataggcactttgagtgaagaaagggctgtaagcatgggtggaaaatgtggtagatgattgtcttgagttattttctttaatgtcaaacaggcagtccttggaatgctacttcaaaaagtgttgtataatgttgaagatacagttacagatttccaacacgaaactcataaatatgcaattccctgtcctcctaggcacatgaaggaaaatttatgagcttcaggtttctatgcagctattaaagcatatttaatctgctttgagctcaagctcactctcgttggctctcttcgtttcttcctcttacatgagcaaactgcctttctttttgtttaaaaatagtaagtaggtttgttttcctccaggtgtcatgaatgcaaacattgtaatttctcatctgttcagcctttttgcacaacaaaatggcagcacccaggaggttgaaagggttaaattgttccttctctgagtagtaccataagttgttagtctgctactctttctcccagttggcacatgaccctaacatccaatcgctagtggt

SEQ ID NO: 137599 - DNA, 1103 bp, Homo sapiens
ttgttgttgtgtttttgtttttttttttatttgagatggagttttgctcttcttgcccagactggagtgcaatggcacgaatttggctcaccacaacctccgcctcccaggttcaagcgattctcctgcctcagcctcctgagtagctgggattagaatcatgcgccaccacacccggctaattttgtatttttagtagaaacagggtttctccatgttggtcaggctgtcttgaactcccgacctcagatgatcctcccacctcggcctcccaaagtactgagattacgggcatgagccaccgcgcccggcccacacggtatttttgaaagaacagtgagcttggattagaacactagtgtccaggccctgctgctactacataagtaattatgaatccatagccatcttgttgctcttcttctctgagccttggtttctttagctataaaatgggaagttgaaactttctagctacttctttgagttatgagtaacaagttaggtaatacacttaaaagagaatgtgctatacaaatactggttcttaagacagctgttgttaatgtactgagtattatgcttacctcacagggttattgtgagcatcaaatgggataatggatttgtaagcattttgtttaaagtgtgattcaaatgttaagaattagtaaaaatagtaaaagaacaattcattctccatccagatgttctgtccccactgtgacttatgtgctcattcagagttgtacagaaaaacctccacttaattttcacaagctggagttccacatgtaacagaatcatatgggaccaaaaaattctctgtattggcttcttccctgccgtattttggctctgggaccaacaagacacccattttgcatgagctgcctgccaccaactttgcgctcacatctagttctgttgcccatgtgcaagctgaatttgggcccgggcccccagatctaacatgaaactcaagtttccttctgttcaaactgtccaggcataatagtcttaaagtccgatgcccagcagagccgtagatttttcactggccaaaaatcaacatgaaaccagatgtatctgtaaatctagtt

SEQ ID NO: 137600 - DNA, 1022 bp, Homo sapiens
tcctgacatagctgttcacttggggttgaggggaggataacctttcatgttttttttttttcttcattctgatgactgtgctgaacattcaaaccaaaaggccattggtggaaagtaaaggtgagtggtgagaagacaatagggtaatggaaactgtgttggacttgtaatcaaattgtcctgcacttcccctctccaagtcttaacgtttttcatctgtacagtggatattaaaatgagaaaataagcttgtcttcacagagttttcgttaggtgttgacacaacaaacaggctcccattagggctcattttccttcattccttagtaaggaagaagtgcttataaaatatagcagttgtgctcttgtgaatgatagcatgggcagttgtcatctccctgaagcagatgtaacccagaatgtcacttgagttttgtttaatgcttaggcataagacataggaatgacaaaagctgacctttgggtagtgagaacaatgttccattttgttcaaacttgaattttttactataggagactgagaattaaccttccatgaaggttttaggattggctttctggcccttctccttcatatccacctgaaagagcttgggcgcagaagttcttgcagaaaggcagttagacaaggtgacttctgaagctccagtggccaagtattttgatggtagcctaaaagatgtccagaatcattgtacatcattttttcaacagaagcttcaggcatagggattatgcttggtactttatgttgtggaatggaatctggcggatgtccatgtgatctatagaaacacctaaggaaagtgaagaaatgagggaaaaaaaagaacaagacttttatgataatactaatcacgatccttgtgtatttattccaatggcattttatccattatctgatttatattaccactcacagcagcagctcaataggatgggagatattatctctattttatagatgagatttgaggctcacgaagctaaagcaaggaaca

SEQ ID NO: 137601 - DNA, 1010 bp, Homo sapiens
ccaaggaaggacttcaggaggggagtttcccccttctcagggcagaattttaatctccagaccaacaagaagttccctaatgtggattgaaaggctaatgaggtttatttttaactactttctatttgtttgaatgttgcatatttctactagtgaaattttcccttaataaagccattaatacaccaatcgtattttcttatttacaacagactgagagaattaatgctgttaacattggatcttttttcttttttttttttccttttttttctctctcgtttgctttccaggtcatgctgacctgttcagcttggactgtttcacatttgtttttaatgtcagtttaaatgtaattgtaaaagcatgtatgctctaaaatcatgtagttacttttttcagtggaaaagcctggtattcgaaagcatttccaggctctgcaatttcatatgagcaggtttttggtaaaatcttttgtccctcactcagggtggtatctggacagtgagcccctttcttctggctcagtagtcagagagaggagacttggagacagtttctgctggatcctgtgctttggcaaggatgtgcagcattgcatatcattctatcattaattatgtttactcctccatgaactaaaaaccattagactaaatagtccaacataaaccttgaaagataaaatttgatattcttttgcctggccatttctctgacccagaattggggctgggaggggattggagacttgggggaaagaatcaaggagccttcttgcctgggggaatttggcatgcacttattaatcccatttggttgcactccctactaatccctcactccatacctgccaaggattggctctgctccctgcttctcatccctgtcctagttcttcctcacctatctccatttcccactactgatccttctctccagtaagatgctattcaacccgatgaaatataaagagtagcaccaccctggaagtcaggataccttagttt

SEQ ID NO: 137602 - DNA, 1073 bp, Homo sapiens
aatagcctacacaagcctttaggcctactctttctgtgcttgggtttgagtgaacaaaggagattttagcttggctctgttctcccatggatgaaaggaggaggattttttttttcttttggccattgatgttctagccaatgtaattgacagaagtctcattttgcatgcgctctgctctacaaacagagttggtatggttggtatactgtactcacctgtgagggactggccactcagacccacttagctggtgagctagaagatgaggatcactcactggaaaagtcacaaggaccatctccaaacaagttggcagtgctcgatgtggacgaagagtgaggaagagaaaaagaaggagcaccagggagaaggctccgtctgtgctgggcagcagacagctgccaggatcacgaactctgtagtcaaagaaaagagtcgtgtggcagtttcagctctcgttcattgggcagctcgcctaggcccagcctctgagctgacatgggagttgttggattctttgtttcatagctttttctatgccataggcaatattgttgttcttggaaagtttattatttttttaactcccttactctgagaaagggatattttgaaggactgtcatatatctttgaaaaaagaaaatctgtaatacatatatttttatgtatgttcactggcactaaaaaatatagagagcttcattctgtcctttgggtagttgctgaggtaattgtccaggttgaaaaataatgtgctgatgctagagtccctctctgtccatactctacttctaaatacatataggcatacatagcaagttttatttgacttgtactttaagagaaaatatgtccaccatccacatgatgcacaaatgagctaacattgagcttcaagtagcttctaagtgtttgtttcattaggcacagcacagatgtggcctttccccccttctctcccttgatatctggcagggcataaaggcccaggccacttcctctgccccttcccagccctgcaccaaagctgcatttcaggagactctctccagacagcccagtaactac

SEQ ID NO: 137603 - DNA, 1087 bp, Homo sapiens
ccaatgttcagagagcagaaaagattccccttttgattctgggaattatgccgatgattcagaatgaggtgaaaatatccactccttccctttttctctctctagctggggctgtaataataattatcacagtaaaaatgatagcattttttgacagcttgctatgtgtcagacatggtgctatacatttgacacaaagcatctcctcgatttctcacaactttatgtagtatttacttacaggtaaactgcggtctacagaggttaagtttctatggactatcaaaatcaaatatctgtttttattttctttttggaggcttcgagtgtgtgtgggtggggaagaatatagaatcagagatttttgagaatcgaaaatatctccaaggtcatattgtccattcccctcaatggccagcgattttcttgtatcatatattttttcctttgctgttctcctttgagtggcctgaggtctcaggttggaacaccagagtctagataatacagtaagactggggccagtgtgccagagggccagataggtgtactttggcagctagacttaaagcagactgagcttcagcagtctggtgataggccaataggaatttcagaaaacaggaatcaattgaggagcaatgagagatcgggtggactttttctttgctctgagatttggagagtgaaaactgggtcattgctactttcttagattaagactccttaccaagaactctgaaaatgtccaggctacctctgtgagctcttcagatatccctagagtgagaataatggaaagaatggaaaaatagctttaaactagacagcccaggggttacatcccaactttatcctttactagctgggtggtcatctaaacaagccagtttacccccctgagccttgtttccctcattaaaaaaaaatgataccaataattagacatacttcatagagtttttgggaggagtcattgagataaatgtttcaagtactttgtacatagtacattggccactaaattttagtacttgcccctgccctataccaccacccctttgctgtattgacaggagatgagctc

SEQ ID NO: 137604 - DNA, 1050 bp, Homo sapiens
cagttgccgtttcaacttccttcagcattttgcctgttcaaatgcttttcgactgtgttgtgaaccattgtccttaatctgttagtgccagcatcacattttctagatgagaaaactgagggagagggcgtcagtacataggaaataaggcatagagaatcactcccaaaagttggcgattaaagaagcattgaaagttttggctgaggccactgtatgagtgcccctctccacctcaatgtgacccttattctgcatcatatcctgtgtggtgtagaggaaaaagattcaggggacttaacatcataatgcgtctttgttgaaacaagggagctttgttctttacttctgggctctctcagtgattttaacaggaatccagaggcagcagcacacttctcagtaccacaaggaaggtggatgggaataggtttccagctggaagtttatctgtgagacttcaggaacaacctgctgtgctcagagttctgactccctctgagacagtcttctcttctcatccttctcttttctatcttctattttctacatctttttagacctgtttctttgtgtgtgttttttttctctttttctgccttttttctttctttatgtctttgtctttgtttctgggtctctaatttttattgtatttcagtgcctatttatctctctgtctcttttcatctcattgattatctctctctctgtgtgtgtctctgggtgtctttctccgaatctctctctgtgtgtgtgtgtgtgtgtgtgtgtgtgcatgtgtgcatgtgtgtgtgtttgtgcatatatatgtgagaattttgctcaatccagttgcccagaaagccaaaccatttatctcttactgttctatcccagagtctgacaacctggattaccgcctaggagctattcactccctggtatataagctaccagaaaagaaccgagagatgctggaacttctgataagacacttggtcaagtaagtaactgctggattttcagaaaaagttcctattagaggactggcccatgtggttggactac

SEQ ID NO: 137605 - DNA, 1051 bp, Homo sapiens
ttggatcacctgaggtcagaagtttgagaccagcctagccaatatggtgaaatcccgtctctactaaaaatacaaaaattggctgggcatggtggcaggcacctgtagttccagctactcaggaggctgaggcaggagaatcacttgaaccagggaggcagaggttgcagtgagccaagatcgcgccattgtactccagcctgggtgacagagtgagactctgtctcaaagaataaataaataaataaaaacaaaaaacaaaaaaaaaattgcttgttctacagaagatcatttacgttttgtgaccatataagttgcaacagtggattgtttttatgtgtaggttttattgttaaatacagggactgtttccaggcatagaatatgaatcataagttaggatggacattagctgtgattatgataatacagcaaaggtctgtggtcctagatctacaaatgtgtggtgagaaatatctacaaatgtgtggtgagaaattagaacaaactggagatgggccattgacacatggactctgcctaagcgtgttagaaaaatactttgactccaagccttaaaatactcacatggagtcggcgctcacctcattcacacaatcatagagctccctggacactgaacctctaaagggaaaaggtctgccctggagcagaaggatcatggtttgcttgggagcatagcaggtaagctcagagctgggcctgggcctgggccagggccaggccctggcagcactgctacttgggaagagccacttcacctttgtatcagttattaaaaatagaatttggatcctttggtgaggttctcccaaattcatttgaggtgtccatggtcaactgcttgagctgttttggcaaccgcctgcccgaagtcacatttaggctgttcttcaccttgtttccaagactgaggaaaagaaagtagcctctgttttgagcaggtagaagtatacatttatttttttactgcaacttgctcaggaccatattttacaaaatgccttgtttcctttattgtttctggaaa

SEQ ID NO: 137606 - DNA, 1072 bp, Homo sapiens
tgtagatctaccacagccctataacaaaacagcaagaaagtgagtcacttaagtttttggtctactagcattataaactgccagctgtccgattcatagtaaataccatcattaatgatgtgtactactaacgcaagtctgaatatggatgcctttgtgtgaaataaaattcagccatatattttttaaatgtgtctggtaattgaactaaggtagacacttggtgttagcttacatcgtgggtagagaaacatatccttcctgttctggaagcatgatagaaattgtatttttaggctaacatttcacatatgactttgctcatgctgaaagcagacaattcaaagggctaaatataagtattttgtgttataagagttaaaatgttaaacctcccctgaaaaaatgactctttccatttaagggtgactagaaatgagcaactaaaaacccttagctctctcaatgcagtccctttgcatggtcattaaatgtttaataggtgacacctgttgcagcaggatctaactcttttcctttgcttgaaacagtggagctaaatgaagtgggcttcaagtttgtcaggaagtgcatcaatattattgagaccaaaggtaagatctgaaccatagtcttggcattgtctgaatctcgtcactctgattttatcctgggcaatttctctgaagtagcgttttaggaatgaagactgtttataaagcttgtgtagtagatgcaagctagaaaatttcagaaaattctaaactagtggtatgcaagcatatttggataatttggattcctgcttttaaagagcttataagtttataaagtattctcaaacagtacctggcactccttaagcagtgtcatgatggttctatcctaaatgatcaagagttcaatttctgccacagtacatactggtatgaaaattgatggggcagagccaaactcagggagatgtggaatcagcattcttcctggttgccgatactccctggtttccttctgaggatatttagactgtgggcaagtgtggtatgtgaatcaagtctctttgttctttgaa

SEQ ID NO: 137607 - DNA, 1026 bp, Homo sapiens
gagtctagagttgggagacagaaatgtttttctccctccttcatctgccactttaatggaagcttctttgctcagctaccctctgactttctaagggaggttttagacagccacttaccccgtcacaatttccctccccagaggcctcatgaaaattttattctgtacacttaatgccattcagtcagcccatttctcctacactccccttacatgatatgtattgagcttcctattaagtcttccgtcttgggaaagagtgctggatgactctgaacaatttctcctggtctcagccattgattcttggagcggggagaaaccatctgccatcttgctgcaaatactgtttgaagggacaagattctcagtgagtctacacattgctcctgctgccttgaccagacgccttccaagtgacactgaagacactgtaggaagcagaaacagcttctgtgtctttttttaaaaattgcctgttaattcttgtttcatatcaggggcccttggacttaacactgaagtactgtgtgagaaggaagacggagtctatcgacaagaggttctgttttgacatagaaactaatgaaaggtaagctgtgccgctgtgaattggcaatgtccccacgtgccagatgcttagcctgggtaggtcttttattttcctccgtcatcccacgttgatgacaatgagtaagtctattcaggactttgttgtgagtctattcaagccagctcttctggctgcccttcccagggatccctgctagacctggcccagtgctgcttttctctgtgcaagcttctatcagctttgcctcacttgctctgggaagaaaaagtctctcctgggatttaatttgctatcagatgtgcaaaaggtcaacatttggtgatcttgcaagaaggaaaggataacaaagctcattctttgttaaatctcctaatatcacataaaagaacaaatgaattggcacacatttttgagggagggaagatggggtggagggtcgtggtgttattaga

SEQ ID NO: 137608 - DNA, 2009 bp, Homo sapiens
ttcggtgttaaaaaggaatggagaggaggagacagttaaaagagagatgtgtagagtcatgtacaggttagaaggggcataacccaatgaccaatgacatggaacagttatagagacagcaaagtaaatgacaatagtctccagcttctgggatatatggtgatacaatttatagggaacatggcagggagagtaggttttgagcaagccagaagcagctgtgggaagcagttggtgaaggttagaatctccctgtgtgcagtaggtaggtggctatggaaggagggcggtcagggcaagggcagggctggatctgaagtttgactctgaagagcaatgtgtaaatagcttccatcttagggttgacttcctatacagctaaaatagttattctgtctgctcacttttacttgtccttgtaggggctttaggaatatcctgggtgaaatactattgccagtatgagaaagagaccaaaacactgaccatgacgcctatggagcagaagccaggtgctaagcaggtcagttcttgtttgcaccatatttttggaaatggatctatgactgtttctcagaaaagaatatatgttgacctagtatcaaatcatcaagttcatcactgttacgtgaggccatgactttatatgtacaccttggcctaagtttgagtcagatagcactgagttgagtgaaaaatttctctgttgattagagcaagccttttgaaagtgccggtagtctttcaaaccagttatttttacaagtgccagtcacattgtacagtcaactatgtaaaaatatggatgaattacttttaagaatgctctactcttggattctttaaaatagcaagttttaaaaatatgaattgaattccaaaattccttttttacaggagtgtgtttatggcccacagttggaataaccgatactcacattctatgtactactcaaatatctttaagcagttaatctctctttttctgccctccaaaccttctctcactcctgaaaatgacaagataaatttaacacactgaaaaaaatagtttacttacctggaagaacctgatcttttacaaacacacacacacacacacacacacacacacactcacacacactcacacacacagatacacacatgggggttccttaagataaaagctgatctttagacagattgtttatattctaaaagtagttcaatgtgcctctttcccctttaactggctctcagacagggtcttagtgcatgatttttaagcatttgcactctttacaaattgtttgttggaagtgcttcaagggttatttgttagcactgaaagtagtacatgaagacccaatttaggtagggaggaatttggagaaaaattgggacagtttctctcccttgctgatccttttcatggaagatctctcttgtgtggcttgctcatgttgaattagagaggatggaaatgtgctttcaggctactgaaatttttttggagtgagagtggtcttttaaccacaagatttagctccctgctttaatgtgctttggtgatgggatggacttgtaaaagatgttgtatcaaacagagtttctggaatcctcggctatgctttattattattgttattattattattattatttgcgatggagcttcactcttgtcgcccaggctggagtgcaatggcacaatctcggctcacagcaacctccacctcccgggttcaagcgattctcctgcctcagcctcttgagcagctggtattacaggtgtgcaccaccacacccagctaatttttgtatttttagtagagatggagtttcaccatgttggctaggctgatctcgaattcccgacctcaggtgatcctcccgccttggcctcccaaattgctgggattacacgtgtgagccacggtgccagttactgtgcttttatcatgggccagttactcattcaaaaccctcctcagtttccagtccgccagttgccaaagcacctttca

SEQ ID NO: 137609 - DNA, 1073 bp, Homo sapiens
gtaaatgttcaacctgatatgaaaacagtgatgtgtagactggtttgtgtttgactgcgtttagcgctatactgggtaaacaccatggagttttttgttgttgttgtttgtttgtttgttttttgtttttttgagacagtctcactctgtcccaggctagagtgcagtgatgcaatcttggctcactgcaacctccgcctcccgggttcaagccattctcctgcctcagcctcccaagtagctgggattacaggcgtgcgccaccacggccagctaatttttgtatttttagtagagatgggatttcaccatgttggtcaggctggtctcaaactcctgacctcacgatctgcccgcctcggcctcccaaagtgcagggattacaggcataagccaccacacccagccacaccatggagttttttggtgagttcatgtttcttttatttagtttattagaagatgctggtgataaagttatttttacatgttttccctaggtcttggcctttcttcatagtctgttcatttctaacagcctgactgtggagctcacacaggatttcctcccatacaaacaacagctccaactcagtttacagaatgtgagtttgcatgtggatttttctcaccggtctttccattccgattgaatttcagccctagcgaccttgattcttggaattctaggttactgcatcctagccaatttgttagaatatactggtgtggatcacaaatatttagtatatcagactgttcttgctcttccactttcacatctttcctgtttttgaggctgactgctgttcaaacccacccttccacacaccaacaccttcatctatgcaatatttattaagtattgctaatttgctgcatctctctcagatcaggacatagctataggcttatttgagcccaggccttaagctacttccctgctcagtcaaaacactctcactgtagactttattaccacaaacactcattttatcttctctttcttttctcagtacttattagtagagtcacataaattacttttaaaggttttctctaccttctttgtc

SEQ ID NO: 137610 - DNA, 1025 bp, Homo sapiens
atagtagcatgcttctgttcttgggctttggcccttgttaatttcttattctctgtattcatgtctctgtagtgtttgagggagcagattttcctctgacttcagttctctgttgaatataataaaatgtgtggattttacacttgttcagcttttttctttttgtcagggtggatgtaatgacttcaagctttttatgtgttggaccagaaactggaatcctgtatcagtcacttttttatctcttggctttaggttctctatttctaaaataaaaggtaacatcactagttggtggctaaatgctcatctagctctagcattctgttcaatccttaagtactgactttcatgaatgaatatcccaatatgtaatgtttgttttccttcttctacaggcagacctacaggtggacaaggagaggcacaattttttcgagtcctctcttgattatgtttatcaaatccaggaagttcaggagtccaagaagttcaatattgtggagcctgtaagttttctctgttgatgaatggtctaaaaatatttatcaaatgcctggtaaatgtacaaactttgatcataaaaacagaatcccaaagaacgtgaaggataatcagtggaaatgtctagaacgtagtctaacttacgtttttcttgttctttagtatactttttttctctctttccccccaacccttttctctctttttctatggctattttctttctctttcctttttttcctttctctttcctccccccttccggaatttctctacaactcttcctgttactttgtttccctcccttccttcttcttgcgctttcagaagcttctgaaagtctttctcatataccagatactatgctagggactcatgtctcttgcagtcagtgacttctcattctactacttttacttctgtcttgtgtagttttttcccatttcacgttttttcattccatttacttcgttttgtgtagatttttccatttccatatatttgtttgagacagggtctca

SEQ ID NO: 137611 - DNA, 1091 bp, Homo sapiens
ccttgccttattgtgcattgttttgaaaattgccctcctagccagccatccctgctctaatgattcaccttcaaactgtgatttcaagtcttttggatcttcttatgccatgtgttaggcagcctctgacattcagaggggctcataaatataggtatgctatggtagtatatttaggaccagttcttttgcctccttcttacccatatgcctttaatcagcttctgctcctctggcaatatgggcataattggcatgtgttttcagcagagctcattatagagatttccattgcagcaggcaattttgtacaagcccctgtctgacattattaccaaagctattgccgttgttttgtcaggtctaacaagtccagcaaggtctggctgattgaagcattcattgaattggccactgggcaaggaggcggttgcttggcagttcttctcttcagggagggtttccttttttagtagcagtcttacctctaaggagtcagcagctccctttagaactggctttcccaaagtgtgtttccccacccttccacccagtggcttccagttgttctgaaagctgctggtcaactgtgcctttaatatttctaatggcaggagttaataatgtgatgtttaatagaaaacatgtgtcatcctattggcacaccagagaaggcagctctggtctctccattaaaccagcaaagatttttgttttttaatggtgataagtagaaataagtatatgggatacccacaggtatcttttactttgaagtcttttgtagcttctgcttttgagaataactgatagagggaaacttcttagccttgcacctttgctttttgctcctttccagaagtcctgggcagaagagagaggggataaggaatagtcacttgaggttgggcgtggtggctcacgcctataatctcagcactttgggaggccaaatgggtggatcacctgaggtcaggagttccagacaagcctgggctacatggcaaaactccgtatctactaaaaatacaaaaattagctgggtgtggtggcatgcacctgtaatcccagctatttgggaggctgaggca

SEQ ID NO: 137612 - DNA, 1090 bp, Homo sapiens
cccaagtgtcacgtttgcaattgctcaggaaggatccggcccgtctccggaggcaagtcgggctgcggtttttgctgcttatctgggaaggcgatgcctaagggacatgctgcttgctaggcagcaccctgccgggatccgactgcgatagttagctctccctggccctgaagccatcgccggggcgcctgttctctgtccggaccagccagcgctcctcaggagtctcactgaaacaggtacctgtcctccaaagggacggaggctatgagcttccttaagcgggtcgcgcgctcagtccgtcccctctacttcctctactgtgccattgatgctctcggtctttgtgtctttcccctttccccctactcccggccatcagaaccatgggtcatcccccgctggagttcagcgactgctacctggacagccccgatttccgcgagaggctcaagtgttatgagcaggaactggagaggaccaacaaattcatcaaagacgtaatcaaagacggcaacgcgcttatcagcgctatgagaagtaagtgcaaggcttcgatgagctgtttctctgagctggtgtgtctggcctttaagcctttccacaccaccaggggaagggagattgcagggtgactcccagcccagatctctgaggcaaatgggtttcccacacttggggagtggagatagtagaagtggaaagtggtggatacaaccagaactttgggccttttcctttagtggttttgaccttataagacgtgatccgtagctgtgccagggaccctcttgctcagcaattacccttacttggcagatgattgttcttaagggacaatctgctgtactgttagacatattcagcacccctgtctggggcaaagtgacatccaagctgaccaaggaactgccccagcacctcctaaacaattggggattaaggtcagcagcttgaataataattttgtcctggtctctggttgctacagataagtgtggggggcagtaaaaaattcgccatggcaagttattttttaaggaaagcacctttgccccagtgaattattttctttatcacactgagctat

SEQ ID NO: 137613 - DNA, 1067 bp, Homo sapiens
catgctggccaacatggtgaaaccccgtctctactaaaaacacaaaaattagccaagtatgatagcgggtgcctgtaatcccagctactcgggaggctgaggcaggagaattgcttgaacccaggaggcagaggatgctatgagctgagattgcgccattgcactccagcctgggcaacaaaagccaaactccatctcaaaaaaaaaaaaaaaaatcaatagccctaggttctggtcccacctccacatataaagctaggcaagtcatttccttctcagcttcattttttgtatttgtgaactgagcatgattatacttgccttgtctaatgcagtctctgactggtaaagtgccttggctatagtctttttttcttagaatatggggtagggaacctaggtctgctgattgtttgtccattggtctttaattatagcgtgccagcatgtgtcttagtagatggggagaaggaaagggtgatttgtgggatatgaaataagcgaaactggaagtctatgtaaagaagtgcattcaggattaggggacagggagggcaggtggtgggagaggagaggtaggaaggcttggccagccaaagagagccttgatgtctgaattctaggagggagagaggtagatattagaataaagacagaaaatattaccttcgcttctgtcttttcttgtcttgtaggggatttgtggggccctttgatcctttgtgtgacactcgcattgtaagtacttgcattttctttctttgtcatttgagctagactagacttttttgtggatttccaaaattgtgggggattttgattgaatatttcatttaggacttatatgacatgttgtacatgttatactccttaggtatttaagcctctaaagtcactttccaaatcaattaaaatatgatgaaattaggctcaccttccttaaccaatgacattttagtctgttttagccatgtctattcaacaaacatttatttacttatttactctcctgttcctccctattattaaactaagtgaattaaggtttaagcaccctttgtttgcaa

SEQ ID NO: 137614 - DNA, 1053 bp, Homo sapiens
ctatgcctggctaattaaaaaaatttttttttttgtagagatggggtcccactgtattgcctaggctggttttgaactcctgggttcaagtgatcctcccaccttggcctcccaaaatgctgggattacaggcatgagccaccatacctggcctcatattttgttttaaagaaaaatcaaactaaataagggccaaagagaagtgttcttaaaaccactaccactgtacagagataaccttgttaagttaaattatcttaaattatcagaggtcctttgataagcttcagatgccctttccaggccctgaaatcataggcagacttttttgtgtaagaagagtatgtacgttttggggggcaagtggtccctagcttttaacaaattctcaagtataataggtctataaactagaaaggattaagaaccactaccttagaggttcagagaaagatatctgtaggaactagagcagatcatctggtgttagatgattgacttttaaggaatttgagaggagaggaggaagagtatggggaaagaaaattaaagcatgtacttaattttttttttttttgagatggagtctcgctctgtccaggctggagtgcagtggcacaagctcagctcactgcaacctccacctcccaggttcaagcgattttcctgcctcagcctcctgagtagctgggattacaggtgcctgccacaatgcccggctaatttttttttgtatttttagtagagacggggtttcaccatgttggccaggctggtcttgaacttctgacctcaggtgatccacccccccacccttggcctcccaaagtgttggtattacaggcgtgagccatcgcgcccagccaaaagcatgtacttaataattaatgttaggatgtagatgttatgtaccaagaaggaggcaacattccgttacatagagaaatctatgtaataagctgtgtcataacacccatcagttgtatttatgatctttattaatgtattttgtttttaagatctttttttcagagcctctgtgtgctgggttac

SEQ ID NO: 137615 - DNA, 4983 bp, Homo sapiens
gatgccaagctcatgaatgtttagtaaatgttaatagttgtgacaatattactgtattaaacattcctttttgttttgtcttgttttgtttagcctccacagctttccttgctgatagccagcctccaaaccgcagagccctagctgtttatcctgttttcctgttttactttgtcatcagttggatgattctcacctttactcctcagtaaatcaggaatgggaaattaaaaaccagtgaattgaaagcacatctgaaagatgcaattcaccatggagctttgtctctggcccttatttgtctaattttggaggtatttgataactgagtaggtgaggagattaaaagggagccatatagcactgtcaccccttatttgaggaactgatgtttgaaaggctgttcttttctctcttaatgtcatttctttaaaaatacatgtgcatactacacacagtatataatgcctccttaaggcatgatggagtcaccgtggtccatttgggtgacaaccagtgacttgggaagcacatagatacatcttacaagttgaatagagttgataactattttcagttttgagaataccagttcaggtgcagctcttaaacacattgccttatgactattagaatatgcctctcttttcataaataaaaatacatggtctatatccattttcttttatttctctctcttaagcttaaaaaggcaatgagagaggttaggagtgggttcatacacggagaatgagaaaacatgcattaaccaatattcagattttgatcaggggaaattctacacttgttgcaaaaaaaaaaaaaaaaaaagcaaagggcctctaaagaatcagcctctttggtccctttgtgctgtcacctttttgccatgtttaacagcatcttggttggcactctagtcttaatcttgctccttaactttgaatatgcagtctaaaatgtcagtagtcaacatgtaattttcctttgaaattctgaatattccagtgctggaacttatccaaaaagaagacctcagaaacttagattggtagatctctagtgcatattatcatgtgggcaccttctcttagggtggaatgaggcagtctggatgcagcatagttaaaaggagctgtttaatattctctgtagtctggcctcttaactagaaagtaaagctaaatcagaagcctgtatttaaccatgtgaacagggagggatttagtgttctgatggctgattaatagaacagctagatacttagagcatgacgtgggatgggatgagtttacagctgctgccttttcatggtgagcttagcagttttctcattagatgtgtttttttgggttggggaatagcaatttattttattgattttagactttatcaagctaattagctcccctttagataagtacatgttgcacatgtgcacctacttgtaatctcagatatttatgcacacaagtgtgaaggtttttcagggagcagagcatctgggacaggctgattctgagctaaacagggctcctttaaggcaatatgaactgttgccttctataaattgcacattgaggaactctaatagacaaagattaggtgtcaggcagaaaacactcattgtaaatatactattagttgataaacataggactttcttattccccagtttttctttatcatataatttaaatatttattcattttgtatttaaagactacctacacatagatatatgattccaaagtcatactttctccatccccacattagccaagtgaatacagggccaaatgggttcttggaatgataataacaaagcattacaaagtgggtccccttggttccagccttgtccagagtttttggttatatatttctatttattacaatttaccttttaaattgtaaaataaacctttgtgtggacagagccaatgtttcaatcttgaatgagtaaagaaaatactttggaactgatcctcattttgaaattggttctaaattattatccatttccaatgtctgaaattctcttacttcctgctaaaactctctttctgccaaagttgtttcgtaatctgtctcaatgactataatgtaaaattaaagaagtaaccatgcttctcaagggggaattaaaagtgtttattgaattttactcaggctaattgtttggtcagaaattcctaaggccacagctttggggggttcgtgtagatgtacatggtgggtgggttataaatattgggacttaaggcagcttgttctatgtatttatctttgctcttgggtgacttagggaatgattttatttgatttaaccttctttctgtttgccccgagaatactcgccagtggcgcttgcagttgtagcatttaccccaagataactttgcctacgaaatatttcgcttttattattttcacatcattctagtatatggactttggaaacaaaagacattgttctatttatagcattcttttttttttttagtagcggtatttccatttacaaaatatagtaactcttgattactgaaaatgtcaaatcctagaaaacgtagcatgcctatacatgatgttaacatcattctcgaacagttgttggccgaagattcatttgatgaatccaatttttttgaaatagacaattctgatgttctctttagaaataactcagtttttatcttttttcacattgaaaatcagttagatttgcttaagcctcaaagagaatgtttatgtaaattagcgctggcaatttttttttttctaaacaggaaaagggttaaatgaaggttgataaaatggatgttcaattgtctttctgaaagtgagtggcttgaagggatgaataaatattttcttaatatattcaaaaaagtgcattgctttctgtgatggaagttaagacctaaatgtctggaagttgtaaccctcaacacagcttttcctgatttgctgcaaaggcacatagctgattatagaagtgaagacggcaaggacggggactccaacaaaggaaaccctgttgcaggatttgggaactttcatgcttcagatgaaattcaggcatgtgagcatcactgcagaatgtggtgcatcattgccatcatgagtaatcacttgctgctcctacttctgagaccaagactcttttgtcatattctttagcaataggacgggtaaagactggatttaattgctgttcagagtataaaaactcaattgattccaacatatctgaatgtgcagtaaagtcttaaaagtcaaccgttaatcattaagtcttttgcctctaaagtcttttgcctctgaagaggtttattacatgagttgattttcatattttcattttggtggggttttcctgttgttgggcaaggtggggtcacaggacatgggactagtaagcattttactgtttactatatttgtctttttataaacagtatctcccaaaatgtgattagaaggctaccaagcctgtatttggacatttaattgtgtgctttatataatgtaactactaacagtatttggactgcctgttcattcctggagacaaaaatgaaaatctgtcagttcaagttcttgggtaacatcaagtcattagaatttatctaaagcttatcatgatttgataagacatccattgcatgcagctgttttagctcagtgcaaaacactgaaattgtgattcttagactgtttctgagacatttggatggaaataaatgtataaatgttaattcatgtatataaattagaaacacttttctagattctgtaggcttttgttaaaaatagagaatttcttggggtttacttaggccacagaatggccaaataataataatgacaatgatattactaataataatagctaacctttatttggcacttactgtgtgccaggcactattctatttttttaagaatttttaaaataacagctttattgaaatacactttaccataaacttcacctttttattttttatttttatgagacagggactcacccaggctggagtgcagtggagcagtcatggcacactgtagcctcgacctccctgggctcaagcaatcctcccacttcagtgtcccgagtagttgggactacaggcatgcgtcactacacctaattggctaatttttgtagtttttgtagagatagggtttcgccatgttgcctaggctggtcttgaattcctgggctcaagcgatccacctgctttggcctcccaaaacagtgggattgcaggcgtgagccaccatgcctggctgaaattcaccttttaagatgtacaattcagtggtttttagtatattcacacacaaaattgcacaactatcactaacatctaattttagatcattttgtaacttcaccaagaaaccccaggtctgtcagcagtcagttccattcccccttcatcccagcctctggcaaccactaatctgctttctgtcactattgatttggccagacactattcttctgtgcttctcatgcatctcctgtaataccagtgctacaattctcattttatgtggaaaattgaggcactgagaggttaagtaaattgcccacggtcacacagtaatttgatttacaacagtaataacacattagatgagaacacagtaggacacaattttgaattccatttttatgtacctgaaatgaatacacccctcccccaaggtattttccctattgttagcctttgtaccctaggtacaaatataggtattttccctattgtgttatgtacctgaaatgaatacacccttcccccaaggtattttccctattgttagcctttgtaccctagaactgactggatgtagataacatttgttttcagagtaatggaacactgtatcagcagcatctgagaacataagaacagttggacattggaaagaggtttgttgccctcatccctccttgaacctctttt

SEQ ID NO: 137616 - DNA, 1124 bp, Homo sapiens
ttttcctagctgcctttattttacatcactgtgcaaagtagataaagctgattatcttatagctaaagaaataggctcagagaagtatgtcctgggttataaagtcagtctcaagaatgcaattggttgttcctcatgttaatccaatctttcattttctaatgagaatgcaaaagttgaagtgaattcaactgaattgggaaatggaagaaattagttggctaagatgagaccaaattattgagagtaggtattgaaaaccagggaattgtgaagttaggtcttactgtggtgggaaatagggtgacttcaaggggaatatcttgatgaaagtgacctcaaaggaataaatgggaacatggtgggaaattggattgggaggaaggtagagggaagaaaagagtgtgaatatatttctaagctgtaagtctgaagtcgggaagaatggcgggctaacagttgtggaggtactgactttggctgtcacagtggtgatattctacagaccactgaaaataggcgcctggagggtagtattatagaagtcattgctataaatgtaaatttgagcttacagatgtgatgaatattgagagaacactgtcccaggcacagtcttgatgacaaccacagtgctggatgatagacctatgaaaaggagccagaaagatgaggaggaagttatgaagctaacacttacctaccatggattttcacattgctatcttcatctaacactaaccctgtgagatcattccctccatttttttcagaagaggaagaagtttggattcaataccttgcccacagtaagtggctgaggtggaatgtgaatacaggtctgtctgaactccaaagccttggtgctttctgctctgctgttaccaccatgcccgattaatttttgtattttttgtagagatggggtttcgccatgttgcccatgccaatcttggactcctgagctcaagcgatccacccatctcagcctcccaaagtgctgggattacaggcatgagccaccacacagccaaatgttttatttatttaagtaaaaacatggaagtgttgatgaatgtgtgtgtcgtccttctgcaggggccatgctaatattctccctatcg

SEQ ID NO: 137617 - DNA, 1093 bp, Homo sapiens
caagtagctgggactacaggcatgtgccaccaaactctgctaattttcattttgtacaaaaagtacaaaatttttgtacagggttttaccatcttgcccaggctggtctcaaactcctgaacccaagtgatcctcctgcctcagcctcccaaagtactgggattacaggtgtgagccactattcttggtctctttttttttcctttcttcctctgactggataatttcaaggggcttgtctgtgagtccattgattcttctgcttggtcaagtctcctgttgaaattctttagtgaatttttcaattcagttattatattattcagcagcaaaaaaaatctgttttattctttttttatatgttctattttttggtgatattttcattttgtttatgcatagttttcctgagttcactgagcacctttgtaacagctattttgaattcttggtcaggttgttcatttatcttaatttacttttttcaattttataactttatttgatgtttttgatgatcagtgatgtagttctcatccacattgactgtctgtagattttcgaaagtggtaacaggtacataggtaaccaaagtatagagcttgtttggtgaatcttcatcctcattacattttctagacaaccgcacatgggtagggtatgggacattccttattcctttggcccagacagctttgttgaacctggtgtcaatgcgcacatctggagttcccatctccttcatggcaaatttccgaatctctttgagtgcccgaggggcacgcttcttgaagcccactgcatggatgcgcttgtgaatgttgatggtgtaccctcgggtcaccatcttgttgatggcagaacggccctttttcttcttgtcatccttctttgcgggagccattctgctgggtctaagttggaaaggaagctatcttaatttctttagagttggtttctggagatttattttgttcctttaattgggttatattaccctcttttgttgtgtggcttataaattggtgctgttttctgtgcatttgaaaaaaatagctatctctactggtctttacactctggctttgtatgg

SEQ ID NO: 137618 - DNA, 1058 bp, Homo sapiens
caaggtgggaggatcatttgtgtccaggagtttgagaccagcctgggcaacatagggagaccccgcccctaccaaaaaaaaaaaaattagccaggtgtggtggtacatgcctgtagtcccaggtactcaggaagctgaggtgggaggatggcttgagcctgggaggttgaggctgcagtgggccgtgatcgtggcactgcactccagcctgggtgacagagtgagaccctgtctcaaaaaaattaaaaaaaaaagttttgaacagagcgttggctctggagtctaagcacttagatttaagtctcagctctctgcttgttggtcagatcagcttcagcaaattctatcacccctttgaccctcagttgtctgctctgtaaatgggatagacatgtcctcttctcctgtctcacagggttggtgtaagggccaaataagaaaagagattgaaagcaccttggaaactgtaaggggggccctatttatctccatgcttgtcactgcaacttgactgtaagcatctttgaaacagaaacttggcccctcgagggctgtgtccccattgcctcttgttccagtttgtccagaatgggaaggtggtgatgccgggggtatggaactgaatccccagagtcgtgctacacctggagatgctgatgctctgctcctgccctggttctgggtacacagctacttgaccttcctttgaagccaaacccagctgagaggaccatttttctaaagttacttggcttgcaaaatgctgctcctccaccaagtgggcactggcccagcctcactgccccagtgtgctttcattactttgaaaattctgcaactcttgtttcaccccctctacctccttcagctcctagttcctcagattctggctccaagtaatgatttcaaagttccccatgccccccacccacccccccaatgtatgatacatatatatagagagagaggaagtagaaagatgtggccaagaaaattcaattttctgaatggatcagatgtaaaactgttggaaattacagctagaaagctctgcagat

SEQ ID NO: 137619 - DNA, 2443 bp, Homo sapiens
ccgaacccaaaggggtggacgcggcctccaggtaggagtctgggcgacggcagggggagatccagacaaacgggggcgcctggggctccctctccccgctttgcctctctggcgcgctccggctcggcccttctcctagcggttccgccgggcggcgtacgcaagagacagggaggaagcgagccgagccacccccgcccctgggattggggggtcagaatcgccgaaattgggggacccccgagcgcgccagccgcgcgtcttccagcgaagcctcgcgagtggggcggtggaaggcagctgtccgcctgttaccgccgggcccgtgggtctcgcagccgtcgctctggggctttggaggggcgttgcagctggccgggggcggcagagcttcaggctctgttgccgggtcgcgccagatctcctgccctctcctttctctgctttcgagggcatttccaggaagcccccgtccggctgtatgggttttcccgtcggccactgcctcattgctttctctcctgagaaatgcccaggacttcttggtattaagatagctgcggggaccaagcgaaaacgtttggacacgtctcatcttcataggcctcattttcccataaagtccaaaatgggtttggattagaggaaaggcttttagtggaagtttttggaatttccaaattaggtagtgtggggttctctccacgttcctcctgacacttgtgaaagttgcgcgctgaattacgactcaggaaactggggttcagccagtccatgtgaccttaggcgagtcatactactgtgtgggccatagtgttttcagccacacctcaggtggcagcttgatttcagtatctaaagggcccggtctctttcaccctgacatttgtttacttggtacctggggtcaggctcctaactggcaggtaaaaggttgtctctgagacgctcggggtggcagcagctatgcacacggagagctttgtggtgattatgcagctaagccagctggaaaactagagtgtgcgtggaggggtgggcgacagcagccagaccaaggtagggagaggtgggagttttcttccagagcctggggccccagaggttgggggcctcagagattgggctggcttggagcctatgcttacccccaagtcccagggcctggcttctctcccagtcagagcctaagcggggaggaggggttaatgaatcacacccagggctattttcaaaccctgactcctcctgtgcgacctgctccctccccactctagggtttgccgcccccccgccccccacacctgtattattgccctctgagttttcctctcattttcatcctcctggaatgaaagggggacaaatcttgtctgcggatgcgatgggaaggtgggcagcccaaaggcatggagaagaaggctgcaggtgatttctgggtggctttcgcagtgggaagagtgtgatgggaagggtggtgttttgctgtaagggcataggggtcggtagtgaaactctttcactctaaaggtacagctgccatctagctggacattctgggctggttttcattttagggacgtggccttttgttaatgtgttggactttggattttggatttctgctccctagacctctatatttagtgctaggaaacaccacactggacactgcctctcctgtttttggagaattatgctaaacctctctgtgcatctacagctcccctcccccacctagagaggagaagctgcctacagatgatatctggaggtgtttagagcaagaagggctgaactgaaggtgtgcaaagcaaaggggctgtgtgcgctgtgtgcttgcttgagacagggcttgcagtgagtcatgtggggaggatggcagagccttccttattcaaacacaatacctcctgagttccagcagagaagcaaagaaagtggcaccaagaagactcgaatgttgtccctctctgtcctcttaaagttttaaaattccattattgggactacagattggagagggagcagaagacccctgtgtctaggtttagaggatagcaacagggacacaaaggcaagaaggtcccaaaggaaggaggggatggagtctccaattgggaagctgtcacagctgcagctgctttgctgctaggagactcctggagctccttatttgagccatggaaagttcaggttcaacagatggcaggtttatcacgtgcaggctgtgccctcacctcttttctggctagaagaaagggttgcctctgccttgaaaagaagagaaggaccttttgccttaggctcccagtttggttaggatcaggtgtcatggccctgggccttgggaaagctgttcagcagataaaatagggacagcagatttcaaagatacaagggctttagggtgggaagtgtgagctcccggagatctaggtga

SEQ ID NO: 137620 - DNA, 1102 bp, Homo sapiens
tggaatgtgtgaaagttttctcttatgttgaacttaactgtgcctccctgaggcttctaaccctgggttccgagtgtgccctctgggaccacctggaccctgtctgctctctctgaccttcagggatctgaggatggaacccaagtgcacctgtgtcttctctaggccaaacaaccttcaagcgtctgcgctccttctcagacctggagcagcccccttcccagcctcatcactgtcctctgtcctccctacatgctactgtttatggcccccttaacatgtgggggcaggaaatggggcactggaaacccctcactccccttagtttatttatagtctgaacttgttcagatgacttttccataatccttttctggttaccacaacaggtagactcctaacccccagaatcttgggtgcaaataccttagacaacactgatttgtttatggttcaggtccagccagctctcacgattggagagcccttggaaggtagggccttcttattggtgcccccatagtggaggacaagcctggtgttagtaggtgttccccttgttgagttaaatacaatgtaatatgtggggggcttccagcgtaccctgctttcctgccactcggttttatctttggagttggtcaggggtgggtggagggaaggggatattttagggagtactgaagccggaaatgagtatgagccatgcccacagtggggcctagaagagtgaatcagacagtgagaaataccaacgtagccattccttcccctggcagttgatgatgatgactatgagtcctcccatttcttcagttgccaaggcactttcacttccatgattccattgtgttcttagagcagccctgtaaagtagatggtatgatttccccagaatgatctgtggtggtctccacctgaggcccagggaagggaagaacagtctccagtgagggaggatttggagcccaggtctcctgaccctcagccctccctgttttccccaaaccacacccagcagccatggcagccggggctgactcggcagcttccccaccacagaggaacccctgccctggctgcaactctgttcctgtgagag

SEQ ID NO: 137621 - DNA, 1042 bp, Homo sapiens
taggatttcctgtcctttatctgggctggccaaaggctggcctgtctgaggtgtgagataggcacctgcagccagcctttctgctccaggctgaggtcaagtcaggctgtggcagaggcagtgagcttgtgggaagagcttgtccccaaacatctgtcctgagcagtgcccacaccagcagggccttctaaatgggaaaaacagagaggggaatgtggaaaaggggtcagagtggagcagaagtaaaatacgtcctgagctgtacacaagctctcatgttcacagtgctgggagactttgggcaaattacttaacttctctgagccttcattttgtcagctctaaaatggagatatgtacccacctcatggagttgttgaatattaaatccaacaatataaataaaattattgccattattgttgcttggtagtaccttctgcagtcctgtcatttggttgtttttcactgacctgggggtgggcagttctcaaacctgccacctcgtgggcattcggtctggactttgcagtcatttcagagtccaccttacccagaaaagctccctttggccatgcccacccacagggctcccttcctctggccttctttagtggcattcgcgacactcaacaggctatagtagtgatggtgacaccaataataatagtgaactcttctaaattcttggcaaattttaacttctttagcattcatggcaattccataaggtaggtactgctatctttgtctctcttttatttaataaacttgcccaaggtcacatatccggggagtgatggagctgggatcaggacccaggtggtctgactccacctcctgacatctttaatgactgggccatgcctctctccagatgcctggccaggaggcaagagctgaggttcgggtctccttccccacctgagtgctcatcacacgcaccagtgatcagtcacttctggacaggcagtccccaggtccttgcctgtctgctctgtgcacttcttctcaccctccatcaccaaggtggacagatgga

SEQ ID NO: 137622 - DNA, 1021 bp, Homo sapiens
gatctgagaagcagtttgccagggcctagcatttctgagcagcagtagcagggcctgcagtggtaggcgactccttgcctgcctcctagccctgccttgagggaccagcctcacagagcctgccttgggaactggggttgtcacatagatagtggcatcacaggtctttctccgccgctcaggacactggcttttcctcctgcactcactgaaggtgggagagacaaacatggagaccagaccctgttttggaggcccccatcctctggcgagggccacggaggagatgcttttccaaataggaagctaagtcaggtaaaggaggccaccacgtgtttaaagtcaccttaaggagcaggtcagctaactcaatgaccttcacaaacaccgactgcctgccttccctcagccatcatagacattcacactgatgctggtcactctccctgctcctgcactcaggtctagagagaacgtgggcctatgaatagaacaggcctgtgactggtctctgggtagaattttccagggacctatatctgtggctttctagcaggccttttctgtttagggcggtggtctttatctcaggctgtactttagaagaaccgggagagctctcaaaaacaaacaaacaaaaatgaaccctatccccagagagtttaatttaactagtcatgggtggggcccattagtaaaagctccccaggagattttaatgtgcagccagatttgagaggtgagggaggaatgggacgggacacccaagagctccagcagtaataaaggatgctttcatctatgtccctgtgacatccatccattgcttgtcttgagtcctgtatcttcccgcctggtccccatgcctgatactgtctttatgggtaggcatgagcaggctgaacccaggaccgggcagctctcttataacccactgagtgaccagaaggtacaaggactagggttgcctagtagtggtgtgaagagggggtacccagcccaagagtggggttggtgatac

SEQ ID NO: 137623 - DNA, 1034 bp, Homo sapiens
aagccctatgcttgagtgtttctcaagaccagaaggcctgcttttttcctggttgcatccttctcagcatagaaaactgctctgtgctgtctctgggacgtggcctgtgtaaatgtaggtgcagatactgtcattgacctcagaaagcatgtgctgctgctcagcctttccttctttgatgctccctccaggagacctgtgggtttggctctgaggcctgattggactctggagctttctagtatgccctctcccctgactctcccagcctgggtcatctgggcccctcccccaggggcttaagtctcagtggaatccagtttgtgccagctgactgctgttactgacctatcctggcacatcacctaagctttggccagagcatgcactgcctgcagaatatagcctttaaaactgctggcagccatgccttggaatctgcatatctggatacagaggtagggcaaggggccacagacattcctacctcactcacctcagcctgcccgttgtcactctccccaccagatacataagcccatcctcagtccgggccacctgggcttcagccccaggtgaatcgagtctactgggggtgggggtggggtcgctcctggcctcagcctgggtaggctgagacgagtgggagggacaaggcagagcacctcagttcagcctttaatcaccaagacatatgtctctgactgatccatctgggagggagcctcggggcctcccagccctccatgagatggtgtattgtggggagccaatgtccctgacatcctgtttggtaataacccattacattctctagattcctgttaaggagggctggtggggaattcagtctgtagccctactccaaactcctttgctcctttgtctttggagcaattgcagcctctttgaaggctccttacctcacttcccccagccatttggctgcaattctgacagtggtctgggcaaagccattgtccggacccacaggggaacgcagcagctgggcttctttctctaatttcctcttt

SEQ ID NO: 137624 - DNA, 2630 bp, Homo sapiens
gcccaagggtcttcttaaatatagtggttctgggtgtggggcttgggattctgcatttctaacaagctcccaggtgatgttgatgctgctagtctgggactacactttgagtagcaaggggctacagggctctaggtagtcatgaaagaacttggcattgacctgagtgagatggtccccttctgccaacccccagctagggccaatgcctagcatcaggggagggaggtgcctctcctaccctctccattagccatgagtaactgagggctgcagtgggattttaagggtgtgttcctggcatgcaggcctaccctagagatttgctccctttcctggggtggccatacttgtgaccctttaggggccactgtctgctcctgcgcctgcctctctggaagtcctaacctggtccattttctggcacctcccttttgtcctaataacaggaaagcagagctggctgccaggatgcgtgctaagatggggaaagggtctcatcccaggggcatgacaggaacagggacagggaagtggctgtggcagccagctcagctgtcctagcagcagaaccatgttcctcacaggctccctgggcagctccctttggactggtcttacatcacctagactaccactggcctggagcacaggatcctttttcaggcttgcattgccccctgccagacaggtggaggtactgctagcagggctctgtcagacactttccagggacccctcagaggtcctggcgattcctagatctctatcttaggttaggaagttgcagtaacataaaacatacatgtatgcatgcacacacacacacacacacacacacacggagagaaagagacgagagagagagagagacagagagacagagagagaaagagaggcagatgcatgcacagactgaggtgcctgtgggtatatacaggtgcatggtcccacagtgatcctcatgagtcatggacatgagcagatttggctacagctacatgtagagacagatgctgtggtgggcactgacctgttgcattcactcacagaaatgcagagatgttcatccttgcccttacccccatttgcccccaaaacctgcaggggctccaggggctgcagagccctctcttctttccctcaaatcctcatcagtgtgtgacccttgaggagcccattactttttctgactgacttctgacttcccccactcttccctccactgtctactcacctagcatctctgaaatactgttttgtccttcatcttatctgtcccagccactaggatttcatcctgggtttccttgtgagtgagcactgggaagagagagctcttcctgtcttggaaaaacctcaccagcctccttagagtcctctggtcaggggggccaggcgagactgtggccacaggtgctgaggaaatggaggatgtgttgggggcaggactccatggcaggatcagctctgctgaagccagctgacttccccaaccaacccggtgatgccaggtcccatggtcccagccccattcatcttggcatcacctgggtgggaagcaaataaccgcccaggcaggtgcagggctttgctgctggtatttggcctaccctgactaggagcgcctcctctgtggctttagtccagctgcacatctctgctggtgctggcaggggtgctcagctctgtgccagaactcccagagcagaggcgacaggctgacctagccatggccccccaagaccccgacaggccagtactgtgtcttcatgacactcagcactgcactatgacacaaataggccaagagggctggggcagtactgggaagctccctgaggagggaggactataatgagcatgggggtgctgctgtcagactcagctgggattccaaccctggcactgctgctttgtccactgtgagaccataggctgagcctgtttgtttgtctgtaaaatggggatagcaaagccatcaccagttattgtgtgtgtgaaatgagagttggctgtcaaagtgctgaagaatgttagatgcgatgatgagaaagagaatgataggaatggttgaacatttctacttcctgcctgggctaaggtggtctacccagggccttggaagggggtgagtccctcagaaaggctcgggggtggacacagctgtggcttcttatcccagcaggcctccttgaccccagatgatcctggttcctgggcagggggtgggagagtgggaggggtttggaacaggcagggaatgagactcaagaaagccagggccaggatgcccagacagtagggcttggggagcagagggcctcctggctggctatgacttggagcaaatgtgctaggacctctggccttctcttgccattgctagatcaccagaatgagacatgtctgcctgctggggttgggcagcatgcacctagggccctggtgtcagcaccctcctaaccccatttctttgcctgtttctttcccttgttctgttttagaagccgaggccaaaagagcatgtgagtggcttcaagcaacaggattccctcagtatgtgcagctttttgaaggtaaggccactcaactgtttaccctcccatacttcccctagccctcagttt

SEQ ID NO: 137625 - DNA, 2020 bp, Homo sapiens
cccagagctagctctccccacctaggccatgttctcagccagaaagcagggcccttcacctcagagtcccccaagagtttggaagcagagagtggagtacaagcaaggacttgtggcctgggcttctctgacctgatcctgcagtgcctttcccagaatgaagactcagaagaggaagagcagtgtaccatcagtagccactgggccttccagcaggaaagtaagtgctggtctcctatggggtcctctgatctgttggccccaccgagccctggcctgccagcgacctcaagctgtgagagcgtcctcaccgagcttagtgccacctctctgccagtcatcaccgtgagcctaccacccgagccagcagacttgcccttgccaggccgtgcccccagctcgagtgaccggcccctcctcagccccacccagggccaggagggtccccaggacaaagccaagaagcgccatcgtaaccgtagcttcctcaagcaccttgaatctctgaggcggaaggaaaagagtggcagccagcaagcagagcccaagcatagtccagccacctcagagaaggtctccaaagcctcatctttccgcagttgtcgtggcttcctctcagctggattttacagggccaagaactgggccgccacctcagccggtggcagtggtgccaatactcggaaggcctgggaggcctggcctgtggcctcgttccggcatcctcagtggacacaccggggtgattgcctggtgcacgttcctggggaccacaaaccaggcacattccctcgctccctgtccattgagagcctgtgtcctgaggatggacaccgcctggcagactggcagccaggtaggcggtggggctgtgaggggcgccggggctcctgtggctcaacgggcagccatgccagcacgtatgacaacttgcctgagctgtacccagctgagcctgtaatggttggggctgaggctgaagatgaagatgatgaggagagtgggggcagctatgctcacctagacgacatcctccagcacgtgtgggggctacagcaacgagtagagctgtggtctcgggccatgtacccagacctggggcctggagatgaggaagaggaggaggccacttcatcagtagaaatagccacagttgaggtcaaatgccaagctgaggctctcagccagatggaggttccggcccatggagagtccccagcctgggcccaggctgaagtccagccagcagtcctggctccggctcaggctccagctgaggctgaaccagtggcacaggaagaggctgaggccccggccccagccccggccccggccccagcccaggacagtgagcaggaggcacattcaggcggggaacccacctttgcctctagcctgtctgtggaagaaggacactccatttctgacactgtggcctcctccagcgaacttgacagtagtgggaactccatgaatgaggctgaggctgcggggcccctggctggactccaggcatcaatgccccgtgaacggcgcgattcaggtgttggggcctcacttaccagaccctgcaggtgagagtttgggttgggatggggcggacgcagggtctcctgttctctctctgtctctgaagctgatttctcagtcatgaggcccagggctaagtgcttggcggctgcgttatcccctcacagccagctcaggagagagagtacaggacttgggaatccagaaagttaggtccagaacctgcctgtgctgtggccttgaggaaatgatgctctcctctctgggcctcagtttcctcatctgtaaagtgagggaggatgctagaggagatggtctctggtccccagctttgcccattcagggtttcttggagcagcccctccacagtagtcttgggatgggcaggggtcttcactgcttattggcactagatgggcctgagctctgtgccaccctccccaagaacttcttggcccctaagaagctgagtccaagctttttccaccct

SEQ ID NO: 137626 - DNA, 1048 bp, Homo sapiens
agccttccctaactcactaggtacagttcccctccctcaatgggtcttcccctaagttcttggcctcctactggccacatgagttgttactgcctattgacacagttatctccttggccagactgagagctctctgtgttcctctgtgactccctggggctgggcccaaaacaggtgctcaatgagtgttgactctggggcagtggtgtgtgccttacccccctcaccccacctgatcctctgagactgcaggcagagtctccaaactgtgttccccctatctgatcacttgtcattctcccaaacaggtcaatgcccaagttcatgaggaggaacaagaccccagattaccggggacagcacgtatttggggtgccacccctcatccacgtgcagcgcacgggccagccactgccacagagcattcagcaagccatgcgctacttgcgcagccagtgcctggaccaagtgagccctcgtggggcagcctgccgggagatggtgcaggggtggggtggtggtgggcattgggctgaaggctgaggagctggggagaggaactgctctggccttccccctcacttgggctggtccaccagaggcctttgctgttctcagcaaggaccagcaaggatgaaactcctttctactccttatgcccagctctgtgctaccttctttctggcccaggctctgtagtccttatcttctgggagcctgaatttgcctagatccacctttttctactcatctccacaaaagcatcttttttcttttgtcctgaagctgtaaaaatccttctctttggttttcccatttgtctcctaccctgcccctcaggaggcctgataagctttgaagtctctggggtggcctaggctcctgacacccagtctagggctggcctcacagtctgcctcctactcatgcatgttttcctcactccctccctcccctgcatggagtaggtaggcatcttccgcaagtctggggtcaagtccaggatccagaacctgcgtcaaatgaatgagacctcgcctgacaatgt

SEQ ID NO: 137627 - DNA, 1081 bp, Homo sapiens
cggggaggagctgccgcctgagtctcgctgtgcctcggcctggtccttggagaatgtcagagagtcaagaaagtaccttaaggaatcaagaaccaaatgagaccaagggaactctctcaggaaccacctgccagaatgaccttccaaaagccccgttccagatacgatgctgctttgatagcctcaactcccatctctccctgccccgcagtccagctgaatccttgcatttgcacctttgtgcggtcctgctgcctggactgccctgaccccaagcattacgtctcccgagtcacctttagcgacaacggaatgtgttcctcctccattcagaaccttctgtcatgccccaggatggaggggatttctctctgttcccctctgggcactggtcatgctctttcttggacgtggattctgagtaagattgcaagcctgaagtgtcctgtgtaaaaaaatggtcataacaaaaccttccatgtaggatcagggtgagtgtgaatgcctggtacatactaaaggttctgtaagtggcagcttttgttgtgcatgtgttttactgcctgtgctagatggcaagctccttgacaatcaccatcttcctgcacctccaagcactgtgcccatcatggtagggcctgagaggcctctgagaatgtgtgccccgtcatctctttatgctgtctaacagactgaaaagcagacatccagaaaagagagagagagggcagggagcatgggagcactgtctcagtctggccagcgctagcagaggagctctgcagcctaccctattaagcctcaggccctgcagtttgaggcctggacttagggctggagtcagagttctccagccctgacagctgcccccatccccactcctgtggctcacaggcaccggatgggcaccccctgcggctatggaaggcatccacagaggtggcagcccccccagctgtggtgctgcatcgtgttctccgggagcgggccctctgggatgaggatctgctgcgggcccaggtgctggaagccctgatgccgggtgtggagctgtaccactatgtcaccgacagcatggcac

SEQ ID NO: 137628 - DNA, 1076 bp, Homo sapiens
cctgggacagcctgctcgacccccttggccttgaccccctcccctgcctctgcccctactttctgccccatgctattgatccctggggctggggacaagtcctttcttccttctccctggtgagggctctggggaaaaatccattgctcatgcctggtttcttctgcttccctaggggccgttctcctgactggtacaacaaagtctttggacacctgtgtgccatggaagtggcaaagatccgggactccttccccaccctgcaggcagcgggccctgagacaaagctgtgagccttgggctggtcccagggtggcaccacccaggccccctgggcaccaagggagcgagggggaataagagcagggcagccccctgggtgccgctgtcaggagcagagccaggcccaggtggctccagctgcctgtcctgtcccctttcctaaagctcctctgcacatagaggggagaaaaagagaatttaggcaactccactcccccttcacccccaaccctgtattctactctcccgaaaagagaagagaatcgcatgagtagcaagactgctgccaccagccacctgcttgtgaggccgccacttggcatgaagcctccacagctccccgcctgcaggggcaaagaggtcgacagcaatgtgtgatcccagctctctgccagactgagagggcaagccgtcttgtttgctgcaaggatgcttttgaggttggacaggaggttctggtcctgcctttggggccaacgctggctctgaagtgtctttttcagaggaattggactggagtgaatgggcacaggggtggagcgcagggcagccccagtcaccacgagctgtttcatttgtgtaaatacgatgctgaattttatgaggctgagttaagagtgggcactgacgggcccctaatatgtgacatgacgatttggcatagatagggatgtgagagtggagtaccttcctttctcaagtctcgagatgccagtgaaaccagtattccctgacttgggtttcacactttatcgaccaccccatggggtcctgtgtagcctttggccacgcac

SEQ ID NO: 137629 - DNA, 1056 bp, Homo sapiens
accatctccactgtctattactgtacctgtaaatgtccgtcctcctacttgtctggaggtccaagatgcagctaaggcaagaacagcctgcacagcaatgtacaagcctggaacactgaaggactcaaacattacttcagcagtatattccctgttttctggagtattaagtcgaggttcagacaaaataaaataacggtcttcagtttctgcccttaaatatttaagatgacttgctctataaaactttttgtcaggtccaacttcaactataccatggcggattggccactttgttgcatatgtaggttttttctactgcttcatcaccaatgaagaagtcttggtcatcaatacttttcatcaccctcctttgagattgatcacccacttttggtgactccttagtagcaatacaggaaaggatgatcaactgtggttctatatttctggcatatcctagttttgtataccccatgctacagtccaccacacaggcctgcagccctcccaccatttccctgcttgcctgcttctgctgccgccactgtctgctccatgctgctaggggacagagattggtggtgggagacaggggctatctgactgaccatacacagctgggccgccctcaccatttggtaggtagccaggaagcccaagcagtagcaagaaagcagcaagctcagtcggcagccatcacttctgcaacccaggcaggcaggtagtcctcttttttgggtatctatatctcaaatattttttctctgaatgcagttacctttttattctcttaattcattttgataaagagaagttcttaaatttagtggagtctaatttatcaatctcttcctttatagttagtgctttttatatcctgtttaaaaaatctttgcccacctcaaggtcatgaatgcatcctcctggctttttatttcctagaaggtgctttacctttcatatttaggtctatgatccaactgaaattaatgtttgtatgtgatgcaaggcaggagataagggtcattgtttttcccatgcaggcagccaatt

SEQ ID NO: 137630 - DNA, 2447 bp, Homo sapiens
acattaatttcagttggatcatagacctaaatatgaaaggtaaagcaccttctaggaaataaaaagccaggaggatgcattcatgaccttgaggtgggcaaagattttttaaacaggatataaaaagcactaactataaaggaagagattgataaattagactccactaaatttaagaacttctctttatcaaaatgaattaagagaataaaaaggtaactgcattcagagaaaaaatatttgagatatagatacccaaaaaagaggactacctgcctgcctgggttgcagaagtgatggctgccgactgagcttgctgctttcttgctactgcttgggcttcctggctacctaccaaatggtgagggcggcccagctgtgtatggtcagtcagatagcccctgtctcccaccaccaatctctgtcccctagcagcatggagcagacagtggcggcagcagaagcaggcaagcagggaaatggtgggagggctgcaggcctgtgtggtggactgtagcatggggtatacaaaactaggatatgccagaaatatagaaccacagttgatcatcctttcctgtattgctactaaggagtcaccaaaagtgggtgatcaatctcaaaggagggtgatgaaaagtattgatgaccaagacttcttcattggtgatgaagcagtagaaaaaacctacatatgcaacaaagtggccaatccgccatggtatagttgaagttggacctgacaaaaagttttatagagcaagtcatcttaaatatttaagggcagaaactgaagaccgttattttattttgtctgaacctcgacttaatactccagaaaacagggaatatactgctgaagtaatgtttgagtccttcagtgttccaggcttgtacattgctgtgcaggctgttcttgccttagctgcatcttggacctccagacaagtaggaggacggacatttacaggtacagtaatagacagtggagatggtgtcactcatgtcattgctatggctgaagggtatttgattgccaactgtattaaacacattccaatcccaggacgaaatataacatattttattccgcaactgctgagagaccaagaagtaggaatccctcaaaaacaatccctggaaactgctaagacaataaaggagcactatagttatgtctgcccagatttagtaaaggaatttaacaagtatgacacagatgggtcaaaatggattaagcagtataccagaatcaatgctatctcaaagaaagaattttccattggtgttgtttctgagagacttttgggatttgaaatctttttttcatctagagtttgccaatccagactttacataacctatctcagaaattgtaggtgaagtaattcagaattgtcctattgatgtcagacggcctctctataagaatatggtcctctctgtaggttcaaccatgttcagtgactttggatatcacttgcaaagagatttgaaaagaactgtatgtagatgcctggctgaaattaagtaaggaattgagtggcagtagattgaagccaaaatctattgatgtacaagtcgttacacaccatatgcagccatatgcagtttggtttggaggatcaatgctggcttccacgccggagttctaccaagtatgccacactaaaaatcattatgaagaaattggacctagcatttgccgtcacaatccggtgtttggagtcatgtcataaaaatgacttcatagttattggggttagggaggtggagaagagataatctttttcattatgttttgtctggatggctggttttgaggttttaaacctgacttgaaatagtaagaccaaacgtgattatacagaaatattttaataagtgtatcaacatgcaaatgtagaagagaaagaaagtgattgtattttttttagattgaatatttgaatcgtatgtgtaacaaaagaagtgggttttagttccttctgtgccctggtattttgtatgttaatgaattatccaagatttgatggatttatcagtgtgtagatagctctataattatttaattgtatacttctaagtgtgcaatgcaagagcttgtttatatttcatactttttgtactttgaggattaaaaagtcaaagaaaaattgtgtttgagagaaaagtcatgaacaagtaaaggataaatttaaaaaatagccccatgagacttggcatacacactaatgggattccggttattatggagtgcttccatacccctccactccttctccccaaaaggttttctttgcaagtgcttttgaagctaagagctgatatcttggattaactgatgcctgctgctgctttctgattactcacattctgtttcttgcttttaaaaaaacagtaaagacaagagtgttggaccagtattgcagttctgtagtgtcatt

SEQ ID NO: 137631 - DNA, 1020 bp, Homo sapiens
cagctccacagctggaaaggagccctcctgcagagttgggggtgctggaagaaacacgatctgtctgtgcttccccctttttgtgctcagagactttagtgctctggactggcttacaggttttggggggtggtatcctctctgacccccctcctcatctacctcaagctgagggcaggcattgtggggtgaggatggggggtggctgaagactctctagaaactgtccgaattccattctgtaattgggtagatcctgggaaggatcagagactgatcctggtgcaccctccttccatccaggctcaggggtctggaatgcagccactgtctacatgtgttggctcggggtggtgggggcaaatggacaggaaggaggcactgccctcagctctccttgagctttgggggctgcttctgccaccgcgcccaaccctcaggctgccacagcctttcaaataaacagtccctctctgtctccctccctctctgcctcctgcccgagttctcctctcaggcccgtgtcagttcgccctctcataccctccgcgagcagcgctcacttcccctctccagctaggctcgcctgctctgccttgctctcacactccctctcactcttagtcactctctgcctctttttctcaagtccttttgtttctcgcacatgcccgtgctctccctctcaggctcattttctctcttccttcccctcttcctctcctggcttttggtctctctcctcagccctgtcagaagctggcaacccccctcccaaaaaagaaaatctcccagtgcctataaaccctgcttaattgcttccttcttgggaaaaaaaaaatcaaaataaaagaagtggtggggctgggggtccgcttccaggttccaaggtgcgtgcggcccggccccagccctgactgagaggggaagcgggaatggctggcccaagactcccaagcctctttcccaaattggtgctggggccttctgggatgctagtccctgagtggcaggagcttc

SEQ ID NO: 137632 - DNA, 1085 bp, Homo sapiens
ggtcccctcaccccaccctgtttgacctttggaacagatgttcctggctgggtgcatgtgtattaggagtgggggagcaggcgtagggttacagtatccaggccattcttggcccacccttgatgactgagggcacctatgctggccgggtccctgcctctcacctgttctgtctccattcttagatcccaatgctgtgacgcctgagcagctgactaccagcaggcccagcaaggaggcagacaacactgtcaagatggccacacaggcccctggtagtcggggctccctgggtgactctgatggcaagcatggtaagtgtatgtgtttcccagaggtcaggagccattgctctgtcaccttgttaggccctgtccctgaagaaatgcaagctgggcctggcctgaaatctgctgtgtgtccctgggacccctggctgactgttccttcccctttcccttcctcagagactgtgaaccaggaagagaagagtggcccaggtgcaagtgggggcagcagcggggaccctgatggcttcttcaactccaaggtggcattgttcgcggctgtcggtgccggttgcgtcatcttcctgctcatcatcatcttcctgacggtcctactactgaagctacgcaagcggcaccgcaagcacacacagcagcgggcggctgccctctcgctcagtaccctggccagtcccaaggggggcagtggcacagcgggcaccgagcccagcgacatcatcattcccttacggactacagagaacaactactgcccccactatgagaaggtgagtggggactacgggcaccctgtctacatcgtccaagagatgccgccccagagcccggcgaacatctactacaaggtctgagtgcccggcacggcctcaggcccccgagggacagtcggcctggaccggacctctcctttcgcccccacaccccctccccttgccagctgtgcccacctttgtatttagttttgtagtttcttggcttttataatccccctttttccctgccccctgggcttcggaggggggtgcttgtgcccctaacccccatgctcttgtgcct

SEQ ID NO: 137633 - DNA, 1047 bp, Homo sapiens
tccagaccacccccacccccccaaccttgtgtcaccggctgagactgcaatccccactccctgtttcttctctctaatatagcactggtggggggagggggtggggaagcagccctgtgtgtgtgtgtgtgtgtgtgtgtgtgtgtgtgtgtgtgtgtgtatagcaggagagctggggattcccatcctagaggatggaggtggccgaggtgaggctgaagcagttgggggaaggcttagcaggcaggcgagcggctgctccagaaagagggcggctcagacagtggttagctgcggagtggggcttagcagagggaagggggaaagggagggggctctccttctcaaggggccctttcatgttgaaatcagccagcgtgaatgctggcggcccaggagcccagccgggggaaatgtgagagcccccttatctcccctcatgtcacagtgccgtctgcagttctcagccgggccagagaggatgcattaggagaagtgttggtgggggatgggggagagaatgctcccatcaagacctagggctgggcccacttagttaaggggaggttggaggaagcaggttccagactgtcctgctgctggaggtgggggtggactggagtgccctgcatctcgaagcaaggagagccagcaggctttggggcctagggtggtggatttggcaggaatcagaaagaaggcctcaggttccacccctatcaaatgccagaatgccctatacagcatgcctctggtctgctctgggagtgcagtccttgcccacacacctgcaggagcaaggagcccactccctcctgggagagctgggagagtcaggccatgggttccacccctggattcagttctcgtttctgggtaggaaacctggaacatttgactaggaaagccaaggcctcacctttcccaggacactctcagcccaggagtgacccctgctgttcaaacaacctttaaggcagaggacagagccattagcttcccatggcttggactgggtggtccttcctgccccttccaaccctgcaa

SEQ ID NO: 137634 - DNA, 1049 bp, Homo sapiens
tggccaacgagggcccgcttggcttccctcaggaagatcccggcctgagaggtttcagtcagtgttcgagcaacatttgaattgtcttttaattatttccccccaatcatctgcttgttgaagagaatttaagaaatgccctcaaaaaggaaagacacttaaaattacctatatcccaccactgagagagaaccactgttagctaacttcatggtaggtttcctgataatctttttattatgcacatatacaatgtgaagatctcttttacatacctgagatcatggtggacctgctttgagtgctgggccaccttccagcccccacatcatatcttcatgaggccagctcaactgcagttcttctctcttggagacctgctggagccaaaatttctggttccccaccgggggcctggccttgtagctgaaagtctcgactggcgttttcccatttatatcctgacaatagactccccagttcattactacattactagatgtcacgtgggagggtctttctttaactcagggtctcacatgcacaacacacacacacacacacacacacacacacacacacacacacacacacggtactgtttcatacctccaggccttcgttcattcaggcccctttgcctgagatttctgcccttttttctccctccctccctctttctctgtctctgtcatgtatgcacatggtaaaaaaaaaaaaaaaaaaaaaaagaaaagaaagaaagaaaacaaacaaaaataaaaacaatcaaattaacataacaaaaactccaaaagagaaaaagagcatacactgagaagcgaggctcctcttgtccctcaccttggcccctgtttcttatatatcatctttcctgagatattctgtatattggttagtacaaatgaaaatgtatcttttgtgaaccatgaatgataataactgcccactgttggacaccttgcttttgtaacttcttgattttttgatactgttgcacggcaataactgtggatgtgcctcatgctgggtacaggctgtctagcgaa

SEQ ID NO: 137635 - DNA, 1214 bp, Homo sapiens
catttctctagttttagccgtgatgtgagagaggagcgagacaagttagacccagtccctgcagcaagatgctcagctagcagagctgacttcctgccacaaagtagtgtggcctcacagtcgtcttctgaaggcaagctggctacaaaaggtgacagctcggagagggagagaagggagcaaaatttacctgcacgtcccagcagggctcctgtgagtatttgtggtggtggggaaaacacctcaaagagtgcagaggaacctgtggtcaggcccaaaatcagaaacctggcaagtccaaactgcgtgaaaccaaaaattttttttgatactgatgatgatgacgatatgccacacagtacttccaggtggagggataccgccaatgacaatgagggccactcggatggcctggcaagaagagggagaggcgagagttcaagtggctatcccgagccaaagtaccctgaagacaaacgggaagcgaggagtgaccaagtgaaaccagaaaaggtgccgagacgacgacgcaccatggccgaccctgacttctggacgcacagtgatgattactacaaatactgcgacgaagactctgacagtgacaaagagtggattgctgctctgcgtcggaaatatcgaagccgagagcaaaccctgtcctccagtggcgaaagctgggagactctgccggggaaagaagagcgggaacctccacaggctaaggtgagtgccagcactggcaccagccctggccccggtgctagtgccagtgccggggctggcgccggggccagtgctggcagcaatggcagcaattaccttgaagaagttcgagaaccatctcttcaggaagagcaggcatccctggaagaaggagaaattccttggctccagtaccatgagaatgacagtagcagtgagggggataatgattctggtcacgagttgatgcaacctggggtattcatgctggatggaaacaacaaccttgaagatgactccagtgtgagcgaagacctagaagtggattggagcctctttgatggatttgcagatgggttaggagtggctgaagccatttcctatgtggaccctcagttcctcacctacatggcacttgaagaacgcctggcccaggcaatggaaactgcccttgcgcacttggagtctctcgcagtggatgtagaggtggccaatccaccagcaagcaa

SEQ ID NO: 137636 - DNA, 1364 bp, Homo sapiens
gtgcctttgttccgctagggacccacaggcgaggcctcttggtcatgcagatgtacctcaagtacctattcattgtcttggggaggccctgactccatatgcagatgcggtaagcagcgatgttaagcattctgtttaataatgtaaaaggccttcttcattgtgggctgggcggcatctctgcagaatctcttgtgatgttaaatgattttcagcttcctttggccaggctttgcgacagcatgggggcaggtggggaggggggtgggggggtcgatgacagccctggcatgggaatagaaaggacggaagaaaagaagctcgggtttgaggaggacagggtcccagcaacgaggcggcagcctggattaaagaccatgaccgccagcagtgagccctgggaaagggcagggactcagagcaaatgaggccgctatcgattgtaattccccatgccagtattaccccaagagaagttctgtacaggagaggattttaggtgggccatggaggaaaaagaaattgaatacttggggccgggtgcggtggctcacgcctgaaatcctagcactttgggagactgaggtgggtggatcacaaggtcaagagatccagaccatcctggccaacatggtgaaaccccgtctctactaaaaatacaaaaattagctggttgtggtggtgcacgcctgtattcccagctactcaagaggctgaggcaggagaatcgcttgaacctgggaggcggaggttgtagtgagccaagattgcgccactgcactccagcctagcaacagagagagactccgtctcaaaaaaaataaaataaaataaaataaaataaaataaaataaattgaatacttgcttaggatgaaactgaagcaaaaaggtgagggggggagttttgctagaaagaccaatattagtgtacatgctaggacaggtggaacatgaatatggcaagtggcgaaggtggttcgcaatgaactgctatgggaaacaccactccgtgttaccaacaagccatcagaaagtcagtaagttatgacttaccgactcagttgtatgttgggaaattaagacagaggctgtagtccacacagagactgcgggtctcagaaatagctacagcaacacagagagaaaggggcgatgagggcaccagaagggaacagggaaaatcccagagcactgggggctgcaggtgacaaaggacaagcaaaacaacagaatccccggagtgggagcattgtaaactcagggagggctctagccttcctccagagacccaggtgggctctgggacttgggccatttggatgttgagtgctcatgggaggctggggaacttggagatgttca

SEQ ID NO: 137637 - DNA, 1051 bp, Homo sapiens
acacagctagtaatggcagagctggaatttaaatcctggttggcctgagtccattgccctctttctaccactggttctcaaactctagatgcatcagaatcatcaagaaggctcattaaagcacagattgctaggtcctaccccagagtttctgattcagtggatctgccatggaggagccaagagcttgcatttccaataaggtgcacagcaggggaggttggggagggagtgatgctgctcatgtgtagacctacttggaaaaccactggattagagcattagctggggactgggtctcctcatagcaggtgtgacagtgtggaggcactgtgacttagcaaagtggtgcttcgtctggagttcttgagtttatgacccttttcatctattgtcagccaggccaggatgggtggcacctgagccaagcccgggcttggcaggaatgctgagaattccaaactagcaagctgctggcaggttccagctaaaatgcagacaggcaccacccttagtccctaggttagatttctttggctccttggccctcagcctccagaagggttaatgctgacccactggaacagagagacagaatgaagaactttttgtaggccaggagccaatctgaatctcactgaaaacctccaaccagacctgagagattccataagcccccaagaggttgcttgaactggagactaccatgtaaatactttcctatacattcatgcaaaggttttaaaaagattgtcttaatagttgtgccctgttggcacgtcagtttcaggctctgaattcctagagagcagggaatggatttgcagggatgaggaattaaaactcacaatgacagagaaaacggtgatgacaattatagtgttagggttgatgttggtggccacagtgtaaggagaagaggagagggaagtggtggtggtggtggggaggtggaaatgaaggtgagggaggtagatggatgtgaggttgatgaagatgtaagtggtgagtgagggtgacgaaggtagtgaactgagttgtccatacccct

SEQ ID NO: 137638 - DNA, 1046 bp, Homo sapiens
gtaagtcagaaagcccaggcccagagaggggaagagactggcccagtcatacagtgcgttagaggcagagcttggtcaaaactcagttcccctcacccttctggggggcctcctggtgtaggaaccagcacttgtttctatgcctcatatagtcctctccgctcgcaaagaatggtaaaatcttgtatggccaggtcattggcaattttctgtctcccagtgttcatggagaaaagcagcaaaggaattttcattctctcccaggctttcttattttcttttatttttatttttttctctgtgcgctctctcaagctggctcttcacttgctctgatgcctctcttcccttccattttctccctgtttaattccctctggtaactcaaaaccatctgaatggatttaaataaacctctcctcaaatagtctccttcaagggggagaggatggtaagttcagcctgaagggagagtttctctgatgagtctagtgaacgctgacagcacgcggggcgggacgggagggggaggtgcgcacagtgactgatggtggtgattgacctgggagggagctgatggtgtggcaggggtgcagggggtgctggcttggatgacaatgcagagacaatgcggaggcatgagctgaagaaaggggatgcagccggccagggctgaagtgggcgggtggggggtccatgaatagcgtctcagaggagtcagcacctggggagtcacagaacagcctcacttgagaggcccagaaggctggtctaatccacttcaactcctgctcctcccccaacacacacacacacacacacacacacacacacacacacacacacacacacacacacaccagatggaaacgggcctttcccaaggggttcaggaagcattgagcagtgaaagaccctcttaaatggcaaaagcatcacctggagagggaatatcttacctcattggcaccagttagtaacattacatatgagtttatcatttacccccaacagtgtgtattacatatctatagtccctaagcacg

SEQ ID NO: 137639 - DNA, 1040 bp, Homo sapiens
gaggacgagcactcctggtggtggggcacaccacacacttgaccttatgtgacctgaggtgactggccagagccgaggcaggtcgagcccaggggctgcctgtcttctcccaaggaagtcacctgcaggctcttctcccctgacaaaggaaggagctgggaacagggaacagcgactggtgggaaggccactgaaggttagtgcattctcatacaaaactcccagtgccttcccagcaccccatggtgacagtggggggaacactggctttctagctgctggggataggtatccagaggagaggtgaggcagctgcagaccggcccgcctagggaagagctgagtgttaagaaacttcttgaccctcggcggggttgctctggacagttaggtgggtgagggctgcaaacatttgggacttgatggtactgccctgctcgcccagcctggccaggtgacctgcctttgggaggaaagagaacagcaaggtcaaagggtcagatgacaaggagaccaggaggggtggtggcctcacacatcctcgagctggggccaagagctggagagtgagacagttgctttctagcctagctcgtgtccctccaagactttggggaggggcagaaagtgccattttccatccagcatggcccttgtggacttctgcagggcttccatgcttttagcgggttccctagggattggggcagagggttgggaaggaaaagggtagttcctcgctcctgacttcactttctccttctcctttttcctgctctcgtaacctagcagtctccctcccgcctccctcagcctcagctgactcactgcctcactcacactaccaaatgagatattccacttcttaaaggtatacagacagatagacacacacactgccatacaccatcaccaccaccccgggcaaagtcacataggcatgcagagaggtcgtcacacccacaaacagtgtcattagaagcagatgccgtgtcacacacacgcacatctccccatggtatcagagacacgcaggcaga

SEQ ID NO: 137640 - DNA, 1050 bp, Homo sapiens
taggctgaacctcagactcaggggcgggagtgtgccttagaaaaactcctttggggcagttattctgtgcccccaccctctgaggcagtttaccttctgtgtgcccatacagactgggcatcaaacctgccctccccagctcatttctcagccacatgtggattccagctgccagtgttagctgaaagccaggggtggcccctgcttctggggatctggacaaatctggacccctacaagcaccattctccgatgctggcctggtaggtctctggggaatgggtatgtttgcgttttgtgtgattacaggcacacagaccagagtgtgtgcaagaggccagggatgctggaccagccttttctccctgggcataaaagtgggctcagtaacgcctgaatttttgatactgttagccagataggtgcttagaggggagggcaagggcaccaggcgagctgcagctggctctggagagggaaggagttactatggagtgacagggactgccagggccaaagctcctgctcgaatgcattctggagaaaggagctggaacctgagccacaagtctgtgcaccagaagatgaggccaactggctgcaaagacgaaagggctaagaaaggggaaggaaagaagaaaattgcgagtctttgagtgcctaggagatgccaggggctttatatatgttcatgaactcatttaatcctggcagtcatcctagcaggcaggcactatcatgattcccattttacacatgagacaactgaggctcagtgaggtgaaatgacctacccaggccacatagcaaaaggactggcatacaaacctaggtctgtctgttctttctccagtgcacagatgcatgaagaaaatgctaataatctcctccaactgtcagaggtagtgcccagctggctactgagaggctgggctgagaagctgggccgactggaagggaggcccaacagagcctattggtagcttagaggtcctctggagtggcccagatccaaaacgaggacccaccaacatcctctttgttcaacgt

SEQ ID NO: 137641 - DNA, 1075 bp, Homo sapiens
gctgagcagatcacctgaggtcaggagttcaagaccagcctggccaacatggcgaaaccccagctctactaaaaatacaaaacttagccgggcatggcggtgcacacctgtaatcccagctactcggggtgagacaggagaatcacttgaacctgggaggtggaggttgccgtgagctgagatcgcgtcactgcactccagcctgggtgacagagtaagactctgtctcaaaaaattaaaaaaaaaaaaaactccccattcttccctccttccagcccctggtaagcattattctactttctgtctctaggaatttgagtaggtacttcatataagtggagtcatacactatttgtccttttgtgtccagcttatttcatttagcatgaacatttagtgttcaaggttcatccatgttgcagtatacatcagtacttcattcctttttatggctgagtaatagtccattgtatatctatgccacattttgtttatccattaatttgttggtgggcgtttggattatctccactttttggctattataaataatgctgctatgaacattggtgtacaggtatcctttgagtccctgctttcatttcttttgggtttatattaatacctaggagtagaattgccagatcatatggcaattctatgtttaactttttgtggaactgccatcctgttttccacaatggctgaaccattttacattatattacattttatgttatacattctgcaccattttacatacataacagcagtatgcaagaattccagtttctccacatccttgtcaacacttgttattttctgaagtgttttcgataatagccatcttgatatgtgtgactatatatttttacatagttgaaatcatactgttttttaccctgctcttttaaacttgttacactatctcttcatgtaattaaatattcataaacatcattcttgatgagtgtacaatattccatcacatgaatgtaatgtaatttatttaactagtcccctattgacatttatgttacttccaacattttgctattataaataatactgtgat

SEQ ID NO: 137642 - DNA, 1007 bp, Homo sapiens
acagagggagacatctgcatattttaacaaatgcttcagggggttctgaggcactctgaagtctgagaaccattgctgtgaggaacaacaatgaacctagaaagcacccctaaagatacaggactggatgtgggtggcaagacaggaacaggcaaggtgcatgagagccatctgggcatctgttaaaatgcagatgctgacttggcaggtcgggggtggagcctgagattctgcatctctcacaagctcctaggtgatggtgatgctgctggtccaggtccacactttgaagagcaaggacctagatcagtggatcagtggttgacaactggagacaatacccctaccccaggggaacatttgacaatggctggagacattttttttggtttttttttgttgttgtttttttttttggttttcacaagaggtgaggggagagaatgctactactgtgtaatgggtagaggccagagatgttgtgcagtatcctgcagtgtacaggacagcccccacaacaaagaattatctgacccataatgtcagtagtatcactgttaagaaaccctgggcttgatgataaccaaagagtatggagcagggaatcttccttagctaggacccagtgcctggtaggagtggactagatgagggacaggaagcatacccatgaagtgaaactgcaaagcagaggttccaaatgaaacgtagcagtgtgtttgatgtctgctccatgccagagcggaagccaatagggcagagcatggatcaagtagagctcaaaggcacatgtgttgcctggtaaggcaggttcctggttttttttttattattaaaaataacccctcacatttacattacacttcagagtttacaaaacattttcatatatgccatattatttcatccatacaacaccctaatgaggtaaagcaaggattattctttctctttcttgaatttagaaactcaataccatcagccaaagaaatgtttgctgaattgaa

SEQ ID NO: 137643 - DNA, 1679 bp, Homo sapiens
aggtgtaggataaggtgggggcgggggaaatgggggaatgacacatcccccccaacctacccccaccccaaaagcagctccaacagaatggccagagggcctcagggagctgcaaaactcatccaggagaaaaaggcaggagcagcaagtgacccctcccaagctcccatctatggggcttagcaaaaaaagggaggaagtgggggctggatatgcccacccctgccaaaagccctgaccccagggaaggaggctgctcacccagccttggccctgcagggaatgttggggggcacagaggggagaagctctttcccccactccacattccttttgttgccaagatccttaattccctcctgcccatatccctacaggcgacggcagacagtgcaatggccctcctgccacttcagcacaccttgccccacctgggaccatcacacgtgaagcaccaggctgggagatgaggtgcacacagttgcagctaggtcggggccccagttaagctgtgccccaccaccctaggcaatgaggggcaggaaaggggtacagaatgaatggtgaaagagagtggagatacggaagggggagaggagaggagaaatgtggacagagggcttgaagacatggccgaataggctactgccacccggctttggggagatgggcgataagtgttgaggtaggctcgagaactgctccccaaatcagtgagaattgcattaggagccctctggggaaagagcacaggaactgagttgctgggcctcaaaacaaaaggctgcaggcacatggttagactgccgctgtctgaaggaccatatcttacagaaggtgcacatactcccaagggccactcttgccctggagatcttggccttggggccaaagacatttccatttccgatctccatggggaggagggacttaagcccaagtgggtcaggcctggcccaggtccttatactcccctatcttgtcctagcccaggcctccatgaaggagaacctggtggcattgccccagagctctccagagatgagcctcccctatccccaccctgtccccgtccccagcctaccaaagagtattcacacctttccatccctgactctatgggttactgtcccaattgcgaaacacccatactcctcttcaccctgtagcagggtcttctgctccagtcaccccggcctcttgcaagagaaagtccagggactggcaagaagaccctttgactaaagataatgtgctgtcatatcttggctgagaaactgttgagtcaggctagaggactggacaagagaagaggcattgagagcccccttgggagccattagccttgctctggtctgctgtgtggggttggggagtaggggggatcccacattgcctgggacatctgaatgctgatacgaatggacaggaaagggagccagagctgtatacctgggacaggccagggagcctttagtgccagcagggcctgtgtcctgggatgtgatgctagtgagtgaatgggagggcgggcctggagctgcgtgagagtgaaaccaagaagcggatggggaagggagagctggccttggtcagcttagggatgaatggagaaggaatcattcatgggcctcggctaggtcccagactgattacatgagactggggagtccttccct

SEQ ID NO: 137644 - DNA, 1043 bp, Homo sapiens
ttatggtaatttgttatgcagcaatagataactaatgcacagccccaagggtaagctgccattgaacaactgggagctttgcttccaggagccacagttgggacctacacattctgacaaaagaaaccagcaacaagaggagggaggagccagtctcggagttgaaacagatgctcgtggtctttaccccccgccccccaaaaaatatatgacttttcagttcagagtcttgaactgcctccaaaccaacccagctctgctggcttcttgaccctgcagtcggctgtcacatcccaaatatgctgttcacagtcacaaatgaattgcagattgatggtactgtacacttgccctgcttctcgctgcagattttcagctatagctaattccccttgcaacctttcttaaccccacctggggatgtggccttgcacccagggccccagctgctccagcagccctaccagttcacaggcaactgcattaagacagcctgagcctcagaaactgtccgtttctccctttcttctaggcgccagaactggggccagcaggacacccaggctggctctcagtaaatgccagaaaggggacatagagtaggattgcacaattgggctgggagctttcttacgatcttggtttctgctgctttgtatcgtggtcactgtattagtctgcttgggctgccataacaaaataccaaagactgtgtagcttaaacaacagaaatttatttttttttcatggttttggaggtggagacatccaagatcaaggtgctagacaatttggttcttggtgagagctctctttctgccttatagactgccatcttctcatcacatcctcacatagtgaagggagagagagctctggtttctcttcttcttccataaaggcaccagttctctcatatcagggccccatccttatgacctcatttaatctttattacctcctcacagcccctatcaccaaatacagtcacattgggagttagagctttaacatatgaatttggcgggggcagggggaataaa

SEQ ID NO: 137645 - DNA, 1269 bp, Homo sapiens
ggactcgtcccccaagagcagttttgtttgtttttgcaatctttatggtgtttgtgccctaataagcaaactattagctttggtgtttgttttctattctattctttctagctttttattcaagtaaatttcgttcacttaacgtaaatactgtcttggttgccatatgtgaaacttaggagaagcatccaaggatcctttcgaggtggctaaagaataataataaaattgtacctcttagggaagagagcaagttgtacaaataagttccttgaggtgagggacccaagccttctatatttactgccacatccagagtcattgtcacaactctgtaaacattatttgtgccactttgacctcccatctaaagtggtacgcttgatagagacatcatattcatgataatagtgtaatgttaggactgatacttaaaaaaaaaaaaaaagatgtgcattgtaaagttgccctgagccttaaaatgtcttactagcacactccaatttatataacagcttatcaaagaagagaatcagcagacatgcttctcatacttgaaactttaaacattgtagctaaacgataattaactaggattctgactcctttatttatctactgccactccccccacaccccaatgcccagcagaagtatttagcagctgaacattgatattctgtgaaaagatgaaagaattaaacttctttaatcaaatgttggccaatactttttggcattcaggatggacagagccatttttatagactgaggattagcagaacagctgtactgtaaggtttctgtgatggcatgaaactcttacaggtgtataatggcatttagttacctaccctttgtgtggcactaaaatagttctgtctagatttaaacacagcttcctatcttctgtcttttattctttctgttttaatatttttgagcaatagaagcaaggatactagctctttacatttgttgacatcaattggaatcagtttcctagagttatgaagggcttatatgagtccatttcgtttgattcccttgggaaacataggccctaaagggaaagtgacttgcccaaggtcacataactagagtcaaaactgggatgatagttgctctaactcctagttgggtgcccattcccccaactacctcctgggaccttttgcgagggagcaagatggagctccacattagaacttttgcaaagtagagggctcagctctgcatcattttgttctactctgcctgtattttgac

SEQ ID NO: 137646 - DNA, 1115 bp, Homo sapiens
ttgtgtctgaattaggacaatatacagtaatatgatcgtcagagtaaaaaactaaaaatcactgttgatcattctgtggagatgttgcgccggttgtgattgtggtcctcaaaggccaagaatgtagtgggtatcatcaggaagggtgtcaaaaacaacaaaacaaaccacttacaaaacacttattttttccatgtacaagatcaaaagcagattggcttctacaatcagacaggaaattctggtggctgctcctcaagaaaagcctaacagctgataaaagtcctcaaaaaccccattaaattgatcaaaaggatgaagggattttctagttggtttttcagtctggatagaaagaggttgaaggaggaatatgatcaaagtctaccaaaccatgagcgagatgaatatgattaatatattggtgtaacgtaacaatccagttcaataaatagaaagcctgctgtgccagacacaatgttaagtattagacaccttttaatgtttgaaaaattattttcaagaggaggcaaataaaggtagtatcttattcaactcattgtctcaagtaatagtcaaaattatgggtagatcaatacagatttacttagaactgttagggctatttggagtatgttcctaattatttgaagtgatgtcatagatgtcaaccttaaagttctacaaaacattgcttgacataactagatagaccattagtgtatccagagttgacattacctgtgttaaggctcttcgatcaagaacataactaggaatcattcgaggtgattcaaggtgagcacaatgaataaatccaaggatttttttttttagggaggtgggatctagataaaatacctttactgtgggtttgaatacagaacttttgatcaacttgcttcattattcccatcgcattttctctctcactaactctgctgcaacccacccatcatatcctgtcttagaatcattctttagttgttattgctgttgttttcaaatacattttatgtctttacattagagctccttagaaatctgccttcatttttgtctttctccataatgcctgacacagtgctagttacagttactgtactcaaatactt

SEQ ID NO: 137647 - DNA, 1036 bp, Homo sapiens
taataagacaaaccaaacaaaaaaatgagcaaaagatatgaacagatattataccacaaatgaagatacacaaatggctaaataaatacatgaaaacatgttcgacatcattatccattacagaaatttaaattaaaaccacagtgagataccatttcacacccactagactggctataatgaaaaagacaataagaagtggagatgtggagaaatggaaactctcatacattgctagtggaaatgtaaaatgattcagctgttttgtaaaacagtttgtcagttcctcaataagttaacatagaattacaatatgacccagcatttccactcctaggcatatacctaagataattgaaaacgtatgttcacacaaaagcctctacattgaatgttcatagcagcattattcataatagtcaaaaagtaaaacagctccaatgtctgatgtggtataatgtgatataatattctatacaatgcaatatttttcagccattaaaaggaatgaattatgaataatgctacaacatggctgagcctcaaatatattatgctaagtgaaggaagttagtcacaaaaaaaccacattgtatgattccatttatatgaaatgtccagaataggcaaatatatagagacaaaaattagattactggatgcctggggcagggggtaggaattaggattaactgaatatgggcataagggcacttattggggatgaaaatattctaaaactgatttaccacagccagggttatagcagtggaacgaaataaaggaaatgatgcaagagatatcatgaagttacacaattctgtaaagttactagaaattattgaattgtacacttaaaatggatgaattctacagtatgtgaattatatctatataaagtagttttttttaagtgtctggcacatagaagatggtgaataaatgtgtaaggggcgttggttgtttctgaatgatacctatctttagaggaagagaatcttcaaggctattcgatttacttcagagatttctccct

SEQ ID NO: 137648 - DNA, 1035 bp, Homo sapiens
cacctgccacaactagtcagactgagggaaagaagggcaaagagtagctttcaggagttctttcgactcaacccccactccattgagtccctatttggtatgagataatgctagtagggggattgtatcctcaagacagattcagctaacagaaccaatgaaggagcacaaacctacttcatccttaatgacattagacaaatcctttggtgcagcttgtttctgtttggattcccagctgacatctcaaatttagtaagctaaactgaacttatcttcattcttccccttcccaccacacacaccaaattttataaaagtaaaccctggtttcatgctctcaatcacttatgcataaaacttggaaggccttatatttttacttctcccttgtccttgctacctatatatagcaatcaattgttaagttgactcctactttgtgatgttgatttatattgttcatgatgtctcttgcatgactccctttctttctagtctcactgctatcactctggctgtatttggcttagatgatcttcaaggtgcctcccaacaatgaaaatctgtgactctttctcagctccttattacctcactcctacagtggttgtgtagctgagagttgctttgttctctgttccatatatatacctcagctagattatttttcttccagagttattttgttatgtcacttcctcctcagaaaccttgacatctccctactgcccgtagaataaagttcagacttcttaaactggcattctaagcccctttgcaattgggtttgaactactctgtcactcttctttttattctctgtttgaatcttgttttatccagactggtccactgacaggccgcgttctggcctttgtttgtttacctgttcccccgaagaagaatgttctttcctccaacctgtctcttggacccctccaggtccttcaaagctcaacttaaaccttaactcttgtgtgcattcttccttgcccatctatccatcccagcaccctaaattcctcattcagc

SEQ ID NO: 137649 - DNA, 1626 bp, Homo sapiens
ctagcaatctttctttctgtggactgaattagcttgatcttctgaactcagcagcaattctgtactctcactttggtcctcagacctcctgctctaagacatacttcactttcagctgttaaaacccaattcctacttcactgaaaacaatcaagactatctgtgacatcatctgcaaatccattcccctcactaactataataccacctatggattttactccatttgcccccactcttgtgctcctgtctccatagaggaaatgtgttcctttggttcaagaccagtccttttatctgagctttggatcttctccccgcttactatctcatggtcctttctcttagtcattttcttcctatcctgtatcttggatctctctcaaacttctttttttcctcttagcatgtagtcatgctcacatctcatctttgggggggaccttttttgacccaaatcttcctaaaactaccctttcctacttctgtaaatagttaagcttctgaaaagagtggaataaacttgctgtctttacgttttaaccactcattgatacctaatcctcctgtggttcagcttctgtgtcctcctcccaggagtttgtgcttgctcaccagtgaccttcatattgtaaaatttaacgggacacatttattctaatcatatttcacttatctgtcaagtcctttattttattatttaaaatttttgataataagcagagaaagccacttgacattatgaatttactggggatagttatttcaatgattaatgttcctcagtgaatatttattatgaagtttcaattttgttttagaattttgtaattgagatataatttacataacttaaaattcatccttttaaagtgtacaaaacactagtttttagtatattcacagagttgtgcaactgtgaccattgtctaatccaagaacattttcattgccccccaaagaaactgtatccattagcagtcattccccaattcctcctttcccccatcctctatcaaccactaatctactttctgccgctatggatttacctatgctggacatgtcatataaatggaatcatgtaatatgtggctttatgtgtctggccttcttcacttagcataatattttcaaaattcatccatgctggaacatgtatccgtcctttttcccttttacaggtgaataaaattccattgtatggatataccaccttttatttatctattttgtctattgatgaacatttgagttgtttccaccttggggtattatgaataatgctgctatgaacatggaggtgtacaggtttttgtttaaacacctgttttccattcatttggggtatatacctagtggtggaattgctgggtcctatgttaattctatgtttaacttattgaggaaccaccaagctgtttttcacaattgttgaaccatattacattgtcaccagcagtgtataagggttccagtttctccacatccctgccaacgcttgttgtgatcttttttattatagccatcttactgagcataaggtgatatctaattgttttgatttgcatttccctaaagactaatgatattgagcattttttcatatacatattggccgtttgt

SEQ ID NO: 137650 - DNA, 1037 bp, Homo sapiens
aaatgtctatccaaatcctttgtccatttctaaattgcattatatgccttttaatttttgaattgcaagagttcttaatgtattctgcatactaaacccttattagagataaaatttgcaaatattttctcccattctatgtgttgtagttctttatttttattttatcctgaggcagggtctcactctgttgcccaggcgggagtgcggtggcatgatctcggctcactgcgacctccatctcctgggctaaagtgatccttccgcatcagccccctaagtagctgacattacaggcttgcaccaccatgcccggataatttttttattattttttttaatagagatggagtttccccatgttggccaggctggtcacgaactcctgacctcaagtgattcgcccacctcggcctcccagagtgctgggattacagacatgagctaccatgcccggcctccttattttttgaaccctctcctcttttggtttccatggcaataggctttcttatttttttttcctacttctctgactattccttcccaagttcttttagaaggttctttcctacgtatctcttaaatgttgttacagtcatgtgccacataatgatgtttctgtcaatgatgaagcacatgtacaatgagggtggtcccgtaagattataatggaggtgaacaatttttattgtctagtgacatctcatagctgttgtaacattgtagtacaatgcattaccttttctatgtttgcatatgtttagatatacaaatatttactattgtgttacaattatctatgactttatgaatattatgtacagtgttcagtatagtaacatgttacacaggtttgtagcctaggagcaataggctatacctgtgtagtaggctataccatccagatttgtgtaaatatactctatgatgttcacacaatgacaaaataaccaaatgacatatttctcagaatgtatccctgctgttaagtgacacatgacacactatttcctaggtctacactcttgccttct

SEQ ID NO: 137651 - DNA, 9092 bp, Homo sapiens
ttacagatgagaaacagcctctgagagattaaataacaggttataagtagcagaactgggatttaaaccaaaatttatcttgactccaaagcctgggacctgaaacaacatggattttatttaatttccttataaattctagcccttctggtaatcgtgagaacagctaataaaaattttgggctcatgtaatgttttcgtttgttgttttttttttcctgacacataactgctaagcatttacattatcaccatgtcctgttctgttgttttaactggcaaattggaggtaccaaacagtttttctgagaaatgtaaaattttctaaattatatgcctgtgcatttttataatttgcagtggcaaattataaaacgcaatagcaattatgctatttgtagtttgttacatttggcaagatatgtggtggggtgagtggttgggagagatgtgagggtgtgtatgtgtgtgtgcatatatacatatataatttgtgtatatacatacacacatgaaaatagtgggaaacacccaagtcagtaaaatggacaaacacattgaggaaaatggctttaaaggtttctaacaaaaataatgtaattcttgtgctaagtattagactagtatatttcactctacttctaagccatgccagtcatttttataaactcatactgttgtttgcaacataataaaggcagaaaatgcagttggttcatcaaagtcactccctttgtcataactttatatggagggatattacactattggtgccaactttatagaaggacaggctgttgcttggatgtttgcatgtatatgtataatggtgcagcaagaattatgttaggactctcatgggtacattctatttagactatgagaagacaagagctcggattatagagctaaactgcatggctttgaattgttgttctcacagtagctttgtgaccttgaataaactacatagggaaactgaggctcacagttgatgtgaaaagtggaaaaaataacaagctgtgtaattcatagggtggttatgagaataaaatacttgcgaagtatttagaaaagttcctggcttacagaaagtgttcaataagtgttagctgctgtgtttgttattgttgattactgttgttatttttactgccagaaataatagtagtagtagttggaggaggaggaggaagaggaggaggaggaggattataggtgtgtcacagactgaaaatgagtggggaggcaatgtcctatagtgcaaaattttagctttagaggctgaaaggcctgggtttgattactgcttttattatttatcagctgtgtgacttaaaacttaacctagttgttctttcatgagtaaagtgaataaaataatatacgaatgattacatttcagtattattgtgaagaccacattgaagtcacatatataaaaatacttgataagctgaaatactatacgttatatgtgtatattgctatttgccaactctcttaaaaagaaccaaaaagagttggcaaatagcaacatacacacatagcgtatttatatgttttattcttataaagaaccaaggagaattgaaaatgacttataaaaatgacaaaacatttatattgtcaaaattggtataatatgaagataaacccagagtagaaagctttgaattattattatatcatttattattttctttgtgctatgatatacactgtaaaaatcttgcctcatttactcctttcaacacctctttaggtctaaggcaggaacttgatttaattcaagttttgaaatattactatagcttcaatgtaaatacctcacagaaaacaaaacaaaacaaagcaaaactgaagttcagagaggttaacttgcctgtgttcacaaagccagtaagccagtaagctacatagccaggactggaatctagccctgatttcaaagcctcttaactgaacttgaaagatggcagtgggaggtgaaaagattttgagaaaatactataagggatgagtggaagctagacattattgaagatactctaaataaatgttgtttcttctcctattttcgaccttagtaaaaatgttcttaaggaaaatctaaacctagtcaataacctgagggagccaaggaatgtaatataagcccaatgagagcaaagactatttcttctttaccactgtattccctgtgactagaacagtgcctagcatatagcaggccctcaacaaataattattacttttatgtataaaatacatcaaaacatatatggtaaaaaaaaaagacctagtcatatttttagattctttttacttagagttctttttttttcttctcttcaacttttattttaaatttagggggacatgtgcaggatgtgcagatttgttacatgggtaaacatgtgccacggtggtttgctgcacagatcatcccatcacctaggtattaagcccagcatccattagctattcttcctgatgctctgacaactctagtaagagttgtttgtttgtttatttttttcttgtaaatttgtttaatttccttgtagactctggatattagacctttgtcagatggatagcttgccaacatttttatcccattctgtaggttgtctgttcactctgttgatcctttcttttgccatgccgaagctcttcagtttaattagatcccatttgtcaatttttgcttttgttgcaattgcttttggcattttagtcatgaaatctttgcccatttctatgtcctgaatgatattgcccagattttcttttagggtttttatagttttgggttttacatttaagtctttaatccatcctgagttattttttgtatatggtgtatggaaggtgtccaatttcaattttctgcatatggctagccagttctcccagcaccatttattaaatagggaatcgtttccccattgcttgtttttgtcaggtttgttgaaaatcagatggttgtaggtgtgcagtcttatttctgagttctctattctgttccattggtctatgtgtctgttcttgtactggtaccatgctgttactgtaatcttgtagtatagtttgaagttggatagcatgaggcctccagctttgttctttttgcttaggattgtcttggctatttgggctcttttttggttctatataaattttaaaatagttttttttttctaattttgtgaagaatgtcaatggtagtttaatgagagtagtgttgaatctataaattactttgtgcagtatggccattttcaagatattgattcttcctatccatgagcatggaatgtttctccatttctttgtgtcctctctgatttccttgagcagtggtctgtagttcttcttgaagaggtccctcacttcccttgttagctgtattcctaggtgtcttattcattttgtagcaattgtgaatgggaattaattcatgatttggctctctgcttgcctgttgttggtgtatagcaatgctagcaatttttgcacattgattctatatcttgagactttgctgaagttgtttatcagcttaagagcttaaggagcttttgggccgagatgatggggttttctagatataggatcatgtcatctgcaaacaaagataatttgacttcctctcttcctatttgaatacctttatttccttctcttgcctgattgccctggacagagcttccaatactatgttgaataggagtggtaagagggggtatccttgtcttgtgccagttttcaaggggaatgcttctagcttttgcccattcagtatactattggctgtgggtttgtcataaatggctgttattattttgaggtatgtttcttcaatatctggtttattgagagattttaacgtgaagggatgttgaattttattgaaggccttttctgcatctattgagataatcttgtggtttttgtctttagttctgtatatgtgatgagtcacgtttattgatttgtgtacgttgaaccaacgttgtaacctggggatgaagctgacttgatcatggtggatgaactttttgatgtgctactgtattttattgaggatttttgcattgatgttcaccaaggatattggcctaacgttttcttttttttgttgtatctctgccaggatttggtatcaggatgatgctgacctcataaaatgagttcaggaggagtccctccttttcaattgtttggaatagtttcagtagaaacagtaccaactcttctttgtacctctggtagaattcagctgtgaacctgtgtggtcctgggctttttggttggtaggctctttgtcaaagtcttaatttcagaactcattattggtctattcaaggattcaatttcttcctggttcagtcttgggagggtgtatgtgaccagaaatttatcgaattttttctggattttctagtttatgttcatagaggtgtttatagtattctttgatggttgtttgtatttctgtggggtcagtggtgatatccctcttatttctgattgtgtttagagtgtttcaaggttttttcatgtctctatctccttcacttcagctctgatctttgttatttcttgtcctctgctagctttggaatttggttgctcttagttctctagttcttttatatatatgtgtgtgtgtatatatatatatgtgtgtgtatatatatatatgtataaaatacttgaagttctagggtacatgtgcacaatgtgcacgtttgttacatatgtatacatgtgccatgttggtgtgcctcacccattaactcgaacctgatgtaaatgacgagttctctagttcttttagttgagatgttaggttgctaactttagatctttctagatttctgatgtgggcatttagtggtataaatttccctcttaacactgcttgagctgcatcgcagagattctggtacgttgtctctttgttctcattagtttcaaagaacttcttgatttctgccttaatttcactatttactcaacagtcattcaggagcatattgttcaatttacacgcagttttgtggttttgagtgaatttcttaatcttgagtactaatttgattgtgctgtggtctgaaagactgttatgatttcagttcttttgcatttgttgaggggtattttactgccaattatatgatcaattttagagtaactgccatgtgatgatgagaagaatgtattatgttgttttgaggtggagagttctatagatatcaggtccacttgatctagagctgagttcaggtagtaaatatctttgttaattttctatcttgatgatctgtctaatattgccagtggggtgttaaagtttcccactattattgtttgagagtctaagtctctttgtaggtctctaagaatttgccttatgaatctgggtgcttctgtattagttgtatgtatatttaggatagttagctcctcttgttgaattgaaccctttaccattgtgtaatgcccttttttgtcttttttgatctttgttgatttaaagtctgttttgtcagaaaataggattgcaacccctgcttttttctgttttccatttgcttgtaaattttccttcatccctttattttgagcctatgtgtgtctttgcacatgagatgggtcacttgaagacagcaataccaatgggtcttggctctttatccagtttgccattctgtgtgtcttttaattgagtcatttagcccatttacatttaagattagcatgtgtgagtttgttagttatatgtgagtttgatcctgtcatcttgatgatagctggttattttgtagacttgtttatgtggttgcttcatagtgtcactggtttgtgtacttcagtgtgttttgtagtggccagtaacagtttttcctttccatatttagtgcttccttcaggagcttttgaaaggcaggtctggtggtaatgaattccagctttttcttgtctgaagaggatcttatttctccttcacttacgaagcttagtttggccagatataattttctgggttggaatttcttttctttaagtacgttgaatattgtcccccagtctcttctggcttgtagggtttctgctgagaggtctgctattagtctgatggttttcactttgtcagtgacctgacctttctctctggttgcccttaacattttttcttttatttcaaccttgcagaatctgatgattatgtgtcttggggttgatcttctcatggagtatcttactggggttctctgcatttcctgaatttgaatgttggcctgtcttgctattttgggaacattctcctggatgatttcctgaactatgttttccagcttggttccattctccctgtctcttttaggttccccagtcgtaggttcagtttctttacataatcccatatttcatggaggttttgttcattcctttcattttttttctctattcttgtctgcctgtcttatttcagaaagatagtcttgaagcactgagattttttcctcctcttggtatattctgttattgctacttgtgattgcattgtgaagttctcgtgttgtgtttttcagctccatcaggttggctgtgttcctctctaaactggctcttctggctatcagctcctgtattgttttatcatgattcttcgcttctttgcactgggttacaacatgctcctttagctcagcaaagtttattattatccaccttctgaagcccacttccatctattcagccatctcagcctcagcccagttctgtgcctttgctggagaggtgttgcagtcatttggagaagaggcactctgactttttgagttttcagcatttttacgttgattctttcttatctttgtgggcttctcttcctttgatctttgaggttactgacctttgaattagatttttgtggggttttttgttgatgttgttattgttgttgttttctgtttgttttccttttaacagtcaggccactgtaccgtaggactgctgtggtttgctggtggtccactccagactccagttgcctcggtttctccagtaccttgagttatcaccagtgaaggccatgaaacagcaaacatgacagccagctccttcctctggaagctctgtcccaggggggtactgacctgttgccagcccacatgtgcctgtaggaaggagctagagacccccattgtgaggtcttagtcaggaagaatgggatcagaagcccaccgaaagaagcagtctggctgctttttggtagagcaggtgtgttgtatttcggggggacccttccttgtccaaaccacctgtattcttaacagccagcaggctggagtggctgagtcaaccaaacctcagagatggaggccaccctttcccccaggagatccgtcccagggagagatcagagctctatccgtagaaccctggctgcagtggctgaagccgccactgggagatcctgcccagtgaggaggaatggatcagggtcccacttaaagaagtagtctggcactgatctggcaaggcagctgtgctgcgctgtggggaacccttccccatccaggccatctgtattctccaaagttggcaggttggaatggctgagtctacggatcagcagagatggtggccgcccctccccacaggagttcagtcctgtctcaggcagactccagcctgttgcctttggctggcttgaattccaagccagtgcatcttaatgtgtgaggtgctgtggaagtggggcccacagaactgcttggctccctggaatcaccccccttcctagggacatgtatggatggacttgccagtgatcctgggtctggagtatgcattataaaactcttgggtttctgtgtgtgcctgagtggctgctctgctgagactccacacagctctgtgtattggacccaaggtcctggtggtgtggggtcacaaggtgatctcctgatccatgggttgcatagatctgtgggagaaacgtggtttcctggggcagggtcacacaatcactcacagcttcccttggctgggggtggagggttcctttggctgcatgtcactcccgggtgggccgtcatccctctctacttttcttcattctctgtaggtcaagttgtttgcctagtcagtcccaatgggagaacctggatatttcagttgaaggtgctgaattcactcacccctttcattcctctccattagtgctgcagactgaagctgcttctaatcgaccatcttggcccctcccatatttttagattcttatgaaatagagtgttagctaatgcatattaggtagttcctgaaatggtttcagtgaattatgtgtgcatataaatgtgaagcatctaaatgataggttggtctatttagtccagttgccggtgtcaataggagaatggtaactctattaatttgtgtaaacagtgcaattgtggtgactatctggggattagatactgggaacctattgactgacaaatgtataaggtagggctattatttctttactttttttggcttatagcaagcttcccagtagaataatattaaatgctataaaataagcaaagtgaatactcaaacctatttcctttgtacccttgtagtatgtgaaatacagtctttttttttttttttgagacagggtctcactctgtcacccaggctggagtgcagtggcgtgatctcagctcactgcaacctccgcctgccaggttcaagcgattctcctgtctcagcctccagagtagctgggattgcaggcatgccccaccaaggctggccactttttatatttttagtggagatggggtttcaccatgttggccaggctggtcttgaactcctgacctcaggtgatctgcctacctcggcctcccaaagtgctgggattacaggcatgagccaccacacccagccaatacagtcttttttgagggtaaggaaagaggtagtacttatctcagggaaattctttaaaccaaagagttggaactgtggctgccacatctttatgggaaatgtggcttaatgatttattatactat

SEQ ID NO: 137652 - DNA, 1642 bp, Homo sapiens
atcagttccctgtaactattccatttctgataatgctgttgccattcctaaaatctggacaccatggagacattttgatccttcctcctcttttgctccacctattccattagttgccctgctatatgaattcactgtccctaattttttttcaaattttttttcttaattgattcattcatttatttaacaaatatttattaagaactaccatctaccaggtactatttatggaaccaaagatatagcagtgaacataacagacaaaaattctggccctcacagagccaatagtctagtggaggaagacacacaagcagataagtaaaatacatagaatgtcagataatacaaagttatatggagaaaaattagggaagttggagagagaaggtcaagacaggatgtgtatgtatatgtgcacattttaaaattgggtagtccagggaagctaactgagaaggtgatatttgagcaaagatctggaggcagtcaggaaagagccaggcaaatatgggagaggataagggagcattccaggcagaagaagtagcaaatgtaaaggccctcagatgggggagaacatgagtgttccagaaatagcaacatggccattgtgactgaagcagaatgagtaaaaggaagagtaatagaggtgaggtcagagaggtaagaggagaggaacagatcatgtagggctttgtaggtcattgtaaagactttggctttgtgttatgagtgaaataggaaaccaatggaggggcttgagcaaaggggttacctgatttgacctattttattggtaggaaaactttagctgctgggttgagactagactgtagcagggcaagggtagaagcaggaagtaagtaagggggctattgcagtaagttaggtgagagctgatggcttggaccagagtagtggtggtgaaagtggtaaaagattgttggattctgaatttactgttgattgaacgtggcatgtgagaggaaacagggaagtcaaggatgtctttgagattttggcctcaaatggaagaatgagtttttctgtgtgtgtgtgtgtgtgcgcgcgcgcacgtgtgcttgtgtgtgtgtgtgtgtgtaatctctaatttcttggactctcaatatatattttattctgttctataccatacttaattttcacctgggctgtatcaataatcttgataaatgttcagtggtgaatcagatctcctcttccagcctctcttctcactccagttcaccctttataaagtgaggcactaatcatatcttcagtggtttcccattgcacttaattcagtaggtggactcccctgtcttggattcaaggccctccataatatgagcccaacctatttatttggctttatcctttgctgttttcttttttttattattacactttaagttttagggtacatgtgcacaatgtgcaggttagttacatatgtatacatgtgccatgctggtgcgctgcacccactaactcgtcatctagcattaggtatatctcccaatgctatccctcccccctccccccaccccacaactggccccagagtgtgatgttccccttcctgtgtccatgtgttctcattgttcaattcccacctatgagtgagaatatg

SEQ ID NO: 137653 - DNA, 1748 bp, Homo sapiens
aggagggagagacagctgactctaaggaaggagacagaaaaaccgaaaaacaaaccaggaactcatagcagtgtgggtctaatagccctatatgacttaaataagtcttgagggcatcaacatgttataatatagctcagtaattgatgttcataataatgacccaaattcatcaaaaaaacaattaaattgtgatcatctactatgttctatttgtgaagataagcaatgagtattgagtgtttagatttccatccaaaagattaaatttaaaatggtgttgtgtataaagtaataaaccctgaactagcaggacaactcgactaactccttcctgagttacaatcaagattttccttcattcaatatatacctttctgttcaagcctctctaactagaattgaaatgcaatggtaaggcaacatgaggcagtaaatctatgaaaatgaattgttcattcacactacatttataaaacaggaaatacgattataaaacagatgttgactgattgaaatgctgtatgctcaatcatgttagtgtttatttgataaggaatgccatttgtttagctttgcttatttattcagtgactgtggcctggaattttattagatgctgtatagctgtatatctctgcccaccagaatgctgagagaatcttagcttgaatgaaactggataagaagttggagctgtttagctttggtagtgaagatgagaagactttagttttgaaggttttccattttaaatgtctttgttttgttttatttcatttatatatgggtgccagaacatagaagtgactaatagtctggaagtattcattacttgtttaactttattctgaaaactttcatcttcctaaaagtctttcaatggctacccagggagagatcgagagccaagaaaatttcctgaaatggaatcatttataactgatatgtttctgaataatggagaaaacttaaatttaattttaaaagtactgtaatactaaacagctcttatatttgaaataaattattcaactaattttttgttctcccttggagccagttagcaaatatcttttgtgttgcagtgagattacagcaaatgatttcatgggaacatttatttagattttgtattttattttattagctgataatatctgggcctttatgatatagaaactagtacaataaatatttgaatgaatagatttaggaaccagataatttggaaggataatttcaaaacttgagtgaactatgacatttaaaaccagcatcttggatcatcatgtaacatattgtgtaatatacattatagtgaaatagattttaaaatttaataccttaagcaaaatattttaggaagaatttttctttcttttaaagaacaagataaataggtttctagtcccccacatccaaatatttttgtgtccattttaccctcttgataaaggcagaaaagggtttttatttgttcctaatgcagattaagagttgttaacctctacaaactacacagccaaactaaagtcagttcagaaggatgtgatatgttatataaatgtagtatgttatgcagcattacaagttccttataatctcaacaaatagcatttagaatttactaattgatttaaaaataaaaaccaatgcatgttaacataaataacataaatagcattttacaaacaataatttctacttcatcaagaacattcttaagtgaaatggcatgtctttct

SEQ ID NO: 137654 - DNA, 1024 bp, Homo sapiens
aactttatgatagttcagcagtgttataaataatgaacctgaaactctaaaaagttaccaaaacttctttcaaattgtggtatataatttattcaagtaaagaaaggtaactctaatcaatttttatattttattaaaagtttctacgtcctattagtaggatttatattctctctttcctaagtatcttttgtcctaacttcctccataggtatgcacctttattgcttgccagtaacttgaggaaataagaacatttcttccagactttgagtcaatgaaaattgactcccatatggaaataggaattgaatgctactgtctcatgtatgaactcggtatttggcctagatcttttccctttctctgaaatgaggaagatgttatggtacctcacttcacatgtgcctgaccagctgttgtaacatgtatcttcatgaaccctatgtactggtttcactctatggattgcctgtacagtgggaataattgaattgacaaatagggttatgattaggttatgatagaaactctctagcccagcctgacacaagtagatcacaaaacatctttattctaacactgatggtaggaaagcatctcccagggatgtcggtagagttcccaggggtaactttcatctcaataggtctccaactctaagcagaagacatgttttgccatggaatacagagagtgaaaactcatgaatgaatgagaaaaattcattctcaagagacctgccttagctagctaacacacgtcattagcaatatgatcttgacggaattattaaacatctccaagcttcaatttccatggatgtgggtggtgataacaggattgttgagaaattttaataagataattaatgtaaagtacttaacacagtgcccagttcattgtaagggattttcatcaagttttgtcaaaataatttctctcctatgactcacttgggtgttgtaacaggtccgttaaagctttcttttactatatctgaaatttttgtcctatattcttc

SEQ ID NO: 137655 - DNA, 1052 bp, Homo sapiens
ttgagacagagtcttgttctgtcgcccaggctggagtgcagtggtgctatctctgctcactgcaagctccacctcccaggttcatgccattctcctgcctcagcctcccgagtagcttggactacaggtgcccaccaccacgcctggctcatttttttgtatttttagtagagacggggtttcaccttgttagccaggatggtctcgatctcctgacctcgtgatctgcccgcctcagcctcctaaagtatcttttctttaaatagaggaaaagtggaaataaaataggaatatttttctttctctttgttacctaatgttagttttctggttactgattgcaatttgaaatccctttttgttatcctcagaatatatctctttttaaggctcacatcattctgaatcttggccttttgggtgttttgcaggctcatgacactcttgtagttatcactggttatgtctatttcattacactagtagagctatgaataccaacttaagagtcagacagacttgcatttgaatctcacctctgcctctttctatgtgtgtgatttgggattggttgtttaacctctaagctattatttcctcatctataaaatggaaacaatagtactattaataataggaccaactttgtagggtttttataaggattaaatgaaataatatacattaatcatgtagcaccattccttacatagagtaaattaaatgccattgttgttatatatttttaaaatctgagattatagaaacacgttatagctttcttttgatacttatctttttctccatctttataattgtacagtcataacttcacctttgagtgccttccagtagcttatataaattaaagttctcaaggaagaaggttacatatcttttaaattgtgaaatttcacctaatttaattgcaactggcattcttaatgcagtttctggtgatggtcctcttactgagtagtaaacgcaaatatttcacatgcaattggtgtgtaggtgttaaattagcctttctggttaaccatccataaata

SEQ ID NO: 137656 - DNA, 1058 bp, Homo sapiens
gtaatatattatatgcaatttctgtgtattattgggattctgtatttgatgcggcattgttatcatagcttcctttacttctttagccatggtttcctttagttttttgaacatatttataatacttgccttgaagactttgtctaccaagtctaacacctgagcttccctaagacagtttctcttgcctactttttaaaaagctgtgtgtgagtcacactttacccattctttgcatgttttgtaattttttgttgaaaactgggaatttttgataatatagcaatctggataatatttaccaccaacacccccttccccagttcaagatttgttgttattgtttgctagttgtttagtgatttggatgtagtagttcagtgaagtctactttccctacactatgaagtctctgatgtcacctcagaaggcacaaggtttcttatgtgcacaatcaccttgggatggcattggtttttatcagggctctatttgatggtttctttttctgatctctctgttgtcagtctattggtatcatacatagtcagctattagccaacattagttgccaactggttgttctattgtttttgtcaatgtatggggcataaattgctcaatctgatccaattaaattcagcaccttttgtataggtagttttgagactagtatttgaagtttactctgattccaagacacctcttggaacacatctaagcatgtgtctttccctgattctcttacatatgtatctagctgatgtatggtttagcttgttgctgtcttaaagtaaccagccctttcttaattactcaccaccaaaatctccattgtttccacagagctctgaggtctgaacttactcatgctctgttccaaataaagtcagttccctaggggagagttttggagtcttctgttcttatggtcttcctgccccctggggaaaacatctgcattactcctccagagctggcagcttagacagtagcctgcttttcttgcagttacaccccctactttattgatgggattggcagcttttgagtttccc

SEQ ID NO: 137657 - DNA, 1789 bp, Homo sapiens
aggataaatctggtcccttctactacatcctggctgtaagttagattcccagtccagtactcttcatctcctcttttttctttacctgattaggagctgagacttgagatttgaattctggctccccaccggttaaggcaagtcacctcatttttttcctacctcatttttctctacaaagtggaactaatacaagtacttcccttttactgtttttgtgagaattgagttaatgtttgttaagtgtttataacagaatatggccaataggaaactcaaataagttttagccactactaccaccaccatcaccactgccgccgttgctactactactactgctgctgctactactactacttcccatgtatcactggagaaattgtctaaggcattgcttatggtacagatatggaagaggactggaccataatatttagtagatactgctggattttaaacattatatagtagttggttttttgtatgtgtgaactctcatttgtttgtattaatgtgcaaacttaagatgatagaacttcagagctggaagagatcacctgtgtcaatcacgagcaaaattaggtacatagagctgattccctgggctaagatcatgtaacaagttcatctctgacttccattaagtgctgttagtgtcacaccatgataccacttgcctcttctgtatctaatgtcctcctccaccatcatccaagggaaaattgtgctaatagttctctacaattgggtaaatttaaaaattgaggtaaaaccaaagatagtgttaactgcccacatgaactcttagggtagttcaacctaggtaagtaaatgtgttcaatatccaggcattagtagaccatccatagcctgtttctatttataaagatctggaaatagttaaggtggctaattttggaaatgtatttcatttccatctggtctgaatcaatgaacttaaacttcatgctatgtgggatggagacattttatgagataccagatttaaagactattatataatgttcccagagtcttcttttggtattacaagataagtttaattatctgtgcacaagtgatatgataacagtaatatctgatgaagaagcaagtggatgcctcctgttgacttggatatccttctttgagccttcaagccttccctgtatgatgttctctgtcaggagaacagtgcatttggtgctttactttagtactcttgagcatatcaaggtgatatgatagcactggcaacctgtttctgaatatctgtgtgccaaggcattgctctaaattctaaaccctttccccacattatctcattttaatcatcacagaaacattccaaaataggtattccagttttatagaggaatgaaactgaggctcaaaacagtgaagtatcttgtccaagattatgtagaaggccaggaacagatgtggaattctgacacagagtgtctgactctgaagccccgtgtttcccataggggttatcattggaattagcactgaaatcattggtcatagtactgctactaaatgcaaagctctactactaaaacttttaaaggcaatgttgtaaagatactaccgtgtatctttgcacccagaagattaataggaggaacaagtaattaaaggtttcatgttagataagactttggtgaaagaatgcaagaagctaaagtagtactatgggcttaaacccccaaatggtatccatctattggttttaccagccagcaggtggtcttcaagaaaggaggatgttttggttaag

SEQ ID NO: 137658 - DNA, 1571 bp, Homo sapiens
atcctccggatggtgaggagagaaatgagtcatatgttcttggcctctagggatgggatgaaggaaatacttggtactgctgcagccccaatggaaagggatttaatgcccagtatagcaatagagaagggcaactttaggaaggcccaagtttcattaagaggtttaacactctagcagaggcatcctctatgcactgcagtgaatagcagcttctccctcacacaaatatgttctgaggttctaggcactggagatagagttatgaatagatacaattccctcccttcctagagtacatagtcctactgggagaggcaggcaacagatttcaaaaattgctaagaaaatatcagatggtaataaacaagaagaaagaaataaacaggatagtgagaaaaaagctagtaatgatggaaaggatactcatgataggatggttagaactcttctttgaggagataacatttaaactgagacttatagatgagaaggaactagccacacaaagagccaggagagaaacagtattcagatagagaaaaaagcaaattcgaaagccctgaaataagaagtgtttggcctttcttaggaaccaagggaaagtatgagcagtgtgaaatattggcagaggccagattgtgcagattgggatttataagccatgtacaaggaatgtggattttattctgagtgcagttaaaagatattgtgggattttaaactggagtgcaacctatcagattgtgctttaacatgattactgtctgcagagtggacagtggattgaaagaggtcagcagtggaagcagaaatattggtggggaggctactgcctttttccaaggaagagataaggtgatcttggattagaatgataacaatgaaggtgaagggaagtggaaggattttggttataatttgaagatagagtcaacagggcttgcccatgggttagatggggggatagagaaaaagaaagaaaagactgttttcctttctggttttagtaactgggtagcttaaaatggagtgttggaagggtggtggttaggatttgcaagtgagacagcgatttggaaaaggagaagtctgcgtgagactggcagagtcctgaaattgacagatcaagagcagttaattcagccactgccctgctggtaaggagggcagtgagagaaaatgagagaaatgttgcaaataggccttttaaggaagctgacttactccattagtgaaatcatactcaaatcatactcctggaggaaagaagtaggtccctggaggagactgaaggtgagaagctgctcagcccactcttgtggtaggggaagcagttaacagatgcagaagagattctgcctggttcaggagagaatgggaaaacttggagttccaagatttggtggaggagggtgggttgaggttcttgttgcctttgttgtgatcaggtacctcaattttaatcctcaggctgatggaatccagagaaacacctgttgaatctgtaataggaaaaatcactggaaatgaaaaccacactcttctatttataaaagagggttgatttg

SEQ ID NO: 137659 - DNA, 1034 bp, Homo sapiens
catttgggttggttccaagtctttgctattgtgaataatgccgcaataaacatacgtgtgcatgtgtctttatagcagcatgatttatagtcatttgggtatatacccagtaatgggatggctgggtcaaatggtatttctagttctagatccctgaggaatcaccacactgacttccacaatggttgaactagtttacagtcccaccaacagtgaaatacagggtcattttatagagccggcaggacaaagaaagcagtcagctgacagttgaaactcaggtctggagtagccagcattggttctgaagtaggacaatggtgcttgttatgacttcattagtctcttcttggctgcaggaaaagagctgataaagaccttttgaggcccagagacaggtaaagtatccctagatctctaacaacactaaactacatacaaataacacagataactttccgttgacataggactaataggattttagttccagaaaaatcactgtttttccgaagttcattatgaatcccaatgtgtcttttagaaactttttagaaacttcctctcactaaggttctttttttttttttttttttttttttttggttggggagagggggccatcgcttctgtcagaagaatagacaaaataaaacaagttagttttctttttcttttttttatgattatactttaagttctagggtacatgtgtacaacgtgcaggtttgttacatatgtatacatgtgccatgttggtgtgctgcacctgttaacttgtcatttacattaggtatatctcctaatgctatccctccccctccccctccccccaccccatgacaggccccggtgtatgatgttcccctccctatgtacaagtgttctcattgttcaattctcacctgtgagtgagaacatgcggtgtttggttttctgtcctcgcgatagtttgcccagaatgatggtttccagcttcatccatgtccctacaaagggcaggaactcatccttttttatggctgcatagtatt

SEQ ID NO: 137660 - DNA, 1781 bp, Homo sapiens
ccagcagctttgtttacctactcaagcctcagcaatggcagacgcccctcccccagcctcgctgccaccttgcagttcgatctcagactgctgtgctagcagcgagtgaggcgctgtgggcatgggaccctccgagccaggcatgggatataatctcctggtgtgctgtttgctaaggctgttggaaaagcgcagtattagagtggggagtgtcccaattttccaggtaccatctgtcacagcttccctttgctaagaaagggaattccccaaccccttgagcttcccgggtgaggcgatgccccgccctgctccatgggctgcacccactgtctgacaagccccagtgagatgaagcgggtacctcagttggaaatgcagaaatcacccctcctctgtgtcactcatgctgggagctgcagaatggagctgttcctattcggccatcttggaacctcctcagttttatttttcttacaatttgtttttctcctgaagaagtaactctaaattttttattgaacacacaatgtgtattttattcctattaaccaggatgttgcctcctccttcctgttttgttccaggtattgatactcaaaagatttataattgcattttttatatattagaggaactaccaagtggtgctttatgagaatcaaatggcaaaagtcagcatctgtagttggatcagggtagtaattataagcagcacatttatcttattccttctgtggagtagagcagaattaaggccctttttagagttatagggctgcataggtttggagagccctcatccatctgcttccctgtaggttcaactctacctaaacgtttctagaaagatgaatatcttattttttaagggcctttgagaattaaatttcgaaacctccttctaagtcatttctgtgtttaggatattcactgtcaggacattattttattcaagtaaaatcccattacaaagacacagatatttcccccgtctcttgaatgccctacagaaataatgcttcgttgcgctgactgcaatggactacattactacaataaacctataccagcaaactttttttctgtccccaattccataccagctagtttataatacagatatctggtcttatgtctgctttgcaggggaaagaagaggacaaaactggggaagaggtatgagaggtttccttttataacctttcctctttgctgctaggttgggatcactcgcaggtttaccattgacagagtgaggtgagctcgcttgttttctgttcttatccatgggttgggaatgttatttatagcaatatactaattataaaaaaattctactcaaaccaaagaaacaggaaggtctgttaaggggagatcaattagtgatgaactcttagctgtatttgagtcccttttctcttccccagtgtttgttagtcttctggtcgttttgattttcacattcttctgaatgtatcccatgagaaagtcctagtagatgctgttggactaagaagaaacttaatagttaagctatgtctctttagtaattaaagggggtgctgcaaataatttagtaaaaaaaaagagggggagtgctaactcatgttggttggtcaggtgtgatagctcacagttaacatttgtttagccaacttaattccaaggttaagcattagttgaaatctctcttttttgaataatattgattgcatgatcctgaatgttcagcattaagtcagcttaatgtatttcttttaggaagtaaaagttatcat

SEQ ID NO: 137661 - DNA, 1030 bp, Homo sapiens
gatatcaatggaaaaggaagaatcaaggatgcctctagggttcaggtatagctaaagtaatggtatcataatcccttgcaagtaaaaggaggaaagatgtgttaaagtgtaaagcccagaagatgatgaaaaagctgagataaccactatgggttcttatagtcacattttagaacaagcagaacaaagaaaatggagagttatcatttatttagcacattatagtttatgaagtacttttacatacagtatcttattttgtcctcatgacattcctgtgaaggaagtagtactatccacattttacagataaaaaatcttggactaaatgattaactgacgttttagtaagtgccttgtttttcccccactgtattacactgcctcaagaagaccacctgcttgcagctattgacataatattatcagatgaaaatatcaggacaaggttagagttttgccatcattataaacatgagtattttgctttgctttatacaattgttctactggggacatttgataggaataggactgtttgcccctacactaaatgtccccagactactatgcttttaaaatttaatatctgctttttatacttctttaatctcttccactgctgtcagctgttactacttgatgcgtctggcagttcccctcctcctaatcatttgtacccctggaaaccaaacaaatatgcttgttacttttagacacaatcttaagagtgactatgcgttgaattagaacatagggagtcctcttatgagaactctaacccttatttatgtttttacgggtaaagaacataagtcttactgtacattcattcttagaatatataattttggctctcttctagtgtcttggccaattttgagtagttgaaagtgctggataagttacctagaaaagtgaggtatcagtatatatatttaatatgtaaccttggccaatactttttaaaaataggtgttttggtggtgactggaaagtaatcatgctttacaaagggaaggttgtgaat

SEQ ID NO: 137662 - DNA, 2278 bp, Homo sapiens
ttcgtgaatagtagtctagatgccaaaggtttgaagtgactgcccaacctcctttattccagaatgactggtgaccacttctctcagtccccattcccctctactggaaaagttgcagacattttctttgttctccagtaagtctttcttcccaaaacagtcacagaagcttccaaccagccctttcttggttcacttgtctttctctttttccctctgcgaggaaggcttttcataaagatttattgactatccacgcggcattgttcctataggaagcactgaactcctcagtgtgaaatctgtgtctccagctggctaaataaagtactttgtgacacttggtacagcatgtgcataattcagatgtgtggactgtggcccaagcatcatgagcactcagcccatgtccaaatagaagcagtgttttttttacaaatttacttttcaaattaatttttaagatgaacaattagtggctaatcaatacatttattaagccacctgaactgagtagaaatgagagagaagaggaaaggtgatttcccttcacactcgattgaagtatgaaattaataaaagtagatgtcattggaactcagcaagatcagtaattaaaactcttggtctttcagatgttcctaggaaagattgtatccttcattatgatggaaatggaaaatgcttatttctctgcacaggtagtttgggacaaaggaactacttttactgttagttagaaatatcctcatgtcaccttgtgcccagaaaaataggaatgattttggattagttgtggtctgttaaaaatacagtggtgatattaccattttatggctttgaattgagctttgggaaaaagtttctactttgatgcttttaggagctcatgattggatataagattttacaaagataattgggagaaaacaacttcctatgtccttttatgaattcatttaaggtgtaaaagtattttctagaaataggcagggtatctaggccttgataggagtgagggacatttcttcagctttagtagtcatcctgttttgcatgtgaccatgtcagtatatccattttagactggcctttcagaagaagagaaatttgcttttccttctttttgcttttgtatctaagtgtctattacaggaacatacatttggtgggtattcaaatgcctctgatgagatgtttattggtaaatgaaaaatgttttctgaagggagcaaatggtatgctctctaaagataatcagatttatcagttcaaaaatatggcaatgcaactgaagtatctagattgaatggtaaactatgaattatgcctacacaatgctgcaactgccgccttatgtgacctcaacttttgcagtataatgaaggtatattattaaacatttaaatagcctcacttactgaataaacaatcagtggcttgataaattatgtttggacctagcactagagatacttcactcattatagtgcttgtgagcactaaggccaacccctgatatttgagggacattatgcaaatttccccagagcagcatggtttggagttctctgtctgatacatcagttagcgttagtgccctgtggctaaaaaggatatgatgatgggtgagtatccaagtgtaaggttaaaataaaccaatgagttttgaggctttagactttcatttcatttcatccatcagctacattgagctttcctttagaaaaccagactagcgttgacctgctagagtccctggggagactatgctataataaattttgattaggtattagtagatataagagagagaagagatgagctagccaggaagggtgaggtgggcagaagggacattactgagctgaggaggggataattagattagaacaaaggaaagtgtatatgcctcctcactcttcctctcaactactgttttggtctagcaatgaaccttgctcattgatctcttatccttcctgtcttagttttcttccaccactaccactaccactcccattcattttttattcttttttttttttttttttttttttttgagacagagtctcactctgttgcccaggctaaagtatagtggtccaatctcagctcactgcaacctccgcctcctgggttcaggcgattctcgtgcctcaaccacctgagtagctgggattataggtgcctgccaccatgcctggctagtttttgtatttttagtagagacagggtttcaccacattggccaggctggtcttgaactcctgatctc

SEQ ID NO: 137663 - DNA, 1071 bp, Homo sapiens
caagcactctctcaaaaaaagttcttaaaggctatgagagaatgtagcaacagtggtggacctaagaagagaattggcttacctattcattcattcattttcatgcgttcattcaacaaatatatactgagggcctactatatgccagcattattttatataggttctatctaccttgttatacaaaagataatattacctggtttgaaaatgctcattctctagtggtgagtaacctacggttaaattagagtaacccttagttccatttctctttggtaaccaatgattcagtactatgtagtttggatcactttgcagtatagtggttttgtcttcctattctgtgatgtttttctagcctgcagcctcttacccatcattcataaccatcactggtgttcattgaattgtacttgtagttgtttgcaatgtgttggttttaattttctttctttttgaactttttattttaaaatattttaaacataactttttattttcagaaatacaggaagtttcaaaaaatagtacagagaagtctcttgtacccttcattcagttttccccaatgattatatattatataattagagtacaatattaaaaccaggaaactgacattggtacaatgtgtgtataaattctatgccatcttatcacttctgaggatttgtatagccaataaaaacaattccatcaccacgaagatctctttcttgctatctacccctttagagtcaaacctgctccctaccattcttcactatctgtagcccctggcaaccactaatttgctttccatgtctaaaactttgtcatttctagcatattaaagaaaaagaatcgtacagcatgtgaccttttgggattggcttgtttttcactgagcacgatacccttgagatttatctaagtttttgtctgtatcaatagtttgttcgttgttattgctgagtagtattccatgttatggatgtaccacggtttgctcaattgtttgcccactttattgttctatttccttgttcactgattcttttctcctgttctccctgttctgctgttgag

SEQ ID NO: 137664 - DNA, 1040 bp, Homo sapiens
tattaccagttggaatgtaaaatggtacagccagtgtagaaacagtttggcagttcctcaaaaagttaaatataggattaccatatgacccagcaattccattctaaggtatatacccaaaagaattgctaacagatatttgaacaagtacttgtacacaaatgttcatagcagtattattctcaatagccaaaagctgaaaacaactcagatgtccatcaacagatgaatggatgatcaaattgtgatacacccatacaaaagaatattattcagtgataaaaaggaatggactgctgatacatgctagtacatgaataaacctcttaaacatcccaagtgaaaagagccagacacaaaatgtcacattttgtatggttcaatttatctgaaatatccagaataggtaaatccatagagatagaaagcagatcagtggtttctaaggactggaggtagatagaaatagggaatgactgcttcgtgggtatggagtcacctttaggggtgatgaaaatgttttggaactagatagacatggtggttgcataagattttgaatattaaatgctactgatttgtataattcatgcatttaatagtactaaacgctactgaattgtataattttaaatgattaatttcatcttatgtaaatttcacctcaaagaaaaccaaaaacaaacaaacaaaacgaacaaaaacagtcagctaccctgattggccatagcttgctgacctctgctctacctaattcaggaatactgtacatcttctatctccgaattatttttgtctctaatgtcattgtggttactggagaatatgttgtaaaatggtagaaaaggcttatatggccatgatacaacttgactaccaagagctgataaagcatgaaacaccaacattttctctgagggctttgtcagtcactttagtagtcatagtttaaagacagaaacaaaacttgtggctacttatatcataaaaatgtttattaagctgttgtatatgtatatgtatacagatatggttgtgta

SEQ ID NO: 137665 - DNA, 1021 bp, Homo sapiens
agcttcccagctgctttgtttacctaagcaagcctgggcaatggcgggcgcccctcccccagcctcgctgccgccttgcagtttgatctcagactgctgtgctatcaatcagcgagactccgtgggcgtaggaccctccgagccaggtgcgggatataatctcgtggtgccccgtttttttagcctgtcggaaaagcgcagtattcgggtgggagtgacctgattttccaggtgccatctgtcacccctttctttgagtaggaaagggaactccctgaccccttgcgcttcccaagtgaggcaatgcctcgccctgcttgggctcatgcatggtgcgtgcacccactgacctgcgcccactgtctcgcactccctagtgagatgaacccggtacctcagatggaaatgcagaaatcacccgtcttctgcatcgctcacactgggagctgtagaccggagctgttcctattcggccatcttggctcctccccagaagagatgttttgtgagcaagggtaagggaatacaatctggttttgtttcttagcagaaccagaagtagtagcagaataacctaacaaaaggatttatgaaatcagcggagataaattgggtgatgaagtcatctcatatttcttagggcaaatttttcaaatgaaggctctgcaccagctgtatctatttcatccgtatccacggtcaccattctgttaaaacctttgtcaaagcaatttcgggctaaattcccaaactcattgtcctttacttagtcctcattcttcatgaatttgatgtaccctctcacaagtattccttgatcttggtgatactatgctatcctaactttccttctgcttctaaaaattgtatctatattcctccttgtctctttttctcattttctatattcattctcttttaacactactttttaggatgcagttatacagtctcttatcatggcctcaaaaagtagataggtgatctactaatatagcttaacattccaagtggctgatgg

SEQ ID NO: 137666 - DNA, 1049 bp, Homo sapiens
ctttaagtaagggatattgtgatcagcttcacattaaaacaattttaaacattttatttggaaataatttagacccacgagaagtttcaaaattagtaaggaagttccagtgtacccttcactcatattcccccagtaataatatctgaaataatgttaggacaattattaaaaccaggaaacagacactgatacaacactattaactgaatgacagacactttttgtattttatcagttagctatgaatttctaaaagactcctctagctacaatataaacaatgttttggaggactagagtgaatgcgtggagaccagtgaagaggctattgcagtagataaggtgagatgttggtggctcagactaggatgttggcagtgaagattctgaatattagattcaatagatatttgggaggtaaaataaagtgaactaggtaattcattggatgggatgttgaaagagagaaagtcattatttctaggtttctggcttggataactgaatagaaggtgatgctatttactgaaataaggactaggtttgtgtgtatggaggggcagagatgagtagctcacccttggatggacaggtagatctgttgagtatgcaaatgaatttgaaactctggagctcaaaagaggggctacatagtattctatagcatgatgtacaatgacatatttatttattttttatttttaaattctttgtagagttggggtcttgctccgtcacccaggctgcagtgcagtggcacaatcatagctcactacaaaagcttgaactctcgggctcaagcaatctccctgcctcagcctcccaagtagcttaatgggaggctaatccaccccaccacacccagctaattttattttttgtagagacagagtctcgctatgttgcccaggctggcatcaaactcctggcctcaactgatcctcctgcctcagcctctcaaagtgctacgattacaggtgtgagcaacagctcagcctctgacatacttaataactgttttctgttcttagaactttttccaaatt

SEQ ID NO: 137667 - DNA, 1038 bp, Homo sapiens
aaatactctgacttgatctttacacactatgcatgtaataaaatttcatgtgtaccttataaatatatacaaatataatgtatcattttttaaaaaataacctgatgcctcattagcctaggcatggaacaaacttcagtgttctaagaggggctggagactgatgaataatgagaaagctgagaaaattatacaaaacaaaagtagtatctgaacttctatcagccaccaatatagtatgttgtgatattaaccatcataatccatttgttaccacattttaaaatgtaaactattagagaatttctctaccttttgggatagtaaattttgtttctatagaatttattctgtattgaacttttactgttccttaaagcaaggtgtacctgagaagttcgtgttaaagagtctcataaagtctcatattatctgtgacctctgcacatttaccaacacaagaaccatgttgtacctgagagtattgtggagactctttataatacttggaaggtcatgcacagttcaaattagatttagggagtgccttgttcaaccacatttatgatgtgtcccttattggccagagtagatcctgacacctaagcagaatgaagaacatttcctgggtgcagtacatacttcaaaacatttaatattagtgtgttgaaaagagcatcaaggcaacacttttaaaattttaagtaaaagtataggaaaatgtatttatgagtttggagtagggaaacctttttttttgagagacagggtcttgctctatcgcccaggctggagtacagtaccatgatcaggactcagtgcagcgtcaaactcctagtctttagtgatcctcctgcctcagcctccctagtacctaggactacaggcacatgccatctttttttttttcttaagaaacagggtctcactgtgttgcctaagctggtctcaaactcctgggctcaagttatcctcccaccttagcctcccaaagtgctgggattttaggcatgaaccactcactgtacccagcaggga

SEQ ID NO: 137668 - DNA, 1042 bp, Homo sapiens
attttaaagtttccacatatgagtgagaatatatggtgtttaattttctgttccttatttcacttaacataatgtcctctagttccatccatgttgccacaaatgacaggattttcattcttttttatggatgagtagtattccattgtgcatattataccaaattttctttatccattcatctattaatggatacttaggttccttccaaattttggctattgcaaatagtgctgcagtaaacatgggggtgcagatgtctttctgatataatgacttccttttctttggatcaattcccggtagtgagattgctagatcatatggtagttctatttttaattttttgagaaatcttcatattgttcttcatagtgtctattgctctcaattgccactatgctaatttatatttgagaaagaatgtgattcactttctaatatttcttcaatagaaagtagataagatttctgattgtttcttaacaatcttctcaaaagattgcagaaatcacagttggaaacagagatattcagtctgctaagatggctgaggttatactttaatcattgtttatacatctatgaaatattattataggaggatgtcaactaccagttttccttctcttgtgaagacaaagctaaaagaaacaggtttaaactatattggtagtgttaggttacatataacaaagaaatgctcaataatgaggtttgttagatactagattagtcaacaaaaaaagatagctgaatttcactcatgggaaaatccttatgaaataggatagataatcatctaacatgatcggctagtgggaatgatcttcatgtaactaaatggcctcttaggactccttccaaactctgaattctgtgaaaataatgtaattaaaacctgtttccaaaataaatatatagttattaatactacatagaattgtttaataagtttacaataaatgtctaccacattggcaaacaaatctagaataccctggagccatgttataacattgtcatagaatctttgttattg

SEQ ID NO: 137669 - DNA, 1049 bp, Homo sapiens
ggaaagatcatttattgtctatgttagggcatgcctgtggtgacagtacttcctatatgaatagtctcgacttgttctaccaatagaagagagtatttaatattgggattatcaacatatctgagactcttttgtatttagttggcagtacatatttatctaacaaaaatttgttgggtacttaaaatatggaaggcactgtgctatgtgatagagatacactgatgtggggaaacaaaaagacaatgtaccccaccttcatggagcatacaataatttagtgggagacacagacattaaaaacctaccaataaatgtaaaatttacaaatgggttacatgctacaaaagagaagaatgtgattccatgaaaacatgatatcgtaccttgactcacatgacaatgaagagggcttagactgagatctgaaggaggagtaggagttatctagacagatggtagggggtaagagagttccaagcagaggaaatggcatgtgcaaggtcctatggtagcaaggagcatagagagtttcaacaaatgaagagtcaagtatagctggaacatagaaagaaatagggagacagtagagcaagaagaggcttgagggtaggtagagtctaaactatgccagggctcataggccatgttaagatcttagttaagctctggttaagtttagcttactttggactttatgaaaaagaaatgactcgattttttattgtatacttatgtttacccagtgattttacaaagaaattttctagttatataccatccacattttaagcagttaaaaagagtaaacatagttggaaatgcgacttagaaatgaatgacatatatttatgaatggaaactaggaagaaaattctatagatgagaattaaaatctgtgacacatagtatcttaagaggattcaattcactaagtaggcaaaattttaaatgtaacatgtattttttggacagctattataaaagatactgctaaataagaaaaataatgccatatctgggtaagagctattgctggtaaaagtgag

SEQ ID NO: 137670 - DNA, 1070 bp, Homo sapiens
accattatcaaagtgatctttatgtcatctttcttcccagggtctagtgaagatgaccacctgcttgccttggctttaacttacttcagtgctcactagtcatgtttcttttatttctccacctagctttaatgattttttagaaataatttcattcattatatgtgggtgctatattaacatcaaaccacatttctcttttcataaatcccctaaaagcacatctttctaagcaaaacattttagtttgcaatgaccctgtgttatagtttgccattaccttattttctatatttgacagtattgtctaatgtattttgggcaggctttttgatcagcttttttactgacaataacaggcaagtatttccattagtcttccggctccttttatccctatattctttcttctttcttcctgtcttttcatcttgcttcttccccatgcattttttctatttatcttaaaaatatttttcttgtgtgatgtgccataaattgatgttgacaaaatggtttctatcaataaatgaattcttaaatttactgaaaattttaattgaattttttaaagccagaatgactccttgttcttcccaaagacaaaaagctgttcatgtccacacctgctaatctaagctgtggattcttagtcctttgaaacacacaaaacagtgctcagcaaaattttttattttttctaagtgccagaatactggctactgctgaggtaattggttagccacacgttgtatatgttattattatggcttttaaagctccaagtataggtagaaactaggaaaaaaatttgtataatcctcaaaatattaaacttccataaatagtatttgcataggtgccacatgagatttcctttgaaaatcaaaaaaaagaaatttatggaaaactaatactcgtgtaataacataagttaccactcaaaaggtaaatagtataataactgacagtgtatcttttagggatcatggaaacgcttgaaattgtgagtaggacagcatttgatatgaaataagcttgcagaaatgattcagtagctaactggatat

SEQ ID NO: 137671 - DNA, 1077 bp, Homo sapiens
ttaatgggaggtttattttgtttctgaataagaaaaagaaaagaataccatggcccttatgaaggtttatagagttttgagcagtatttcagccataaataagcaatcttagaagtctttgatcaactaagtagtcttaaaaatatgctttttagggggccaggtgtggtggctcatgcctgtaatcccagcattttgggaggcaaagttgggaggatcacttgagcccgggagtttgagatcagccagggtaacatagcaagacattgtctctacaaaaaataaagaagagaaaaattagccaggcgtggtgggaggattgcttgagcctgagaggtcaaggctggagtgagctatgattgcaccactgcattccaggctgggcaatagagcaagaccctatctcaaaaaaaaaagaatttttttctaactactactgaaagtgactgagtgcaaaagagtaggtttctccattgtattcaaaataatgagtaggtcccaaaatatagatagtagtagttgacatatttcctcaaaaagcagccaggaaactcacttcagtatttgtttgtatatcagcttacaaaagaagaagtgaacctatactccatgtatttctagcttaattaccaagtagattaatggttgcctaggggtagagggaaggtggaaatatagaatgactgctaataggcaaggagtctcttgtaggtgatgaaaatgtcataaaattagattgtggtgatggttgcacaacttagtgaatatactaaaaaccaatgaatgatagactttaaatggatgattatgtaagtgaattatatctcaattttttagaaacgaagtaaaagtggaaatgtttctatctttacagatttgcttattctgaacatttcatataaaaggaatcagaatcatataaactctggtcttttgtaattgccttcttttacttaacataacatttttaaggtttatccaggttgtagtgttattctattttattgttgaataatattttgttgtatggatataccacattttctttatccattcatcagttgatggacatttgaa

SEQ ID NO: 137672 - DNA, 1047 bp, Homo sapiens
atgaacttatctttttgagaccactatttaactcactacaactccattttaaagataagaaaactgaatccaagacaggtttagttactcctccaaaatcatacaactagtttgtgatagaattgattcaaaaacattagtcccctaactcccaaatgagtttcctttccactattttatgttgctcttttacttcagatcagttcatgttccacataaaatatggaataaacataaagaataataagtttcctctagctctatcactttgtaattttgtgcattattttagctgatggaaatctttaaaatgtgtgatctctttaacagtttgttattctctattaaaatatcagaaattagtacataaaccagttgcatgttaatttaaagctgtctgaagaaaagattttgttgttgttcaaattctggctctgttactaaattgctgtgttttcctgggcaagtcccatcctctctctggatttcaatttgcccacttgtaaaacaaaggagttggaccaagatgaattctaaggtctcccccagcaccaactttctgggattctgtttttgcagaattattctgaatgtggttaatcagccactttgaggtactattgtccagctaagcttttaggaatagtagtttccagaagagaaaatctatttcaccaccacctctattttgagttgatttttgtatatggtataagaaaggggtccagtttcaatctactgcatatggctaggcagttatcccagcaccatttattgaatagggagtctttcccccattgcttttgtcgactttgttgaagatcagatggttgtaggggacggctttatttctgggctatttctgttccgttggactgtgcatctatttttttaccagtaccagtaccaatatttttggttactggagacttgcagtatagtttgaagtcaggtaaggtgatgcctctagctttgttctttttgcttaggattgtgttggctattcgagctcctttttggttccaaacgaatatttaaattattttt

SEQ ID NO: 137673 - DNA, 1084 bp, Homo sapiens
atctattaagaaatgaaggagatcatcctacagacagatcacaggcaaaccctcattttagggaatgactttattccagaagataatttctaagttgatagtttggcacttgaatatttttctatagaaattatgttatttttctgtagcaattaggttattgtgttattatgctgaagtttccaggttagcctacaacctgtgaaaggattgaaatactgtgatagaactgaaataccgtactgtactgaaatactgttaactagcaattaaagcaaaatgtaattgaataagaaatagcaccttgacactaaagcatgagcatagcagagttaattacaggttaagaagatagatggaggctttgggagagtctttctgaagagcacttctaggtactttcaatggacattagaagttgatggcacaggttttatgtctaacttcagaaaggatgacttttcttttccttgatacagctatctcacagtgctcttataactatcagccattattagggctatttggggttcataaatagaacaaagagaccaagaaaggtaattttgaggtaactgggcaagaaatagcagaagaaagaacatttaaaggggtaatatggatccatgtgaggttatgtgattgcttaaggtggaattgaccacagtaaatgataaaaagaagaaaagtggggagctcagtttgtgcgtaggatcccagtggaaagaaagacagtgagaagctttccaggaaaccccagcacctttttaacttcaattcacacattctttctgtactgttccttttgtgttccctttctcccctactagactagttcttgaagggcagatatggtttcttattcatccctctgcttccaacaataactagcacatagtaggtgttaacacactgtatgttgaaatgatatcacatatgatcttttaggccaattaatgtgcttcttatttgaccagggcattagaaagctgtaaaattgtgctctcaactagcatttggtacatagttctagcatttgagttgaattcagaattgtaatgttataaatagagaactgagaacc

SEQ ID NO: 137674 - DNA, 1050 bp, Homo sapiens
gaaaaactagatctatgagaaagaagctgcagagatagtcacaaaactactactcccagtttttgagatgtcataaagggtaaattccaaaagataaaagatggacaaattccctgattttctcagagaggaaggttgggagtgatttgctgaagctatggatctgtacacttgacaattactcccagcataattctaaaatgtattttcaatgagatgctttatagacattcattaaagaaaataatggccactgggacctccaagttggttctctaagaagtcattaagaaaataatatttatgtgtcatttcttgataggatcactaaactagactttaagggcaagacatcataaaatagggatccagtaagataattaatcctatatcttgtgttatccttgtagagaccaggacataagagaagactgatagcagttggaggaatttaccttggttgaactctgtgtattcatttcaatgtagagggaattactgagtagcttaccatagagctctgtcctgttcaacactttcatcaataacttggacaaagatataaaaagtatatatatatatatataattattggattatacaaaattagaaacaacagataacatatgcatgacaaatggcttgtctggtatcaaccaaggcaaggtaccatacttcaggaatcactggaaaatattgcatctggaggaaggttttacttaggggctgaaaaccatatctgatgaagaatggggattttttagctttgcaaataaaagactttagtgggacatggtagtggtctttaaatattagaaaaaatggtatatgtaggagaaattagaatgatgagggaatagttggaactgagtggaggatatataggaaggaagattttggcttagtttaggacaattttctaacatttttttctgtttaacatagtagtggtctgtttaataagttagtgagctccttccctatcaatagaggaattcaagcagaagctagacaaccatcttttggagtgattgttaatgtgattctttc

SEQ ID NO: 137675 - DNA, 1098 bp, Homo sapiens
tttccccaccctcttcaacagtcttgctttttacattattgtggcatagttcaagtccagcctagtgcaccggtctatatagttttatctttgttagtgccgataagtcaaagtttaattccaatagtggccatacaagagcccttccttttggatttactgtgaatttaattgaaaagcatcaaaataaggaatcatatctgaagaggagaaaatcttggattctgcttcagaagtcatagtatttgtgttttggatctccaataataaactttcaaattatatttaatgtctagaaaagttcaattttagcattattgcaagaaaaaagacactaaaaataaatctttgtaggcttcatgatttgtgtaaactttggaatgtggttcttcagaaaacaaattagtctgtgggtaactgcaggctaagttatttggctaattcctattgtgctatcatgacattccagagcattgctatttaactttgccagataagattttgcatgtcactgcagtgagagcagcttcttttgtatgcatacttttctccttcttttcctttgtgttgggaatcttcatagggtgatcccagtctagaaataccattttttcccttcaccattgcattgacaagttcttctggttttatgttaaattttatacttccttgtcaacatttctcttaaataatatattaatgcaatattttaaataaaatttttatataaacgtttaatgttataatagttttacatttacagaaaagttgtggagataatacagagtccccatatactctatccccagtgtgcccctattacattagtatggtacatttgtcatatcaaatgacctaatactgatacattattattaattaaaattcatactttattcactgtttttagtttttacctaatgtcctctttctgttccaagattccatccaagatgccacagtacatttagtatccccttgactatagtaatttctcagactttccaatgaccttaacagttttgaggagtactagttaggtattttgcagaatgtccttcagttgggatttgtctaatgtttttctcatgactagaa

SEQ ID NO: 137676 - DNA, 1038 bp, Homo sapiens
tattgctattacggggtttttttagtttttaagttcacaggtacatgtgcagaatgtacaagtttgttacatacataactgtgtatcctgggcgtttgttatacaaattatttcatcacccaggtattaagcctagtatccatttgttatttttcctgatcctctccatcctcccaccttccaccctccaataggctccagtgtgtgttgtccccaccatgtgtccatgtgttcccatcatttagctcccacttacaagtgaaaacataccatatttggttttctgttcctgcattagtttgctaaggataatggcctccagctccatctatgtcactgcaaaggacatgatctcgttcttttttaatggctgcatagctgaagtaagtttcagcactcaaagttatcaagaaaactcttctatccaggatgacttgtagagttgcaaatgattgagattttattgtaaacagcagtttagttttatactattattagtacttagcttatttatattgtgagttaagtaactttctgtgggcttatcaggagaactagccaaactttattatgttgattgtatgagaaaatgcatttttacattccaatcaagtgactcaaaaatactactcagttgaaccatgtgaaattgttgattgatattcaaccatttttgacaaaaatggcagtttattttgaaatgcagtcctgttgacaagatggaaattacctacacattgatttattaattttatatttaatacattcatgtatccttcaagatgctaatcctacaccttaaggatattgggtaaatcacagaattttgaagaaaatttgtgtggaatattggggctttcttgggtccaacccattttttttccacttaatcagagatggagcagacatgaggactctggaattttttattttttgaactgataatagaatgaaaatgcagattcatttgttctattttaggccccaaattaaccattctattttgaagattaagtttaataataatagtaatagcaa

SEQ ID NO: 137677 - DNA, 1179 bp, Homo sapiens
ctccatctcaaaaaaaaaaaaacaaaaaaaaaaaaccactaccttttcaagtgtgcttcatcatcttatatactgtccaccacagacccaaggtcatagactatttctgcagcctaacctaccaatcagtcctttaacatagaactaactatacaaggatcctccctcctccaactccagataccttcagtcctttctcagtatgtctgagagccatgatagcatttgtatctctcaaaatcaccctctataagggcctcatctctcccggagatgtcccacacctattaaggtcaacaggaggatttggttctattcttggaattgacagtgttgtaccctgctagcacttacatgatgtgttaattccaatgataattttatcaatgttggtatccactaccatgcccaaatctgaactagaccttctagaactagtttataagtttcttgtgggcagagatttcatttctctttgtataagcctagaatctagcctactatctggaacattgttggtgattgttatgtaagtcgatgatgttgactgccccttcagctaggcagtgatgtatcaatggaaaccatccctgttctgggtgtaatagctttgagttaactagcaatgcattctgtggggcataacaaaatgttgagctagctcctgggcagggtctttgaattgctctgatatttcagcatcactctgtcaattgacataatgctacccctttgggcacaggggtttgtagaatacatagctctgggctgctgcaaaggcatctggattcaaagacagcatgtgtctggctacatctgccaataatatgtgtctggagggttacaaagcaatatgactttatacagatgaaaatgaaaattttaaactgacatttgttgatgtgagtaagggccactgatggaagcagttttagagggcggaagctattaaagagatggagccaggactttgtcagtaggggcaataagaagtataactggctgaaatctgagaaagagctcagaacaaggaccccataataataccaaaaaaaaaaaaaaaaagagccagagcagtaagatagggttttctagtcagtggaggtggcagcagcattgagcctttgaatggagaactggaccagtggggccattctctagagaagtcattttgcatac

SEQ ID NO: 137678 - DNA, 1082 bp, Homo sapiens
tggctttcctctcggcatgaggcttagaataagggctgagagaaagccaaaactgttgggcagagaaaatgtgacaagaggccaaaatagcctaagggggccttcaaatgcccattcaggtacttaataagtggcctttcaatcccaaattatcttagcatcttccctacctcactatttctctccgctagcctccatacacagaaataaatgttagcaaggcaagcacaattcttccttgctaataaatataaaatgtaagccatgtataatggttcttaacactggtagcagttttaatttctctgatcttctactataccaatatctggtgcaaggcagcaaaatacatttagtaccttgatgtaatttagaagcaatgattgatcctaccttccttgtgtaagactcttagctgacttagagaacataagtcctatgtaattaacatgttcacaaatgtagagagagctgtttttgaaatggtgaagtaccaaggacgctttgctgtaagcttatgaatcttggctgcattttaccactgcttccagcatgtagctcctttaatgaacctagtactctggtgcattaagtcacttgtttagggtctagtcacgctgaattctatatactgcgagccagaggtctaatcaacctatgctctttgtcacatggtatactggaaagaagaggtctttgtgcagatctattctccctatagcacaacaagtcgtgggcctggcctgctgccagaaagttagtagtgtcatctgtgtagatgaaattcagcaactcattatcttacattgtgccagaagagtgggaagaagattgacttggtaatttgctatgtttcgatcctaatctgtttagaaatatgatttctttaaaaggaaatggaaaagaatgtgtttctcatgatagcttcacagtatctcctgagaggatgttcagttattgtaaatacagcaatttaattctctccttgaatttcagatgtatttcatctctttaaaaaataaatgtgttgaaatgatcagattataaagtatgaattgtatacttccaaaagtggaatttta

SEQ ID NO: 137679 - DNA, 1043 bp, Homo sapiens
attagaatgtgaacatcaaagttatccctattctttctcattttttctgacaccagagaggcaacggaagatcatggctcaatgtttgtgccaagcagagaactaaagtagtggttcccacctctggagttacagtcctctatcgttagctggagtttggaatttttttcctggccaaatctcttcccctcaccccaaaaaagtgccatttggcatatgtttacactaaaagctgaagtgaactaaaattagtgttttgagaatttcctaataccccttgggaaaatatcagagacccaatgggatattgtaagaccagaactaacaatcactatttcagggtattgatttccaacaaagtacctgatcatttctctcagtgggtatgaaccaggcttctgatgggagtgtaatgatttggagaaaacaaggtggatctatttctctataggtttctctctgttcttaggaagaaattcaatggaggtagctgtgacagggggagggggggtggaaaaggggtccaaaggtcagatcttgattatgtgctagatcttgaaacttttcttttcaaattgcctgaggccctataaaaatcattaatatagaaatagctattttttcaagccttggactaagtgccatggaaattacagaagttattttctttgttcacattattgattgacaagttcaaagattttggatacatttcttggaacagacatcaaacagtttgacatttttccttttctattcaatgaaatgaatccttcattcaacatcatatgcttaggaaacacaccaatgaatttttaaatcatattctatattacccctgttcctgcactggttgagacctgtgagagaaaaataatacaaactgctcttttactgctattctgattagaatctctttcctctccttttgcagggaaatggcagacttgaactaggcattccaacgaaggcttttctgaaacactttttaagtcattgttctcagccatcctatctattctaaagtccattatcatttttct

SEQ ID NO: 137680 - DNA, 1026 bp, Homo sapiens
atattcatagtgttaaggtttctatctgtgttaacctagtttttttttcaaaggcaacatgatttcataatgaaaaaaaaaaacatgactaatcagaggcctttgtggaaggaactgtgcatatatctaaagggatcaatgggtgtaatttatttagactttcaaaaaatctctaactgacgttctgcagcaaaggttattatgctttaagttatgtcaccatgaaccatggaattagaggggccatcctatgaagagggcttgaatgcagggataaaggggagtgataaatgctgtttctggttttattaaacatttttgtatatagtctaggtgaaagagtttgcagtggaatctctaagtttgcagatgatgaatcatttagtccaaacacccattcaaagttctgccacttactagctgtgtgacccttgaaaagttacttaacctctcttgtcctgtttcctcaactgtaagataatggaattggacatgaacatctcagctagaaattctgtagattagcttaactcagctcccctctttgtgttgataatgaaaacaacacataatcaagttctttggttgattagggcaatgttagagagtgacaattatggggtcaaggaccagagaaagcaattgttatacagaattattcactatacagagttcattgtaaccagattgacaaagcactatttctgccagccatctgctggaacacaaaaatagctttgttatacaggaccgtcctttataattggatttaacctgtatgacagatttcttcaacaataaatttataaatccttgtatagcattttagacctgaggttcataaaattttggagtaagaggtcacctagtccatacctatatttggcaggaggagagagaaatgcagacaggtgaagtgattcgcccaaggtcagacagcaaataagtcatagagctgtatctctggacaactactccggttttcttctccctacactcagttctcaaagcagtcaggaatatagc

SEQ ID NO: 137681 - DNA, 1108 bp, Homo sapiens
ctccaacccctgaccccatcacttcttcttcttttttttttttttctgagatggactgtcactcactctgtcaccaaggctggagtgcagtggtgtgatcttggctcactgcaacctccacctcccgggttcaagtgattctcctgcctcagcctcccgagcagctgggattacaggtgtgtgccactatgcccagctaatttttgtattttttgtggagacggggtttcaccatgttggccaggctggtctcaaacttttggcctcatgtgatccgccagcctcggcctcccaaagtgctgggattacaggtgtgagtcactgcaccccacccccatcacttcttctggtagtactaaaggtcagcacagaccacctctgaggattggcccagaggggctggaaacaatcttattatgtggcagtgggagcaaaatcagtggctgctagcacagaataaacactatccatctagatatccaaacaaatctattttggcctgtctctggcctccctggacaggtggggatcatggcccactcagggccttggggtccccagcaggaccaattgggttttggtgccattgtgttcctatttacacttctgaggctactaagtcagacatggaggtggcagtcagggaagtagctaaatacagtcattaaggaaactcagcacagccagttcaggactgactgagttcttagaaactgtccccatgtagctgttttttttaaccttcctttaccgtttctgtactcacaacccctcccttccaccccaagctctgtaagcatctggcatcttggctagcttgctgcttcccaaggctcctgggggttcacgcattttaggctttgtgcactctggggactggacattattccaaagtgctgttctttcatgaatgttcatgtttctttgggggaagaaaatgaacctaatcattcagtggagtgtacatacatatcactgaagtagcacaggggagaggaaagagtcagaaagatgtagttttgaatcctggctcctaaactaacttgactaagaaatattgggaaacttaattaatctctctgaacttcactttctgtcttgtaaaaag

SEQ ID NO: 137682 - DNA, 1047 bp, Homo sapiens
ctcattttggtgaagcacattctccagtagttttctgagacaggagcatgggagaccaattatctgagacggtgtgcatctgaaattacctttattccacttctatacttgattaataatttggctgcatatataatatcttagctgtgtctagtgtaagtatttgagtctagagtctgtttggttcaattttttggggaacaatcctcccatcatccagttgtgtaggggaggagagggaacctggggttctaattccttggcagactttcaaccaatcctccagtttttctagccctgtgcctcatccctgcctcttgtggcacctgatgcctccaaattctgagtctttcctagatcctccagtgcaaataggctcacatcttgtaggcatcccccttgcaggtaactagattttaatttttttgttctaagtcagttacccactcttccatctgctttcctacatggaaatgttttgctaatatctcttatctgctgttggcatctcattaattctctttctccttgtggatctacactttaaaaaacattttaatgataattttcatggagctccagcaagaagtcaaggcaaaaccttgtgttcaatctgcaatgttcaattagaaatgttctctgtcttttctaaccttttactgacccactttcccaaataatcttactacagctgccttaaaaactgagtccagtagtaattctgagtgtggctccctatgactcatctctagtaactcttcctaaccatgctaacctacagtgttcctatcttactggaacttaatacagcccagtaccttattctattctggtttgtatttttctttgtttgccatctggtgtgctcccaactgggctgaagatgggtctttgctttccctggtattcccttaactaatgcctcagagagaagatttggagaggaggacgtgaattggaggaaaactgttccaggattccccacctctggtggcccaccgctggctcactgccattgaccacactgcaggcagagcccagtgcagt

SEQ ID NO: 137683 - DNA, 1176 bp, Homo sapiens
cagtaggggcaatgccaagtccagggttagagcacattcagcggtgtagtatctgtcatgtggctgtcaggcatggctactgcctgcattgtgtgcagacttggaaatgaagtcggctctcaatcagcgaaagactctacaggcccaactgccacacacattgcaggaaggccatatttgaatcccgccaaaaacctttgctgtggggtccaatgggctcatacttccggtctcccaacagccaatcctagcactgggcatttgcgggtggcccagcaagtggcctagcacttgcgggggcgtggccatggagacacagtgaccaaaggcagagaagaatgcgaatgggggaggggaagcggaggctgaggtgagcctagagcggcggttagagccggtgaggtgaaagagagcgaccgttaggacaggctgaggacttctggtctgttcggtacttgaactgccagcaaatttcaactcccgcttgccattcaacatcatggatgatccgaagagtgaacagcagcgcatactgcgccgccaccaacgcgagaggcaggagctgcaggcccagatccggagcttaaaaaactcggtccccaagaccgacaagacgaaaagaaagcagttgctccaagacgtggcccgcatggaggccgagatggctcagaagcaccggcaggagctggagaagttccaagacgacagtagcattgaatctgtcgtcgaagacctggccaagatgaatctggaaaaccggcctccccgctcctccaaagcccacagaaagagagaaagaatggagtccgaggagagggagcgccaggagagcatcttccaggctgagatgtcggagcacctggccggcttcaagcgcgaggaggaggagaagctcgccgccatcctgggagccaggggtctggagatgaaagcgatcccggccgacggccactgcatgtaccgcgccatccaagaccagctggtgttcagcgtgtctgtggagatgctgcgctgccgcaccgccagctacatgaagaagcacgtcgacgagttcctgcccttcttcagcaaccccgagaccagcgactccttcggctacgacgacttcatgatctactgcgacaacatcgtgcgcaccacggcatggggaggccagctggagctgagggccctgtc

SEQ ID NO: 137684 - DNA, 1056 bp, Homo sapiens
acaagtgaagtgccataagaaataggtgctgttataccgcagtttcttggtcctttttttttttttttttttttgctgctataacagaatactaccaatgggtaatttataaagaaaagatttatttggctcattgttctggaagcagggaagtccaagagcatgctgctggcacctggtaagggcctcatcccatgtaggaaagcatcacatggtgagtgtgtgcagaagacagaggaaattgggctgaactcatccttttctcaggagcccactccctcaatgactaacccacccccatgaaaacagcattcatctgttcacctcttaaatgccacatcttccaatactgttacattggccattaaatttcaacatgagctttggaaggaacattcaaaccacagcatcttgttttacagatgaggaaattgtggctcatagaggttaaagtaactggcccaatagtgttacattcagctgagatttgaacccaactctgttggatccagatctgattccagagcccatgcttttaaccaccacactctactacagaagaggggtgaattatagacctagtgaagaataaaagaaatgaaaatgtaacacatatgtgctagaaagtaaatggaagaaagattgaatcagtaggctggctcatattatggaggatgtacagtctgccaggagagtgcagacttgataagtaagagaaaggcatttatgttaattaaatatttattgaggacctttggagtgccaggcactgtgctaactgctgggatataaatatgcatagtcattgctcctgaggctctaacagctaggtgaggacagagacaaacaaacgcatgaattcaatgtaatgaagcaaatgctgttatcgtgatacctggagggtatgactgacagaaacatccaggaggagagcctagctagggacttcatagctctgttacccaggctggaatgcagtggtgtgatcctggctcactgcagctcaatcttctggggctcaagtgattctcccacctcagcctcccaagtagctgg

SEQ ID NO: 137685 - DNA, 1092 bp, Homo sapiens
tgtatttgaagaggatacaaagaagcctgccaactcagccactggcccatcttcctcaacctgctcagtgagtggcactccaggtgagggactcaagggctctaagtaacacaatataaaaagcattaatctggccaggtgcagtggctcccgcctgtaatcccaacactttgggaggctgaggtgggaggatccctttagcccaactctgctactgaatagctgtgggaccttggagaaattccttcctttgctctttccatacatgctgtgtgctacctgaatgctaggcattgagaattcgaacactacccgaggtttaagctcttaaggggtccatagttccacggaagagacaggtaaacaaataatcaaatgttaatttgataaatattttgataaaggtgtgttcaaggtgttagaggaatggagagaataactttggcccggaggggcattctgttaaaggtcaaactcaataacatgactttaagatcctttctaatctgcctgctgacatccttttcattttgttccttcgtggatcctaagctgaatctttagcaaactctcctagttctccaaacctatcatgttctcttaggccttcatgcattcacataggtggtaccttctgcctggaatgtcatcttccttgtctgtgcctggcaaatttctattcattactcataacttggctcaaagatcacttgctctgggaagcacttcctgattttcccctgtaggcgaggctacctccttcttagctcttatagcatttgattcatccccctgtgatagtactgtactgtggttatctttatccacacctgtctctcactaaactgagagctctttaaggccagggagagtgtcttactcatctttgttcactctagcacagaacctgccacccagtaggtaggagagactcaatgttaaatgaataactttgtatcataataatacctaaccttctctgagcgctcacatcctgccaagtgactatgctaagtactttacatgtgaaggagttcaggagatgccatcccaaaatatgccactttggtatgctgattatttgaaccaagg

SEQ ID NO: 137686 - DNA, 2947 bp, Homo sapiens
cgctcaagcgaccggatcttcaaaccgtgggagtggtgcggcggctagagtccctggactcctcaacctagggagctactcgcgaggtaaggggcgcgccagactggctcctaaaacgcactcgctcgtccgcactcctcgcgctccgaattcagcctcgcctcacccgggcttcagagcccacagaacttctcagccccgtgtcggcgacgaggagctcatggtaaaacagcgcctagggttttgcttgtttgtttgcttttaacagatgcctacgacttgtaacgggctgcctggtaaaatgagtctatggaaacggttgccagggccggctaacagcggctcccggaagtcctttgatgctttgttaacagtgaagctactggaccaatgaggtgcttcttccggttttgtccgcgctcgcctaattcttctttatcaaggttgcctttgaccccggaaaagagatcttccgggttcctctctccccaagatggctgctgaggacgagttacagctgccgcggctccccgagctgttcgaaactggtagacagttactggacgaagtagaagtggcgactgaacccgccggttcccggatagtccaggagaaggtgttcaagggcttggacctccttgagaaggctgccgaaatgttatcgcagctcgacttgttcaggtatgggggaagatagtaataatggctgagaacgaaggtaataatggttaccaagggtggagccattgcgcctgagtggaggggacctttagtggtgagaacgtttcgttcctacttaccactgcgatcttgtgtacattgtttacattccccacctctcttcccagatggttgatatcttacgactctgcttcctagcgtctgctgattgcataggcattgggtgtgagccctcagccactttcattgagtgaaactggccgctgttccccgtgcctcctccctctggtccactcccagcccagcctcccactccgtcccccagaaagcaagggccacaatttgaatgcctagtcaggcttcactgcctcctttttgctcttccagccgaaatgaagatttggaagagattgcttccaccgacctgaagtaccttttggtgccagcgtttcaaggagccctcaccatgaaacaagtcaaccccagcaagcgtctagatcatttgcagcgggctcgagaacactttataaactacttaactcagtgccattgctatcatgtggcagagtttgagctgcccaaaaccatgaacaactctgctgaaaatcacactgccaattcctccatggcttatcctagtctcgttgctatggcatctcaaagacaggctaaaatacagaggtgggtcaatagctataatatgaggcctgcccaatggcggtgcttttcaggggcatgctttcttggcgggtggtggggggccagaatggtatgtgtcactttcttggttcttattgagcataggccctagggagagcaaactttcctgagtttttccaagaagcctctgcttttgttgagatgattatacctacttatcagacccttactaccttatggttggcaacagcagcaatgtagtttagcagagtgtctcccaaccttttccacatcacatcatagcaatgttcatatggtacagtggggtagatgtctctgaaaggcaaagctaggccattttatggtccactgattgaggagctctgttcagactactggagtagatgtgtaacatcctgaactgatcttagtcctggcacagcttcattgtgtgaccttggaaaagttgcttactttcttaggttttttttgttgttgttgtttgttttttaaacaacatttaatgggtggtcatgatgtctaggaactatgctaggcactggggatacaaactgtataggtatttgtgtgagtatgagtggtccctgccttggaggagcatacaatctggtgaggaaaacgggcatagaaacagaatatcaatataaactgatgttgtggagggatgcacaaggtactatgagagcagacaggaagggcacctaaccaaagggagcaggagagaggagaaagctccctggaagaggtgactcctgtgctgagttctttaagggtaaataggaatatccaggggaagaggagaggagggcattagccggcagagtatgtaaagccttagtaaagccacagaggcattaaagaaacagtggtgggtggagatgtgtagaccaaaaacagcagctatgagcaattaggtgatggtagaacacaaagagggtggtggtaagggggaaggaatgatactgaagaatgttgtagggtccacatcaaggagagcctgggatgtgaggaacgtgaagagaaacttgttgctgagaacttggtaaggtgtttgaatcccagctcgacgactgtgattaatcactgtgatttgtggtaagttatttaatctttcagtaccttaatttccccagctgcaaaattcagataataataggttcttcctcataaagtagtttatgaggattaaaagagaaatatatataaagcagttagcccaatgtttgacacagtaaacactcaaagtcaactattattatttgtggctaagagtatgggtcatagagtcagagacctgggtttgagatccagctttacttataatctgttggactttggggaagttatttaacctaactgagcctcagctttcctcatatgtgaaatctaagtaataatggtacagatggtccccgatttgcgatggcttgtcttagaattttttaactttatattggtgcagaagcaatacacagtcaggggaacatcaataaattacatgagttattcaacactttattataaaataggccttgtgttagatgattttgcccaactgtaggctaatataagtgttctgagcatg

SEQ ID NO: 137687 - DNA, 1653 bp, Homo sapiens
ttgaggttaaggtgcctaggagataagtagaggtgtctgttagtctgaagctcagaggagaggcttggtctagagagctgaagatgattcatttattcagaaatatttattaattgcttcctgtggggctgttctaggtgttagagaaccagatgaagtcagtgctgctatggagcttttattctggtggtagagacaaacagtaagctagtaaataatgtaatttccgctggtaaggaccatgaggaataataaagttaggggatagtgagtgactgaggatatgggctagactgatacgaaatggaatttaacatcctgtcctttgtaagaagttgagggcggcctgtcagcagataataggtagtttaaacagtgagtttggtatccaaataattatacaaaaaaaaaaaaaaaaaaaaactgcaagagaaagatgagggagtggtcacatctggttggagggatgaagaaaaggtttcagaacataatggcatttgacaccaggcgcggtggcttatgcctgtaatcccaacacttcgggaggctgaggcaggtggatcccttgaggtcaggagttcaagaccagcctggtcaacatggcaaaacgccatctctgcaaaaaaaaaaaaaaaaattatccgggggtggtgatgcactcctgtaatcccaggtactcgggaggctgaggcagcagaatcgcctgagcccgggagtcggaggctgcagtgagccgagactgcgccattgcactccagcctcagtaatggaatgagactgtgtctcaaaaaaaaagaacataaatggtatttgagatgagtcttaaaggatggttaaaaatagaaattaggctgagtgcggtggctcatgcctgtaatcccaactctttgggaggccaaggcgggaggattacttgagcccaggagttcaagaccagcctaggcaacaaagtaagactctgtctgtaccaaaaaataaaaataaaaaactagccaggtatggtggcacaggcctgtagtcccagctactccagaggctgagctgagctgggaggatcacttgttgaggctgcagtgagctgtgatcgcaccattgtattccagcctaggtgacagagcgagaccctgtctcaaaaaaaaaaaaaaaaaaaagatttttctgaatgtaaaagtcatagtgctcattgtagaaagtttgcaaaacagaagaatattttttaaataaaaaataagcctcaatcctagcactcatagatgatcattgttaactttctgatgtgtttcctttcagttacatagttatttaagctaataaatttggaatgctgtaactatagctttttatcctgtttttttaacctaacattataccatgagcatttcctcgtgtcttttgaaaccatgatattgaatgttccatgctctagttgtaccataattatttaatctgttattgtcaaatatttagacactggttttttgctattctgagtaatgccataaacaaacatctttaaatgtatctgtcactgtttccttagggtagatttctagagccggtgactgggtcaaagtgtttgaatattttgaggctcttgatatgtggtaaaagtgttgctttctacaataacagagtttcagaatatgttccact

SEQ ID NO: 137688 - DNA, 1219 bp, Homo sapiens
cccacattcgtattactagcccagacccctcctgaccttcagacccatacttgcaacacccttccttcatgggtgtttcacagacatgtcataccttgaacccttggctttttaacccccaaatgtgcctcctcacccatctcagtaagtgtaccaccattgacttaggtttttaaaccagaaacctaggatttagcttcaattcctcactttttctgaattttcacatccagtccatcagcaaaggcctttccattccagctacaaaaggtatcttctatccttctatttctctccatctccactatcatacctcagtctaggctaccagcatttctcagctgagatagacaaatcagctccaaggccttgtgtgatctgctgcctgcctcttttcagtctcaccatgtatcattctcccctcgttcactagacttcagccacaatgaccgtctttcagttctttgaatagacccagctctgtccctctatagaatgtctgtgtgtgcagttctctttgcatggaatgctcgtcatatggctaattcttcatcctctaggtctcagcttaaatgtcactcctcaggcctttccagatcagtctctttaagtagttaacaactattattctctctttgcttcatgtttgtttccttcttggcacttgtgtgcagtcatttcatgtgtctttctgagttttgtctctctcccctactacagtatatactctatgagggcacaagccatttcttgttcactatgttatgcctgccatagagcttggcatatagaagttcctcaagcaatgcttattattgacaagcaggagaaacaagatgaacaaaagcccaaagccagggtatatttaggtatgttcaaagactacataatagtctggtttggcagaagctaagaggagtatggttgcagctctgcatgaagaagtgatgtgtatataaaatactgaaaaagaagagaggcagagggagaaatacaagttagcatgttataatagtactttaaataggaagaagtgataaaaaatgaagttatagctatcagagatactacttttgcaagaatagtttacatggttagaaaacaaattactcagatccttatttactttccagaagtcccccaacccatgcctttagatactgaggccatcttacataaaacagctgaatggtatgtcctctgtctcaaaacctgtttc

SEQ ID NO: 137689 - DNA, 1002 bp, Homo sapiens
tcttcaaattcccagttctagtatcattcccactgtagcacagaaaagagaagagtaggccaggtgtggtggctcattcctgcaatcccagcactttgggaggacaaggcgggcagattgtttgagtctagaagttcgagaccagcctgggcaatatggtgaaaccctgtctctacaagaaatacaaaaattagctgggtggtggtgcacacctgtagtcccagccactcaggaggctgaggttggaggatggcttgagtctgagaggttgaggctgcagtgagctgtgatcacaccactgtactcaagcctgggtgacagagtagagaccctgtctcaaaaataaagagaagagtgatcatttgaaagggtagaaaaatgagttgagggaaagtgtttctaagacaggggaaaggcaccagtagagtgaaaaactagctgctaatgaccaggaggatgatcaataaatagagtgaggcccggaagaatgtgtggggggtactagattgataacaaaagtggagtggtaaagacattacctttggttgggcacagtggcttgtgcctttaatcgcagcactttgggaggctgaggcaggagggtcatttgaggcaggagttcaagatcagcctgggcaacgtagtgagacccccgtctctacaaaaaaattaaaaattagctgggcatggtgatgtgtgcctgtagtcttagctactcgggaggctgaggtgagaggatcacttgagcccaggagctagaggccaaagtgagctgtcatcacaccactgcactccagcctgcgcaacgaagtgagaccaaaacaaaaaaaacacaaagatattaccttggaaatggcttggtagagacagaatcagctccttaaagacaacagtaaaagaggaagagtgaagttatcgagttgttttttttttttttttttttttgtgagacagagtttcactcttgttgcccaggctggagtgccgtggcgcgacctcggc

SEQ ID NO: 137690 - DNA, 2630 bp, Homo sapiens
ttttttttttttttttttttgagatggagtctcactctgttgccaggctggaatgcagtggcacgatctcggctcactgcaacctctcactccctggttcaagcgattttcctgcctcagcctcctgagtagctggaattacaggcgcctgccaccacatccagctaatttttgtatttttagtagagatggggtttcaccatgttggccagggtggtcttgatctcctgacctcatgatgcacccacctcagcctcccaaagtcctgggattacagggctgagccactgtgcccggccggttcttgacttttcatgggtcatggaccccttgcccctttgacaatttgataaaatctataaaaatttctcagccaaaaaaaaaaagaagaaagaaaaagaaagcatacaggtagagttctgtataaaatttgtgggagttcaaggaccacccccaccacactgaactctctgtggacttcagcttaagaccccctgatttgggtgaagacctactgaggaacatctgattctggagagtctaaagtgggatttcaagcagagatatttcaagatacgtctcttggaaatcttgatgtttttccttgacttctctctttccttcaggctcttacatccaataaatcaacaaatcctatctattttatattttaaatatacccacatcccactatctccatcactaccttcctatttcaggtcaccatctctcacttggattgtggcagtatcctcttagttgctttccctgcttatatccttgcctcatagcccccacagcccatactccacacaacagccagagtggcccatatttttaaaagtgtttttatgtcactctattcatgtcatgtattcaaaagcctccagtggctttcccattcaaaataccatgatatttgatatttggttattgtgacctaccaggttctacacattatggccctggctatgtctgacctcattttctatcactcttttttatctcagccatactggccaccttgttatttctcagccatgtcaggccaggcacgctcccacctcacagccctcgtatttgcttttattccttagcatactcttctagatattggcttagttattttcctgaagtctttgttcactgtcatctcttcagagagttctcttctgactaccttgtatataatagcaccgctacttttccaccatcactgtatgcatttgaccttactttttgctctttcatagcacttatcacgacctaactcatctatttctttttgtctactcccactggaatgaatgcttcatgagaccaaggacttttatatgctgctgtgtctccagcactgagaatggtgcctgtcacacaataggtactcagtagacatttgtcagatgacatactagaatgcatcctgaaaaagaaaggcagccagggtggttatgagtcttcagatgataaaaggatgagccagaagagctgcgaaagttttgcccagaagaaaaaaagagttgatcattttttaggctgtttcacaaggcattcctgcatcagtggcaggtaaatgacccctaagattctatgatttttttgaaggtgtagttcccaaaatggaagcatcacaggaagcactgtgttgcgatactaagcacccaccctagtaaaggccagtataatcaaatgactaaggtactcatcttccctaaaggacttgctgagatccggttacttctgtatttttctggcttcagaaggtactcctcagcccctgctgggccctaacttgtcatctgagggaactgcctggtggctaattctggggtatagaatctatatccctgccaaggtggaaattggtatgcttactaccctatcatttgcaaaggtaaaatcttattgaggccttcttttgaaggaatacctcttcatttgtaagttcatgggtaatgcttttctgtggaacagatacaagcagaagaaggagttggagcataggttgtctgcaatgaaatctgctgtggaaagtggtcaagcagatgatgagcgtgttcgtgaatattatcttcttcaccttcagaggtggattgatatcagcttagaagagattgagagcattgaccaggaaataaagatcctgagagaaagagactcttcaagagaggtaagcctggccagagaaatctactgccagagatttgagtattctacaggagatcaaattaagatccttttaagtctccataaaatcactgtttttatcaagatgagtatagaaaggccgaagggtcactaaggtagctttctctttaatttaatgtgttccccagtgctttttaatctgtaacacacttgtagtcatttgtaattttgtggtataccatgggggacagaaatgtctctgaaataaaaattggttttggttgtggaaagctgtggctgctgagggaaggcatagggagttaaacctttaaaatctgtgctaactggccaccacggtggctcatgcctgtaatcccagcactttggaatgccgaggcgggtagatcacttgaggcccggagtttgagaccagcctggccaacatggcgaaaccccctctactaaaaatagccgggtgtggt

SEQ ID NO: 137691 - DNA, 1027 bp, Homo sapiens
aagggcatttccatgcacagaatgtccagtaaactggtaaagaaacctggtgtaacagctttggctatctttgaacatcataaccctgttttggagctgctgcttcaaaagaataggctctgctgccacttgttctttggttcaggacacaacatgaattgggttgaatttatcagcaagtcacaggcatttatttaagtcctcagagaaacctcttcctaatttgatttgtactaattagcccaggagctcttgcctcaggataacatcaacctagttcttcatgttaagagatcaaagaatgaacaattaatattctaaggttataaggccccttgagcatgtctagatgagtgcttttcaagcattttgaggctggacttttctgggtcctgccctgtccctttctttgtgtgtgagttttttgttttttcttgttcatttgtttgtttgttgtaatcgttgtgttgttgttgttttaatgtgctttcatgtggtattggaattggttctgaaagtgatcgagctagaactaagtgagcaccttttctttaaccatcctttgtttcagcatgcccctagaaagccaaggttccttgaaacttttctatatacgtctatatggaaactactaaccaatccttctccctttcctttgggaacattgacttctaaagcaccgtagaagttcttgacaattaagtgcataagtacattggaagaggttttagaagggtcgtagtgattcaactttttaactgaaggccaggctgaagaaaggggcttcaagttcagctcaagggatttagatggaacatggaagagggctttggaatctccttctttggacagggtattttaaagccgagtaattttttacttctagtgacatgattcctgggagaactttctctttctttcttttttgcaaggtactcaggccccctcaggagagctaaggaatctctaccgttagtgttctgctgctatatcttagagactgataaatagaaagtgagtgaatttt

SEQ ID NO: 137692 - DNA, 1104 bp, Homo sapiens
ggagaattgtatactttaaagtttttttttattattacattattggcactcttcctgccttcagctacgattctcaaaaggacatatttgcctccctatgatttaattctgagttcttgagatatgtttccctagggtggcgggagtctccttgttttctgtacctttcagagtcaccaactataaatacccattccacggtgtcttcactgctttgtggagcattgccctctgggattgcttaatgggagatgatcctgggctatttatcttctcatgaaagctcttgactttaatgcccctttctggatgcccctttttacatatcctcccatgagtttgtacaactcctcagaagttgactgggtagggaacaaggctgaaacggacacagactttgttgttagagagactttttgtagtactgggttttttttgttatttttgtttttttgtttttttgttttctaaatgcagcgtaatttttgcagagtatttggagctggttatccaagtctgccaactatgacggtgagtgactggtatgagcaacatcggaaatatggagcattaccggatcagggaatagccaaggcagcaccaggtatgacggggtaggagggaaatagttgtaccactggtcttttactccctggcaattaagttcttaccaagtatagttgccctttaggaacagaaatagtggggacaaagattctgagtaatagaaagattctagacagtactatgtttattattaaatagcaaatggttatgggaggatggggtcagtgatagcatagtttgtaaatctctccaaatgtcatgacataaaaacagagcagctgtgtagaaaactcaatctatggatagcagttccgcatctggtaatggcagagtaggttgtatcaggccagcccctcatacaggataacaattacaaactgaacaaaatattttaaaaaccaactacctgaaggtactggcaagtcaccaaaagcaggtgtaagctgaagggcagtcaacacttagaaggaggaaatgatacttggaattcattgagggcagggactttgacttactgtacctttagtgcccaacttg

SEQ ID NO: 137693 - DNA, 1019 bp, Homo sapiens
aagaaagcccaaagtaaatagatgaaaggaaataaaggcagggaaactaggggtggtcatggttctggtagtaatgcacaaaaattggacacgtgtatactcccatgacctggcagtttcactactcggtatatacctaagaggagtgagaccatatgtccacaaaagacctgtacaagattgaacatagcagcattatttgtaatagtccacactgaatacacaccactcaaatgcccataaataatagaatgaagaataaattttggtatattcacacaatggaaaactatgtagcaataaggttaaactatagtttgtttgctataagtgacaaatatagctgaatcgtgtgaaaaaagccagacgcaaaagagtatatactgtatgattccattcatacaaacttcaacaaacaggtgatacttgtgtgtgctggttgaaagctagtaagtgttcacccttagttggggatcatgaatggaactggacctacagggtcttctgaggagttagaaatattttgtatcttcatctgggtactgattacatggatgtgttcaatatgtgagaggtcactgagctatacaaatgttagtatacttttctacacgtatgttgcacttcagtgaatgtgaaaaaacccatggacaatatttataatgaaaataggtggcagtgtatccccatgaacctcacaataaaaacaggtaagggcaaattacccatagccacaagatccagcagttattggcatctgtgcaggagaaaaccagagttgacaggccatctgaaaaacttgacaaacagaattccaaaacagtgtattccctagaaagaatggcagtccaatttaagaactgcagttgaaactgggagggatgagtatgagggtccaatagtcagaaggtctgaaagcgatagagtagtctagtccttagtgaactcttgaagttgatccaccggtctcccttccaggacagggactcacactgaggagaaattgctgagagtagaat

SEQ ID NO: 137694 - DNA, 1027 bp, Homo sapiens
tttgctccccaggaaggtgggacacctcagtggctcagaccccggagggctggtccagatccagggaggtgggggtgctattgccgtttggcccagagagcagtgtgtacagattagccaaggctgtgtttccctggggggtccagggacctggtgccatgcaggctaaggcaccagggtcccagctgcccccctgggccaaagctccagttccctggggctgagacactgcaccaaagaggcacaactgctgcccggcaccaggcccagcttctccatggggcctaagctcctggtcctggagggctcgagcgccacggtcacttgataggaaaaatcacaccatgttcctgggaaaggacccagaatgaccaacaagacatagtctaataaaatttccgaactttaaagaaaaaaaagccacagacatctcagtaaaaatagtaagtgatttataaaggaaagcaacttaggttaccctcagattttttgagatctatactttatgccagaagaaagaagaaaatggaatagcaggtatttaagaaactcagagggaaaaaaatgtgagccaaggaacattatacctggtaaaactgactttcaagtataaagagtacagatatttatcaacatgcaggaattcaagaaatattgttccaccatcccatgaatttgctagagaatgagcttcagacagccaaagtgttgagagacattgaaataaggacaggtagcaagcgttaaatgtacagttacttgtagaattaagatgaaatgaggattaaaagggagatagagtatgtaatgcctatgtgcccagataatgtagataactttttaaaaatggagaaatggggaaatcatgcaaaattttaacagttctcagtaattatattggtggagtgtcaaagttagtgttattattccaagactatgtataatgtgagataatataaatgagcagttattagataatctaattctatcatcctctgtctttgagaactaggacttttaatgtgaa

SEQ ID NO: 137695 - DNA, 1777 bp, Homo sapiens
gattttcaattttatgcacaaaaacttatgtatgactatagtaaaggaaatggatggaggaggaaacgtcaactgcaatcccacccccctggcaactcacaaatcacaaattcataaatattttttctttcctgtttttggattgcaggggttgtttgatggtggtggtaatgtttttgtttaggggcttggggggggtgggtgttggccatttttgcaagaattctcttccaaaatagaattcattctgaggggcaccttttatgatttttgccttcttgtggaaaccacttagagcatcctttcgtactattttttaacatgcgatatattaggtaatgcaagttctctccccgcttccgccgggctcagggtaggcagctggctgtattcctgttctcattgcatgtggttgtgctcagagtggaactgaggcccctgacgttacttattaacattccctcaatttctcacctccctttctaatttttccactttagaggaattcagaaaagcagctcagcaacaggaagaacaagaagaaaaggaggaagaggatgatgaacaaacactccacagagcccgggagtgggatgactggaaggacacccatcctaggggctatgggaaccgacagaacatgggctgatcttcccacaacaccacaggactgcagggtgcacaactcccctgccaaggaaaaccatgcagtcctcccctccctggtctcctgcttcagctctgtacaacgagggcaaagatgctaaatcttgctttgcattcagtaaagtgtcaagtgattaagtgtgtatttgtaccctagatgatatgaaccagcagtcttgttttggcatcatcctcatcatgttgtattccagcttcttaagtggaaggaaaagagtgctgagaaatggctctgtataatctatggctatccgaattctctgaaaaaataataaaagtcccctctattatatgagcctgtacagaaatatggctatcagctgctttttttttgccgggggagtggggacatttagctgtgggtctctgggcttatggggagatgccctttgatgtgggcagtgaattggtccagcatcagatctgcccaggcattctccttcctactgggcatatgatatgaagccatataagtagcaccctgcaccatgaagcaatccagcactctacaaggggagatcataaaaaccagagctttccctggtacacagcactattctcagaaactatagctgtaaggtgaatggaccgcaaagggatgtagtctacttcccagtcctatctacctcgtcctagcttggccagaagaaatgagagatagaggaggcactcttaaaagtcatccttgtgtatgtatctgaggccagagcctttactctcatgcgtttaccatatatcccttagggtgaagagtagcctcaggccatagccttttttttttttttttttttttttttgagacgagtgtcattctgttgctggaatgcaatggcgtgatctcagcttactacaacttccacctccctggttcaagcaattatcctgcctcagcctcacaagtagctgggattacaggcgcccgtcaccacacccagctaatttttgtatttttagtagagacggggttttaccatgttggtcaggctggtctcgaactcctgacctcgtgagccacccacctcggcctcgaaagtgctgggattacaggcgtgagtcaccgcacccagccatcctaactcttcaattggccctt

SEQ ID NO: 137696 - DNA, 1637 bp, Homo sapiens
tataggcaaaagcactttgaacagttataagacacgacacaagagtgacgagtaagagcagcaggctgttggtaagctggagggacggaggaggggatgctttttttttttaattttggtaatagagaaggggtctccctgtgttgcccaggctggtgtcaaactcctgggttcaagcgatcctcctgcctcagtctctcaagtagctgagattacaggtgtgaaccaccataccctgctgatttttgtattttttgtagagatggggtttcaccatgttgcccaggctggtctcgaactcttgggctcaagtgatcctcctgcttggcctcccaaagtgctgggattacaggcatgagccaccgtgcccggccttttttttttttttaaattcagcagttcacgacttaaacccttgctcctccgatgctttctcaatcagtcttctagatctcaccaccagccaagaggtttgtgacatgcttttcttcatgtgctgaaatgaccagcaaaaaaaaagaactatgcacagtgaaaactgggaaccagtttttacatatctgcctgccaggccacctttgacaaatgtatgtgaaaagatgatgggcaaagtcttagatttcagtgtcttgttccaactggcaacaaatccctcaaagagagtagaagtgagcaatgtcttaggctggcctagtccagtgtggtagcaggaataaaaattatggctactgtgtattaagcacctactatatactaggagctttacatacagtatttctaatcctcacaacacccaagggagatactattatagtctcagtctgtcgatgaggaaattgaggtttagagaagagatttcccaaagatcactaagctctaagtggttgagctgggcctggattccaggttggcctgaggacatatgaaggtaggaaatacatcctggtggtacactgctctggggataaccccttccctttctctgtccaagttttgagcaaaaattcctgctggccccttcagggacagtctgagacctgctcactaggggcaaaccccactcagaaatctacccctcctggggccctcgcatcactcaacccgcagtggaacatttctgcccccaatgccaagcccacctactttccctttccctgtccagccttacttagctggtctttgttcaagtaaatcttttatttttatttttattttttttagagacagaatcttgctctctttcttaggctggagtgcaatggtgcaatcacagctcactgtaaccgcgaactctgctctctttaacctgaatgccatcaactcatttttaaaaatagagacagccttactatgttgcgcaggctggagtgcagtggctattcacaggcacaatctttgcacactgcagccttgaactcctgggctcaagcgatcctcctgcttcagcctactggtagctaggataatagatacatgtccacacccagctattttttctatgttttactttgtagagatggggtcttgctatgttgcctaggcttcaggtaaaccttttaaatattttctcccagatgctcattcaggggttcctacatgttttctaagccagtcacagcatctcttcatctaccagg

SEQ ID NO: 137697 - DNA, 1365 bp, Homo sapiens
gtgtccctgcctgaggatagcagctgcaggtgggcggccaccccccaggacagtagctgctctactcctagggcagatagattgtaacacgggaagccgggaagtgagagaaaaggggatgagtgcagggcagaggtgagggaacccaatagtgatacctggtaaggtgcttcttcctcttttccaggctctggagagaagccctcaccctgagggttgcagggaggcagggatatcatgggtgacctcatctctcataaccccttcagttgccgactctttttagccaatgccaatcttctactcctttctcgttgtttctgttccttcctggggccattggtcctacaatcttcctgaaaatcttccccagtcctctttccctgtcccatttcccccacagcctcctatagcatgtgtttctctacccagaccagagcattcagctgaaggggtggatcaggcagagtcatctcaggattggcctgacgtatctgatggtgataaccagaatcaggaagtggaggcaacttccatatcacagatgccgaggatgtgccatatgtagcacccacactgacttcctggttctctctcaaagacagcatagtcttgcttaccaagatgctggaatagggtgtgatcccagggagcctgcatgccagggtccccgcatgtagctgggggcctgacactgttgaactggtgtgcagcatgaattaaagtcctgtgatagggtggggaccttagctgataacagcctttgggacaggaatgggactggaccttctttatgatgtttgctgagaacatgtatatgacagctctcctgtacttaacaaaaggacaagtggatggctcagactgagggggtggagctctcacgtctatggctgtaagttctagcattgaggagtagagcagatttgtgcagaggaaggtggtgacaagaattgacgcccagagctagtgtttcactgatctctccactttctctaggtcctgccccaaataaatgataaatctgtcaccagctctttcagatcaggcttcaggactttgaggccagggtggagcactaggactgggaaggttctttttaaagtttcccacccattcattgcttctctcttccagtgccatcttagcacttacaggcttattggatcaagttgcagaggggaggggggtgcattggaaattgagaagctaacccctaagccttgggaagtaagaatttcttggcaggcattcttgagaagggtgggctcacacttacaggccttctccctctgaaatcaccttccagcctgttggtctcctgagtcagaccccagccttgcctttctttttttcccacccttg

SEQ ID NO: 137698 - DNA, 1030 bp, Homo sapiens
tgcacccagatgcgcttctgtcagctctccctagtgcttcaaccactgctctccctgctctactttttttgctccagctcagggatgggggtgggcagggaaatcctgccaccctcacttctccccttcccatctccaggggggccatggccagtacagagtcctccctgttgagatccctaggcctcagcccaggtcctggcagcagtgaggtggagctggactgttggtttgatgaggatttcaagttcatcctgctgcctgtgagctatgcagttgtctttgtgctgggcttgggccttaacgccccaaccctatggctcttcatcttccgcctccgaccctgggatgcaacggccacctacatgttccacctggcattgtcagacaccttgtatgtgctgtcgctgcccaccctcatctactattatgcagcccacaaccactggccctttggcactgagatctgcaagttcgtccgctttcttttctattggaacctctactgcagtgtccttttcctcacctgcatcagcgtgcaccgctacctgggcatctgccacccacttcgggcactacgctggggccgccctcgcctcgcaggccttctctgcctggcagtttggttggtcgtagccggctgcctcgtgcccaacctgttctttgtcacaaccagcaacaaagggaccaccgtcctgtgccatgacaccactcggcctgaagagtttgaccactatgtgcacttcagctcggcggtcatggggctgctctttggcgtgccctgcctggtcactcttgtttgctatggactcatggctcgtcgcctgtatcagcccttgccaggctctgcacagtcgtcttctcgcctccgctctctccgcaccatagctgtggtgctgactgtctttgctgtctgcttcgtgcctttccacatcacccgcaccatttactacctggccaggctgttggaagctgactgccgagtactgaacattgtcaacgtggtctataaagtgactcggcccctggc

SEQ ID NO: 137699 - DNA, 1123 bp, Homo sapiens
ttcctcagaggatggctatggctatggctcagagggctgggcagggccttccctaactcctgcccctcactgagggccctggacagctgtcccatattctctttgcacagttcacagtgtcagcccctgccattcctagccaatatgcatctcagggcctggttgtttagttactataactctctccttctcaggggctttcagatagtgcaagaagcccagattctgcaggtaccacagtgggataggaactgatgctggacatacaggaaagatttgtatacatgccaaggttggtgtctgcgaggaaggcgaaaagtcagaatgaatctacttttcatgccagacatggcaatattcaatggcaggaaaggaaggcctctcttcttgtatgcttattttcatcattcaggaaacctttcccagatctctagaatgattagtggtcagcctgtttttgtctttagacccacactcgaggctcctacctcccttttaggtactcaatcccgcttatcttctctttctactcagatccatgggcctctcggtaggaaaagagtagatctgctaggtctttaattcattattatgatggaatgtaaatcattactcttttccagaagtttgtgcatttcttgactgaggtaaaattcacaaatcttaactgcagctcaatgaatttttacctactgtggcaagctgaattatgcccccaaagatgtcaggtcttaatcctgggaaccgatgaacattaccttatatgaaaaagagactttgcagatgtgaataaattaaggatgttgaaatagggagatcattctggattatccaggtgggccctaatgtaatcaccagtctctttatgagagaggggcagagagagttttgactctgagataggaggaaatatgaggcctgaagcaagatgttaggctgctggctttgaagacggaggaaggggccatgagctaaggaatgcaaggaatacagctctagaaactggaaaagacaaagaaatcgattctcccctaaagtctctcatggctgcaagatggctgttcctgctcaggcatggccctgctgaaaccttgattttggtccattgaaactgattttggac

SEQ ID NO: 137700 - DNA, 1023 bp, Homo sapiens
aaaaaatgatttaggttttagaaatatagaatacttgggaaccttaaataagttggttaatttatgagtctatcccaaagttcctctgatacttaaaaccgatttgattgcttatttacactgcttaatctgagagatttaggctactttattctccaatatctaacagttacatctgaactagtattcatcaacccattcagagcctttttcaaatcaaacccaattttcagtctagttggatcacagtggggttaatccatagtgagaattaaaaggaaaaaaagcagcaaaaaaaaaaaatcagcataatcttgatctgtaatactgctgccagagtaatgtttcttagtgttacttcctatggttgttgttttgtttctttgtttgggatttttttttcttgaataaaaggtcagccagtttccctacacaaaaaaaggagatggaaagacgtataccagaggttacaaaatgacagcctgaaagtcacatctagccaacagaaaaaaaaaaaaagtttataatctatccaggcttctaaagtcttttagtgagttgctgacatttgaaaatcaggaaatttgccttaaaatatggatttctgacttactggatcattctataggcagtctaagatccagatcaatagccaagcaggggcaccaccagtaataatagagaaaatctgaaattctgaaagaagctattttaatttcagcacaagtgtaagttttgtgtaattttgaaaaataaaatttaatttatgctttagatatttactttgaatattatttgggtaagggggcaccataatcttttcacactttgggcctctaaaagtcttattttgagcttcgtttacagctcctcattaacaattagaaaatttggccacactgggctggaattcccagttgtcagcctccaccagagaaggcattcgcagttcctgccactttctggttttgttgtactctggtgcaatccactcatcgggttacctgtctgaaacatacaaag

SEQ ID NO: 137701 - DNA, 1048 bp, Homo sapiens
tctggtcctagccccagcaccagctcacgtgaattcctgaatgaacacagtcttggtgtacttgtctagtgaatacaggacaacatctgtgatctggtcaactgaacaagccaggaaaagcacatgattataatcagtcagtcatccttgagaccccagctcagtgtccttagatgtgaccttatacataggcacactatacatgatgcagtgagacatgctcattgacaaaacaagatatgcattttgacaagcccatgttagagggaaagcctagatgaatgcagacaggtaagtgagatagaattttgggaaaagacctgtggctttgggaccaggtgcacagggatgggaaaagaaactcacctgaaatcttgatttttttgatgaccttgttggtgcagttgttgatagaaacattgacagagatgggttctccgtggtagtgaacctaaagcaggagcggggacccatgtcaaggctggaggacgaatacgcagatggagacctagaacccctgcttccttagcgctattgccaccctggctcccatctctgcctgcccaagtaggaaatcagtgaagaaagggcatcagaggggttctggggtgggaggcaaaaagtgggggtcacaaacctccctgtccatccaggcctggagttgtaggggctgagctgacagaaggaagcggcggatggtctgggctgaggggccagggcctgcctccggtggtgcaaattgtactttccggacaaccagccgcacatagtctctgagcagagaccaagagattagccagagcgtcctcctttcagacccacagacctctcccatgccacccccatagtccaattgttgcttaagaatgggagcaggggaaggcctccctcagagaactcctctagtcccttaatgtaagcatgtagaccaaaggttattaaactatggcccactggccaaatctggcctgatgcctgttttcctatggcccacaagctgagaatggttatattacatttgtaaatggttgaaataaatcaaagaaca

SEQ ID NO: 137702 - DNA, 2497 bp, Homo sapiens
atcgcttcaggtaggttgcagccaaaatggcttccaacgctcagcctgagccgccggacttcacgccatgctctactgacgtcggctgacggccattggcttcacacccaggcctgggcatggccacgccccctcggccccctcctggcagcttgcactgcgcctggtgttcagcgcaatcctatgaccactcgagtggggtcatggggtggagagagggatggccactgaccgtgtcagagggaagttggggtcagcgtatggggaaaagcacgggctaagtgtagtgtaatcacagcaaaggggtggaggtggggaagattgttctcagtagttccgtgaccctccaggaagaggaaataggcaagagatcgctaggcacatctgaacaaactgatttattagagtgttacagtgggggctcccacacagacgggcaccagagcgaggtgctcagctcccctcatctccctcagcctccacagccttctggctctcctcctcgcctttccgcgtaaactcctcgatgactatgtcctcagagcttgcagaagcagcagaagagaatggaaggttaggaacccctttctgggtgtcctccgtgtccactcttttttcctgatcccagaaaagtgatcccctccctgcttcccaggtaggctcctcggccccctcttggtgtccccacttttccatcagccactctggcttgtttcctttcattcccgcccaaatttcccagcacaaaagtcccccaggagcactgaaagggacataaggatgagggatgggaaggagggaaggtatcaaagaatgaaagacgaaagaagtaagggcgagcgggtgggggaaaaggaaaaagaaaaatgggaaggggatgagggggaaggatgattccaacaagagcagaaggtggagggcggggggatgcagaaagggaaaggagggcatatgaaaagcaccgaactgtgacacgaagctaagccatatgtttccactgcacatgtattgaaagcaccccaaggaagcattttcacatttctatcgtcataacatggagggtggaaatgggaagaggggaatggggcttcccaatcttgtattccattacctagcggcctctgtagcaagcatggagacggagggaaaaaatggagctgaagctgattagaggctcttcggttccctgaagaagtatctttacttcccccccccccaacttcccaatcctttgctccagcacacacgacacacacacttcccctgaatacctagacacccagcctacctattgctattccatccccaggcaaactgctagtctccaattcatgagatcagaatggtttggaccccagccctcaggacagccgtccctgtgagttccacctggtcactcaccatgagatggcttcggatggatcaggaccaagggtagctccacaccaacatcgctgcaaggatcccaaggtggagttacatctcctctctctacaagcccaatccctgaacctccctcccttagttttccagtctttggatgccctcagaccctccagaatcaatcattattttgctctccttatccccttgtcctcctcttcttgcccaagttcccccaccccacagtctctcacctggctgtcaggtctcctaggatgctgtgggtagaatgacacccaaaattagcagcgggaaatagagaaggggcaacctagtttcacaaggggatgagggatcataagacctaatgagccagccacagaatgggtttctggaagggaaagtgacttgctcactgagctcacaggtttgggaacctggtctgggagaaagggtggggaatggtttgattgggtcaatctaactgggagaaaaacagaggcgaaaagcccttgactcttcagcccctgcccagacagacccagaaccctcacttacccaccacaggacaccatcaggttgactctgactttgtaggacaccaggatccccagcagctctttgtccattcccggtctaatactggaggttgtagtattcgttttagggtgtttggggcatgaagagtaattcattctgtccccagtttcttctcatgcattcctatcaccacaccctattatgtttagtcttatcccagaatatctcccaggctctaacctttcctacccgttgagaccacatttctcttcctgacattcacttttaccatgtcactctctgctcaagagcctaccttttgaatataacaactactctgcctgactttcaagacccctaacaaccttgccctatctagcctctctaaccttttctcccctaactcctgggatacaacctaagcagacccatcttctctccgtgatcagaacatgccatgtggattcccaccttctagcctttgcccatgctgtgtccctagtctacagtgctcctttttttcctctgttggtatccagatccttcacattcttcaagatctagctcattctac

SEQ ID NO: 137703 - DNA, 1082 bp, Homo sapiens
tacagtaagtgccactttcttttttcactttcctgacagggccctaagtaagaactctttaaatactgatgactagaggccctacaagttggggatagggaatcaggagctcaagcgtgaagataacctgctctgttcctccttttcttcttctttccttcagattatcatcgccaaaaagagaggactgtgcactagaaagttgcagcccacagcccttcatgtggactctgtcatgacatgctaactagacttcaggggagccacttctgttttcagcccctccctggaatagtgagttgggaggatggggagacagctaaccaactgcattacccaaaccatattgcacttttagttccctagttttctaggtgagcttcattccctgaaaggaggatgatgatatctaggcataacctagcctgtgaggaacctagttaggaaagacaactgacatttattgaatatcatgcactagtcccttacatatgtcatattttaattatagaaatcagtagcaaaaagaatcttggggattttccatctgacttccctggccatcttatcccatccttgcactaccagaagattcatacacttttgagactccagtgagacgctgttttcaccccttcctcctcctagcctctctcccaaaaagtaaaacacaatgctgaagaaatattggtgtgacttttgaatgttaccgattggatgtaaaatgctatcgagggaagaaaaagctcttccaaagagaggagccactggaaggaacagagcaatactataccttcctcgcaactacctgtgatgtctgaccagaacattagcaaggccaaggaactttaaccacagtataactaagaaatggcatagagtgaggggcactgaaagaaactgcccgttcccctaggagctttgagcatttctctgcaggggacagtagtaatataattctctcttctcctttcccacattctttgatctggaacataaactaaggaaggggcttagatgcatttcttttctgaggcagcagtaagaaattggttcacagtttccaacttgtaagttgagta

SEQ ID NO: 137704 - DNA, 1337 bp, Homo sapiens
ttctgtaatttaaaattgcttaaggtaggaagacagaattttcaagctccaatggcttttgacagtggcttggccaccttcatttagtcagtcatatcttttaagtgtttgatttcttagcttctaagggctatcactacggggacacattttagggttgggttttgttttgtttttgtttgttttttgcttattttgagtagtgcaaggtcatggtacccacagaacttttctttgtgtctgccattcttaagagactgtattaagagagcaatctcagttttattacaaataattgctgaaggaaatggagtatattgattagatgaaaatgtttaaacaccactatgcatgtgacgtctattttgtcaggatataatgcaacggtcctggcctatgggcagactggctctggaaaaacctattcaatgggaggtgcatatactgcagagcaagagaatgaaccaacagttggggttattcctagggtaatacaactgctcttcaaagaaattgataaaaagagtgactttgaatttactctgaaagtgtcttacttagaggtaagcaatttatgtttaattattctgaattcgaaattgtctttgggtcgaaaaataaatccaaatcaggtttttcctgacatgactcaaattagtaagttgcattttaattaattgatagagaaaacttactgactcagttggatccggctcccacccagttctttccttggtgttagaatagtctgtttaatttgattgttggaggaattgacattgccatataaaaggtgataggaattctttaattccagtttggcctctgttactgattacctgtatagtctgcagaagagtgtttgatttccctttactgtttaagacttaaatgataatgctgttgcctcatgaagaatgttaaaaaccagctgaaatattgagctgtataagcggtgatagagtgtgtttattaaacagatatttactgagaacctaccatgtgccaggcccaattctaggcacttgggtatatgaggtacttggtatatatcagtgaacaaaacaaaaattctagcccttatgggagtttgtgttctagtgtatattagtatagttgtagactggccaattgtatctaacttcataacatcaaaaacacatctttagggaactgatggcttctgggaagctagctacttgattccatagcagtgatgtcttatcctttagggggtaataattaaacttatataatttaagcatgtgaacacttaatcctgaagttcaatctcagcatgctaacaggtaaagagatgtagaactggaagacagggg

SEQ ID NO: 137705 - DNA, 1512 bp, Homo sapiens
ggtgtgtttgtctctcatttgatgttattaaaaaaatttggcaattataatactaaagttcacatcccttttatctgccactgtggttttaaatgactactatcatctcagtcaggttttctgtggtcctaagtccctttgttaatctaaaatttctaggtgggagctcttgtggggaagcaaggaaagacgcatgttcagttttatcaccttcctgttacctagaggaatgccaatatcaattaaatattatttacagagttctaaggctgagcagtccagtatgttagccactagccacaagtggctatttaaatttaaatgaattaaaattgaataaaattttaaaaattcatttcctcaggcacactagccacgtatgaagtgctcgatagctacatatggctagtggtaaccatgtttgagagcacagatagatacagaacatatccatgtattttcttctgggtcattgttagccagctactaatgcatggatatgattgaacatatctatatccaatagaaaattctgttggacagcactgtaatagacattttgctgggctttgggatgatatttttaaaattgaaaagttaaactatatataatttttaaaacatgtaagtatcataggaagaagagatagcttatttgagaatcttctgtcagatggtatagatgcaagatgaggagctagaactgaacagaaaatgtgaggcaaaattgagagtttcctatgtgggagtgagccaaatccagaagccagtgttgaaaacaggcagagcttgagtattcaggagtgggaaaatcagaggctggaggtagatgaggctaggtagtactctggaaaacttggaataatatcttactcctgttctccttcccttcttctcttgcacaaagaaaaacagagaaagttgaagatttggggtaccagtgagggacaggtgcctgtgctcctgatttttttttctgggtcattaagttgttagccagctactaatgcaaagtttaaaggatcagccctgataagcttggaatatgcaaagatgatttggatagtgaggataagaaacctggacaaaatacatgctattgtactgagccagcacttgaccctgtttcaagatcttttatataccccatgttaaggcaggaattaagtcctaagagttgtttgaggtgagatttgcaatacagagaagtatgagttcctgacacaaattggtaaggaagagtttgtaaacactcttcagatgggatggataggctttaagtaagtagagaaaataaggatattcttatggtaaggaatagctttagcaggaaagcagaaaatatacacctgagggtaataagactacacaagtctgtctggattagaggatttgggctgggaagtaacaggagatatgttaggaccagattatgaagccgggctaaagagcttagtttctatccctgtgaaccatataaactatgtaaaacttctgagtgagggattactg

SEQ ID NO: 137706 - DNA, 2125 bp, Homo sapiens
agtaatatgggcctgaactaggcaagtagatgtgtaaaggaaaaggaagtgatggattcaaaaggagaatgactagtagttggtgatagatattatatggaggagtgggagaagttgaaggtgatgtgagtttttgagaatatgagacaagattaatagaaatggagaagtattatagtagagagaattagtgtttgtgggaggaagatgaatttggtttataattgactgatttcaaagtgtaagtggtaaggtagatcattagaaataaaagactagaaattagggccacagaagtaagtttgggagctatgaagtaataaaattatagcatattggagctagaaaagacttcataagcatctagtccaatcacctcagaggctccaagagattcaacttgtataagttctccaaggtaaatacagtactaagcctggggtcctgttttcctggcttcctaatccagtggaaactgtaccatgctatttcctctagtgaaaatgaggttaaaaatgaatcagaggtacagagaggagcatggggtcagataggggtgaaagtaacaaagagaaatgccatcgctgtttgtgttgtacttgctctccttgggaccagaattaacttcacttggggtttcttggaaggcacgtagccattgctaccctaaaatcttgagatcttttctagctccagtattagctggcacgcttgtttctgaagttcctaaggaagattggagaccttagtttccagctatcttcacagagttgccagttaaagcagttcttatcaccatgactgttctatttgaggttctactagactatcaaggcatttttttaaaccaccaatccctatatttctgaccaagcatttgaagtataaatcataagggaattttctctttcttgcaattagattgtgggactcactgagaagactgttttggttgccttggatactgtttcctgtttggaacagggcaacaactctaggactgtggcctccacggctatgaactcccagtcgtcccgatctcatgccatctttacaatctccttagagcaaagaaagaaaagtgacaagtaagttacaatttaaagagtcaagatttttagtattagttctattaaggttaaacattagactgcttcttcaattgatttgacaaatcatcagacatcagtattgtgagcacgagtgactaatggagccattttgactgacttgaaagaaaatgagagctgacaggtcagctttgatattcagttactctcaagcttgtgtaccattctcactgtgtcttcctttcattatcacaggaatagcagctttcgctccaagctgcatcttgtagacctcgctggatcagaaagacagaagaaaaccaaggctgaaggggatcgtctaaaagagggtaagagagtaattaaggtcacagttgtagattaaaaacttctagtactcttgttggtattgttggtgttttcgactgggatttgagatcacattctaacagtagctacgattcagatttgaggctgagttcagaaatagcgaaaaattgtttctttcccttgctctcattctctaattcaggtatgagatttggatctggcctttggtttgatttcatctggtccaggcaagttttagttttagttttgttttgttttgttttaccccaactatttataattaaaatcagtatcctgattctgtcattttaagtattcaccatcccttccagatgttgtcacatataaacctcagcccaatttccatgccttcattcaagttgttgaatttgaaaagtgatgaaattcctaaggctagaagaaccctgtgatgtaggctattagaaaccttcttctaacattatagtgacctggtaatctgcatgccttggtaatgatcttgaagtgattattaatctctctaacaaaaattaacatccagctctatatctcaattttgttcttaaggatatcataaaatagttcatcagatgccttgctaaatccagatacaccatatctactgtatttctcatagctaccagcttagtaacaatacaaaaaagaaataagggattttagcctaaagtgctttttcttggtga

SEQ ID NO: 137707 - DNA, 2472 bp, Homo sapiens
ttgctgccaactttttatatcagttctctcctgcatattttttcttatgttggtctgattcatctgctttcagtctctcaaggattttgtggtttctgatccaccagtgatggattcacaggaagttggtggctttcccacttggcagcctattcaaagacttttaggggctctaaaggaattttactcaattgcattagagggttttacatacacattctgggttgcccatcttagcttcagagcttcaatttcctcatttgtaaaataggatttgaatatattctccaatagagttgtgggaattaagtgaactcatattcgtaaaacatttaatgcaattcttagtaaatagtagtctcttcataattaccaattccatcatctgtgtttttacttgctctgagtgtggctaatgaggaatataggggctctactgatatttatatacaatctcagctgaactaagatccctatgagcttgctaaggtgcttgtcaacatttgaggtagatttcgagggtggaagaaacttttagggatatggcttatacctgtggaattaacttttctttggctaccaaactgccattgtcaaaggcaagtcctccactgttagagggaatcattttctacttatcaagaactaagaaagttgctaaaccctctggaatattttcagaaggtggatatggcccggcagaatattgttacatgttgcattactgtggattgggggaaaggagatgtacccaagtgtcagatttgactcgtgaggcaaagaagtttatgacagaatcatagttgagtcctacatcaagtggcagatgccaagagttgaagggaagctagtgagaaaacaggagataggtatataggaagcagacagcagatggaaagattttggacatgtcagatttggagtacatattagaaaaatccaggaagaaatcagaaagtcaggacaagagcttagaagcaacatctgggctagagataaatatttggaatccatgggtaggagagttgtgcagagaaagactggacaatcaaagagccactagtaaatattaaataatattagtaaatactaaatatgagcgaggggcactcatatttaagggccaagggtaaatgagtcaataagagaagctgaagagacactggaggatcatagtatctagataaccaagggtttttataaacaaaaaggactgtcacctgtgtcatatgcttcagtgtgattactgagaagaggtaaatagatttgtccgttgaggttttgggtgatctttgtcagagcagtgtcggtcgagtggtaaggaattaggacaggttgtatcaaactaaggggtgaatttagccaccattctaaatgtggtgtttatcctttccattaatttctttattcttatatcctttaatgatatgtagtgacattttgcatgtttctaaacttaatgtaaggggtttcatggtatatgtgtcttctgaaactgattttttccctcaacattatgttcttgagatcaattcatcttgataatatagctctgttctaacaggttttgttaactagaggcttgagttttcttggtatcaaattgtatcagtaagaagaaagttacctctgccaatatttattcctttatttaattctcttatgtttcttagcaatgagaaaaatgtcagcagatataccctggactagtaaagttgctttcctcaggggaatctagtttctgatttaaatcagaatggttttaatgttttattatttggaatgataattgctattggtgttggtaaatggtatttaattctcttagttctaaagtcttttttaagtgcaaattgtctgtttcattcagcaactctattcattaaagtcctgttctaagtgttctgcatgttctttttggcttctgggtccctttaggtgtattgttattttccttggtctgctctctgggactgaagtctaatgctggagtatctgaagtcatagcagcccagtgagtgggaaaagcacagtggtttctgcccatgagctagcaggcgtattgccagtcagcttgtcaaacccatgaggaggcatcaggaggaggcctctctgtactcttgtttccttgtgctttcttagtctcaaggtagagaggacccaacccatctcattgttttcttagcattttcagatggggaaacctggcacactcacataagcagtattgactttccccctaggagttcagagtggtatgggcgaagcctttgccacagaccatgtttccatccttgcactttggctctgctacaccacactcttagcccagggcttttctctgttccagagatgaaaaattctacatcaccccttactctcaggtctcagacccatcctgcaacctacttttttggctggccccagcacctacttggcttaagaacagtcaatgaatcaggtttgggaata

SEQ ID NO: 137708 - DNA, 1033 bp, Homo sapiens
ccaacacacaatcaaaccatctacaacatagccacgttttaagactcaacttaagtgttggggttttcgacattgccttttttaatcatgttatcttctaatgtatttttttctcctctgagatttctctagtaccacaggactacattgtcattttctggtgcctctgtatttctagcttcatctcccaccattttcccacaaactacaaggttccagccatagcagtctactcattgtttttccaaacagttctgttgtttcagatctctgtgccattactcctgtgtgttttctgctggattttctccccactgcctcagaaacatggttctgtcaagtactcctgctcctcctgttttaacttctccctctcaactgactttctgccctcagcatagaagcatactaatatttccccaacttaaaataaacaaaatatttcatcctcctcttactactgctctcctcccttttcctttcattctacatttttgtcacccctccatcctcctcccattgaaactatcccttttgaagtcaactcatgacctgaacaactgaatccattaggctcttttcagtcctccactgacttggtaattctgcaggtctgacatcctgccccttcttctggacaatctcattcctcttgactctgtgatgctaccctctcctgattttcctctcacttttctgaagactctttcacaggcttctcctcttccactcacccctatctgaaacataacccaggctttgtcctgggatattttctttctcttcccactgttcatgcccatcaccctgtcaccctccccccccaaagtggtttcacccacttagatgcttataattcctacctgtatgctgccaatcctaaacctctatctcgagcccctatctcataagtcatatttaagtatgtaaatatagttgactgtggggagtcttatggatgtcccacatgtatctcccattccacatgtccaaaactgagcccctcattcctccctgttgctgttttttttaa

SEQ ID NO: 137709 - DNA, 1043 bp, Homo sapiens
ctggcctgagtccccaaagtccattatgtcattcttatggctctgtgtccttgtagattatccaagtttttctactccattaataataacttaaatatagatagccctttacaaatcacatttgatttttatcccagtcccattaggtaagatcggtattttccctgttttatggataaaagaaagtttcagtggctagttcaatattatacacattggtgaatggcagaggcagaattttaactaagattctctctctcctaatgaagtgcctttcctactctatcccctatcgctggttgcctctatatgttttgtgatccatttcagtaacaatcattccctttctctttgaccaggcagaccatctatcataccatacttctgtttttcaccctaatttactcagccattctacctgctttaggcccatacatattttcttcacacgtagagcagggtttcccagctgtggcaccgttaatattttggatcaaataattgtttacggggaaggaggctgtcctatgcattgtaggatgttttacaacatctttggcctttacccgatgaatgccagtggcacacataccccactcctaagttgtgacaaccagaatgtctccagatattgccaaatgtcccctatgaagcagaattgcccctagttgagaaccactgcatatagatctacatttctctcctacctcatttttcttttttcttacaaatatgcttttatattccagctgtaaaacccattgtaatgtgcctccatgatagctgtgaagttatatttctcttttaaagttaaaatctctcctttattatttatttgttgccatagtgaacaaacacccaaaggtattgagtagcatttttgactctccttacttgatctgttctcattcttacagagaaaactacttcatttttcttcatagctgtccttaatcagaacttttaagtctctgcaaatatgttcttccccatctttgtgatatatattccatctttgggaatcatttatcattttaatgtct

SEQ ID NO: 137710 - DNA, 1190 bp, Homo sapiens
atcagaaatcttagatatgtatacatttcctattatttcaatataaaaaacactaagaactttttcttatagctctgaattttaagtcaccaacccgaatggacggctttgcttatatcctacttgtttgatttcatttcctttcgttattctttattgttctttttcagattctctaggaggtaatagccatactcttatgatagcctgtgtgagtcctgctgactccaatctagaggaaacattaaatacccttcgctatgctgacagagcaagaaaaatcaagaacaaacctattgttaatattgatccccagacagctgaacttaatcatctaaagcaacaggtataagggacttaaagtttgatgggaaaaattacaagtatgtgagtggaatgatagagcttctgttttcagtttcttctttatcagaagtttagagatgttggttaggcattatgtttgttcggggacctcttaaaataactcctattaacgtgtttgctgtccatttaagattgggggtagcattggaaagttcactgatgaagaagtgagcagtgagagatgagatgagaggtgtagacaggggctaaattctgaagttccttatatgacttgttaaagaatttggaattcaacctgaaagctatgaagagccattgaagagttttaagtaggagggtgatatgataaaatgtgtgttttggcgagatcattctagcaggtatagagaaaatagattagaagtgggcatgactagaagaaggaaaataaatcactgcacaaaacaaagagagttctagagagaagaaacataggtagcaaagtacagttgattctcgaacaataggagtttggtccaacaaaacacagatcaaaaatacagtatttgcaggatgagaaacccatgtgtagactttttatacatgtggattctgcagggctgaccgcaggactggactatgcatctacatttttgtatacgcacagggtcctggaaccaatcccctgcatatacataggaacagctgtatagtggccaggagcactgacactgcaattagcccacccatgttcaaatcttagctctataactcactggctatgtaccttgggcaagttctctgtgccttggtatccctatctgtacagtagaaataataataataccttcttcttagggttt

SEQ ID NO: 137711 - DNA, 1030 bp, Homo sapiens
acaatattaaaaaggattttaagccaggtagtaacttgataatttacatttttaaacaatggcctggctgctgtatagaaatggattatagtagagcaagagtagattcatggagaccatttaagaaggtactgcagtagtctaagcgagagataatgatggcttggacttagagtgctggcagtggtgatagaaagaagtaaccaatgaattagataaaggaatgacacccagatttctggcatgtggaactggatattcactgacctgggttacactggaaaaggaccaggtttgaggataccagacaactaagtggaaatatcaggtagatagttgaatataaaagtataaagttcagaaagatctgtgcttgaggtaaatttggaagtcaccagtttcaggtaatagaaaccagaggcagagatgagacattcagaagagaatataaggagaatgtaagtaagaaaactcctactgagctttgggggactttaccatttaaaggacaagtggagcaaagatgaaccaagaaagagacttagaagatcagttagaagaatagaaggaaaagcaggaaaatgtgtcttgtaagccaaatgctaccagtcagtcagtcaagtaaaatgaagactggaaaatgctcactggatttggtgacatgcagctcgtttgtaacttgggcaagttatttcattggaacaatgtaggcagtcatattggagtaagttgaggagcaaccgagtggcgagcgaaaggaaatggaggcaattggtgtattattctctcaaactttgtgaaaaaagagaaaaatagggcaagagagataggaagtggggttggggaggatgcttttgtttttaagatgggagagacttgaacatattttaatctgaataggaaggatcttatagaaagggagaaattgaaaatatagaagagagaagggataacagtgtaagattcataagatggcaagaagagtgggaatccaaagcacatgcaaggagaccagtcttgggaggcagaa

SEQ ID NO: 137712 - DNA, 1061 bp, Homo sapiens
gtagattgtaaacttgagagtaggggtcatattttatttttatatgtccgtacgttgtctagcccagtgctgagactgattttcaaaaataggtactcaaggccaggagcagtggcttacatgtgtaagccccgcactttgggaggacgaggtaggtggatcaattgaggtcagcaattcaagaccaggctggccaacatggtgaaaccctgtctctacaaaaaatacaaaaattagctgggtgtgttggcgggcgcctgtagtcccagctacttgggaggctgaggcaggagaatcacttgaacctgggaggcagaagtgccactgcactccaccctgggcgacagagcaagactctgtctccaaaaaaaaaaaaaagaaaagaaaagaaaaaagaaaaataggtgctcagtaaaaactcattaagatgtagataaaatggacaactcatcttctacttaatagttgttcatgtaatgctgattttcctgttatcattggatcatcaactatgtatgatgcctttggtagtatctaaggtatgctatctgccttagatttcatagacatttagtaaaattactttattgctaattgtggtaattttactgccaagggttaagtagcatttggttggtgactagctgattatttttctttgcttctcccaggtacaacagctacaagtcttgttgctacaggcccatggaggtaccctgcctggatctataacgtaagagtcatagattaatttgaattgtgtattctaatagaggctatttttcctaataatagtttttccctggtttctgctagcacttggtgtcacggtaaggatcttaccaattttgctgactatttaggacttagttatgtttgaagcagcctaatgtaacagaaagagcatgggttctggcctcagaaatttattaattggaattctattgtgaggaagagctgtctcttcttctccatttgtttatttgacatttagttatatttgtatagattcatggatatttattttattctatggtttaacatccagtactattatttgt

SEQ ID NO: 137713 - DNA, 1036 bp, Homo sapiens
tattttacagagaaataaagatgctccttttcacaagaatgtatatttatatttttagagacattttataaggcttgttaacaaaaagtacattttacatatatgaatgttttcactttttgtccttagattattttcttttgttttttaacatgtcattgaagcttttgtatttattttctgtgagtgtcggtcaatttgcacatgctcagtttacttgaattcctagccttggcaattaaatagcatgtgaaaacattggttttctgttatattttctttttcagtctgatttttgcctggccctagtcctgtttttgctttacttttaaagattttacccattacgtggctgtcctatatcacgtggtcctataatatatctataatcttgccaagaactcttttttttccttattactgtgagagcttttatatccagtattctctgcattcatatagtacctatctctgtagtcagcatggtagttaagagcatggactctgaaactagactgctgagctcaaatttcagcttcacattacctactagctgtgtggctataggttatttaacttctttgtgcctcagtttccctagttataaaatgaggataacagtagaacttacctcataggggctattgggagaacttaaaaaatttaatgtatgtaaagtatttagaatagagcctagcccataatgctatagaagagttaactattattaattatagtggtatttaaatattcaagcatttgcctcaaattacaatgaagaacctacttctatgtgctaaattttccttggaaaaatcaacagttaaacttaaatatgattttcccatttagagaaatcctggaaattttttagggaaataaaaaactatcgagttaaaagtatcattactttgaagcttgtcagcttacatgaatgacacatggaagttttcagtttaataaagaaataacgaaataacacttaaatttactaatagttttttttataatctgcattttaattgaacattccttc

SEQ ID NO: 137714 - DNA, 1049 bp, Homo sapiens
cttcctagctatgtaatcttactaagtgctgtattactatcaaaaggaaagaatttaagtgattcaaataggggttaaaagcattattcatctgggcgcagtagctcttgcctgtaatcccagcactttgggaggccaaggtgggcggatcacctgaggtctggagttcaaaactagcctggccaaaatggtgaaaccctgtttctactgaaaatacaaaaattagccaggtgtagtggcatgcacctgtagtcccaggtacttgggaggctgaggcaggagaactgcttgaacccaggagatggaggttgcagtgagccgagattgtgccactgcactccagcctggatgacagagcgagacttcatctcaaaaaaaaaaaaaaaagaagaagaagaagcattatttagctgatgcactcagggtacacttgaactccaggtaacttcccaagtaaagcaagattggagctttatagagtaaagagaagaaagggttgtatgtccgtgtggtttagctcaggtaacagtttttaatgttaattgatgtgaaacttttggttggagattgtttcatttttttatacctcttcctcaggaatatactgatgcaatcctatccggataactgttattatattttgagagttgttcttacaagccttgtagtttctcagttggtcaaggttcacaggtgggagaggtggcaaaatagggataacggggaaaggaggcgagggttgaaggcaaggaaaattgggaatcctctctcgtgtgctttcttttatatcagcaatgtaagcaaagtgcagtgggatcataaaacaaaggatgattaactgttagtccagaaaattcaggaaggcatcatagaagaaactgggtcctaaaaatgaacaggagtttgccatgcagacaaaagggaagggacaggccaactctgggcacactgcttacgagttagccctgctccacaaggaaaaatttaagagcttttatataaaataaataaggttttttaaaaagggactagactatatatagaggaaa

SEQ ID NO: 137715 - DNA, 1050 bp, Homo sapiens
ctctgattagtccttatactgaaaattgaaacatgggagggaggaaagggtaaccattatagattttttttaatcctttttaagaatgatttagggccgggcgcggtggctcacgcctgtaatcccagcactttgggaggccgaggcgggcggatcacgaggtcaggagatcgagaccatcctggctaacaaggtgaaaccccgtctctactaaaaatacaaaaaattagccgggcgtggtagcgggcgcctgtagtcccagctactcgggaggctgaggcaggagaatggcgtgaacccgggaggcggagcttgcagtgagccgagatcgcgccactgcactccagcctgggcgacagagcgagactccgtctcaaaaaaaaaaaaagaatgatttagtatgtcctgcacttggagaatcaccagtactacaaatcatcatgagaaaggatgtgggaatactgaagcttcctttaaattctctttgagcctcactggttgggagtttctgagcagaataagggaaatgcttcataaatagcacttattaaggatctcttcaggccaggcgcagtggcttacgcctgtaatccaaactctttgagagaccgaggcaggtggaaccctggagcccaagagcttgagatcagcctaggcaacacagtgagaccttgtctctacaaaaaaataaaataaaatgagaccatccttcatgacatagtgagaccctgtctacaaaaaagttttttgtttttttgttttttttagtatttattgatcattcttgggtgtttctcagagagggggatgtggcagggtcataggataatagtggagagaaggttggcagataaacacgtgaacaaaggtctctggctttcctaggcagaggtccctgcagccttctgcagtgtttgtgtccctgggtacttgagattagggagtgatgatgactcttaacgagcatgctgccttcaagcatctgtttaacaaagcacatcttgcaccgcccttaatccatttaaccctgagttgacacagcacatgttt

SEQ ID NO: 137716 - DNA, 1019 bp, Homo sapiens
gatctcgaactcctgacctcttgacctgcctgccttggcctcccaaagcgctgggattacaggcataagccaccgtgcctggctaggcatttatttctttatagaggaagatcctgctaccttgactgactataaaaataaaaaataaccattctatttacttttctgatgcattgccattatttgatatgtctgttcgtagaatggtatgtccccataagaactggctaggcttgtacattaatagaggtatactaagcggtagatgcataaaaagaaagggtagagtccataaaatgggttaaactttggccttttggaatggctaaatgtttcactctggcccaaatgtctctggcagggcaggagaagtgcaagaaatatgtcagttgccacatgaccttattttttataagagctacacaattgtcctttatgaagaagaaagactcttgagagatgggaaatggaaacgtgactattggggtttctgtaactataaaatgggtccaatatcttaaacagtctctgtatacacttaaaaaaaattaaataaccaatataaaatccaccagtaagctttacttcagactctttccctaaaccaaaacatttgttactgcaggatgaaactgttgcttgcatggctgcagccattgatactgcggtggagcaagaagccgtaagtaattggcccctttgtgtagaaccaggagctctaactgccgtttcctataatttatcactcaactgaaaaagagaacctgtgattgttaccatcctccatagaatgcctgttaaatccagaaatctttagtgtaaatctcagcttcataaaatccctaccttggataggctctaccactaatagtataactggtaatggggggcaggacttctcaagaatgtaatgttccatatttgcaacccagctgactgatttcttgttagaggctagtattctgcatcaaccgtccagcaagttaaaaatgaggagaggaaaaaatgaggaaattatg

SEQ ID NO: 137717 - DNA, 1026 bp, Homo sapiens
tatatataaaattctatgtttaacacattttatttggtataaacacacacgtgtgtgtgtgtatatactatatacttacatcaattatatattctagtaatggatattatgtgatatgtaatatataatacatttgtttaatatataatcatgcaccaaataatgacatttcagtcagtgacagaccatggatacaatgatagtcccataagattgtaatactgtatttttactgtaccattatgtttagatacaaaataccattatgttataattgcccacagtattcagtacagtcatatgatgtacagtcacatgatatacagttttatagcctaggagcaataggctataccatatagcctgggtgtatagtaggctatactatatagatttgtataagtgcacactatcatgttcacacaatgatgaaattgcttaacaatgcgtttctcagaatgtattcctgttattaagtgacatatgactgtaaatgtctagatatgtaatatttgactatgtaaatgtctgcaaaaaatggaaggtatgcatcaagctgataacagtgcttacttctggagggggactggaattttggcagggttgaggcagtcaaggagacttgacctttacaagtattatctatttttttatataaatatatttatatgttacttctataagtaaaaatatagaatatatttttctataagtatagataaatatagaatatatgtaatatagaatatatgatatactatatatagaatatatgtaatatagaatatatcatatatattctgtatgtatagaatatagaataaatgtagaatatatcaaataaagaatatatgaatatacacatacatacatacacacccatgttattagtggttttaaatatgcagggtagtttgggcgtggtggctcatgcctataatcccaatactttgggaggccaagggaggtggatcacttaagctcaggagttcgagaccagcctggccaacatggtgaaaccctgtc

SEQ ID NO: 137718 - DNA, 2031 bp, Homo sapiens
tatatatatacatatatacgtgtatatatatatatacgtatatatacacatatatatacatatatacacatatacgtatatatatatacacacacatgtacacacacacacacacacatacacacacacacacacacacaaactcttttctgaacagaaaccaaaactaaaagatgaagtgactttccttaaagatacttatatagtaagcgtggcagtcaagattaaaacccagaccctcagattccaaacatttcctactacataattttaatctccatcaaatcaagagtaaatgttttcagcgtgcagttgaagtggtaaaaattaatgcatagttccttgagacatggaatgctgaagtgatttttcttcctgtgccatataatgtcttctttctctttgacctataacctttctaggataacataaaagagctagaattagaagtcatcaatctgcaaaaggaaaaggaagaattggttcttgaacttcagacagcaaagaaggatgccaaccaagccaagtaagaataaagttaataaatgttatttcaagtccctactatgtgtgaggagctttgcaagaaatagagaagtagaagtcccatttactgcccctaaagatttaaacctaattatgaagaggaaacctaaacacaaaaaatggttaaataattgcaattttaaatagcgtctcaagttgacagtaaaagaatgtcataacacagcacatgattagtagccaaataaatttcttaggcagtaattgtgttaagagttcagaggcgaggaatatcaattcaggctaccatgatcaaggaaggctttgtaaaaagttagcatttgagctggcttttgaaagattatcacacttactagataacagcagtttctttgtccctgcactaatggtaaattagcttgtgaatggaattaatgtccaggctagtgatttaaaaaatcaatctagccatctcttaccagttaagaataaaaccaaagcagataaccataacatcctactctccttcagacctctgccgtatgggctatcctaccttctttttactcagtgactccgttttatctctcagttgagtctaaagctcatgtttgtaaaagttatgctgaatgtttactttctatctcagacttgtataataatcatcagaattattcttcatagctaaagtgaagtgaaatgccttcaaagaaccattttgatgcaaaaggggcggcgtatattgaggcagttgcattgctgtgtactaaaagttgtcttactctttgtattaagctcctattattgagacaggtttggttgtttgggtggtattctttttttaagatggctatgtgactagtcacctattttatatatgtcagtgttgtaactctgggagtctagtattatgtcttttgaagtcaggctttgctgctggtagtcctcacttctacagcatctgtgtttaggttgagtgagcgccgccgcaaacgtctccaggagctggagggtcaaattgctgatctgaagaagaaactgaatgagcagtccaaacttctgaaactaaaggaatccacagagcgtactgtctccaaactgaaccaggagatacgggtaataaattctcatccttgcatttacccccattggaatttacaaacataggtattccatttagaaatatactagaggtgttttcaggtgagaaaatagcaggcagagcaatcatttcaagtgtgtgaatctccacaaatgtcccttttgcagaacattgtgctagtggtcatctaggatctgcttaataaaacgttgctttgacattcaaaatttaatgttagagtctctgaaaccaaagaacaaagacatctccatacttagtgggttatatcctgatcaccttccatgatcatgcagcataattttgtaaagtagtaataagatgacagacacctagagaaaattctcagttattgaatgttcaacttgtggcaccaacaaagtggtggttacaggctacttgtactg

SEQ ID NO: 137719 - DNA, 1012 bp, Homo sapiens
ttgcagtaagccaagatcgcaccattgcactccaaactgggtgacagtgaaactctgtctcaaaaagaaaaaaaagtatacaatttgatgagtttggacacgtgtatacacccatgaaatcatcaccataatcaagataatgacagtgtgcttcattgcctaaactttctttgtatccctctgtaatcccttcttcttatccctctgtaatcccttcttctcctccctggtctacccgtctactccccatttcatatatatttctttatatccccacagtggttccaggcaaccattaatctgctttctgtcactatggatttgttttcatctggaatcatacattatgtattttttttctggcttttattcacaattattttgagattcatccatgtggttgcatatgtcatatacaacttctttcctttttattgctgagtggcatcccattcattgtatggctataccataatttgtttttatatccatctgttgatggatacttgagtggtttccagtttttggctcttacaaatattgcactgaacatttgtgcacaagcctgtgtggattttttttaatttcttttgagtagatagctaggagtaaaatggctttcttgtatggttggtgtatgttttaactgctaagtggctgccaaactgttttccaaagcagttgtaccattttacattcctactagcaatgtataagggttctagttgctacacattcttgccaataattagtatggtcagtcttttgaattttagctattctgtgtgggtgggtagtggaacctcattgtggttctaattttcttttctgtaatgactaatgatgttggacatcctttcatgtgcttatttgccatatgtatgttttcttttgtgaaatatgtgttcaaatctgtccccatttttaaattgggttgtttatctttttcttattattgaattaaaattctttatatattctagatatatttaacagaggacttctgtgtttt

SEQ ID NO: 137720 - DNA, 1059 bp, Homo sapiens
agctttttttttttttccatagacaggatctcactctgttacccaggctggagtgcagtggcgtgaccatagttcactgtaacctcggatacctggactcaagtgattctcccatctcagtctcccgactagctgagactacattcatataccaccatacctggctaatttttctactttttgtagagacagggtctcactatgttgctcaggctggtcttgaactatgggcctgaagtgatcctcccaaagtgctgggactacaggtgtgagccactgtgcccagccatgtctagcttttttaatccaatctgaaaatctctacaacttaattggggtgtttagaccatttacatttaatgtgattattgatacaggtaggtttgagctatcatcttgctatttgttttctattgtgtcatctgttcttcattttctttttccctgctttttccttttttggatcagttgaacatttttatgatttatattatctttgtttacttgtacatgattttgtttcatgtattttggtgctttgttattagggacgtacacattaaggattatattctattgaacaatcggctcctttatcatgaatcctttttatccctagttttattttttgataggaattctactccatctgattctaatataatcactctggctttcttttgattactattagcatggtataccttcattaaaagcagaaatattctcagggatagttactgtttcaaaaagtgaattttggctgggcatggtggctcacacctgtaatcccagcactttgggaggccaaggtgggtggatcacttgaggccagcagttcaagaccagcctggccaacatggtgaaaccccatctgtactaaaaatacaaaaattagccaggcgtggtggcgcgtgcttgtaatcccagctacttgggtggctgaggcacaagaattgcttgaacctgggaggcagaggttgcagtgagccgagatcacgccactgcactccagcctgggcgacagagcgacaccctgtctaaataaataaataaaaa

SEQ ID NO: 137721 - DNA, 1052 bp, Homo sapiens
caggctacttgcaataaggcttactgtttctttccctgaaggagtgctcagattgctgacctacagcagaagctgctggatgcagaaagtgaagacagaccaaaacaacgctgggagaatattgccaccattctggaagccaagtgtgccctgaaatatttgattggagaggtaaacatcactctaaccagcagttaggaggctggctgtgtaggttgaaatgggatgttagccttgaaatattgtcaaagtgttattgccacttttcatggtagaaaccctaataacactaacattagagagtttagtagataaaggttggtgtaagcaagtacaggccagtcacttacaaaaatataatatgactcacaaattgatgcccgttgtgactggcctatagcaagtgctgaatgcgtgttagctgttgttattaggaaagaccagaatgccatagtgggtcactggctaaacatcaactgttatactgtactactttttaaaacccctatgagatgtatattcaaaaatttaagatccagtctagaaaagggaaaacctaagcatcttttgacatataaagattcattttagggaaaagccatctttgctgaccttaaaatgatatgtcaccttacgttgtcacaagaggaatgaaaattgattgcctctggtgattgaagcattttcactcaagataagcatacaaactccaaacccacaagtttaaacaatgctaccctttatacatttttgtgttagcttagcagatttgttctactaaggaaatcttgatcagtcttgtgaacactggtacttatgatgttcaccatctgggctagtagtgaatgtaaaactaggccagtgtaggatatgtagcctgaagagccagatctgcagtctcagtctacaagttctaacatgtgaatatagacattctgaaatgggacataattggccataagggtgtgtcctgtggattttgcttaaaaattaaggaagaacttcttaaatatcagaatttgtaattgtcagatactattcgggttagcttt

SEQ ID NO: 137722 - DNA, 1042 bp, Homo sapiens
aaaaaaaagacttctaacatagataggcaagctagaagtcaggctaagaactgtagaagtagcagagaccttaaggatcctctattcctgtggtttttcagtttgcgttcaagagtcatgtagtagctccatgaaagggcctccaggcagaggggcatggccccttcctccctcctcccatctctatctgtctctctctcggactcagttttcttaactgaaaggaacacccagtatggatgctaaaagagatattgcaaattgtagagagggggagtttagtcaaacaaatgaccgaggcttgtctttgctttaaacctggccttgtgagatgtcccatgcaactacctagtctttgccttcagaggccacctacaggcattgctccattccttcagggacagagcgtgtcaaacactatgacctccccaagcagggcctccctaagacttgcttcagctgactaatcaggcacttagagctgttacctctttggttgaatgggagcagactgattttgtaaacctggcagccaaatttataatatgcctgtctgcttgattttcaggatagcttgggcactgttgaacggacccaggattccgaaggctccttcaaactggaggatcctaccgaggtgaccccaggattgagcttctttaatcccgtctgtgccacccccaatagcaaggtaggtgggctaaaaggcaggcattggaaaactggattagcgtccttctctgcattatctatgagagaccagtaggagagaggcaggtggagtaaaggtgtaatcagcttgctgggaactagggatcgggcatagactctagtctggttttttccatagaatgatcttaaagaacacttcatactactgggagtatgtcgagcatctatagcagctcggctgggctgagcttctgcccctttctaaagtctattcatacctgtctctgtccctcctagatcctgaaagagatgtgcgatgtggagcaggtgctgtcaaagaagactcccccagctccctccccttttgacc

SEQ ID NO: 137723 - DNA, 1085 bp, Homo sapiens
aggggggagcggtggggcaacccaggagggctggagagtgggggcctagaggcctgggatgcagtaggggtcgctggggctccaagcctgtggaccccgagccctagcattgcagctgggcaaagagaggcggtgggaaatgtgtggttccctgtgtgtgtctgtttgggggtctccattagaagactgggaggagccgtgtgtcagggggtaagggcatggcggaggggcacattttcctgtgtgggggaattgggtttgtctcagtgtgggggtttggcaatgtctctgtgtctggcagggggcgggaggttctgcgggggctgtgtgtggtgtgtgtctccaccggaggggaggggagggggcatggtgctctgcgtaggggggacatatgtgtgtgtatgtatgttggggtgtgtggaggaaggcaatggagctgccgtgaatccgtgtggaggagcccatgtgcccggctcgctgagcttcatcccttgatgccatgagtccctctccgtcccagtccctttgtgtgtgaatgtgcacatggatgtgtggagatgtcactctgaatgtggagaggtctctgtagaggaggctgcagggatggctgtgtttgtgtgtgtggctacatgtatatgtgtgtgagcatgtggctgcaagagtgtgcacgcgtgtgcctggtgtgtgtgtgtgagtgtgtgtttgtatgtgttgtctctggtgagaggcgcttgacaggcaagggaggggagaggaaggaggcgagagacatgtcccaagcaaggctgagaggctgctgagaaggacggactcttttgtccaagcagctctgtagtgtgtgtgccggggtggggtggcggggggcggggggagatttgaaggaactgaagcaagcctcctcgctctagagcaggcatggtgcctggagccggcaaggggcagctgccctggtgcagagactggccccagtggggcatgtcccccttgggtacctccagatgtgagagggcttagccccccagccctgacttggcacagcttgggagcccctgggtgctgggcacaactccggcttccactcccag

SEQ ID NO: 137724 - DNA, 1047 bp, Homo sapiens
gattctttcaaatacctggtttgcttaatgtgggtttaacccataatgaagtataggaactgtgtctttctatttgaactttgtattgtgcccagcatgggtgctttacaggtgtttttatgatgaggctttggaaaatattaaaatagaaatagaaatgctaaatgataagataccacagtaagagatactatttagtggtttcactcctgattgctctaaacggttatggacacagcaatcctacctattagctaaaaatagcatgatgttcttggacatgtataatactgcttaaaattcaattgaaaatttaaacaactggctcttggcaaaggctctcttaaaatctattctaaaatgaaaaatatttttctgtgacttgtggaattgtcccaccaagggaaggatgggttatgtgttagaacattttgagatctcctacattttccccgtagtgactttatatcagcctctgtttataaactgatctagtatttttcttgaaagcccttttgtttttagagtagaaactgatctcaaaaacaggaggtgagccagaaattggtcattaaggtagcttaactgggaaatgatcctttatgaccagtcttttcgggaatgtaaatccaggcaggctgggggtacaaggagtgagagagaatgagagtatttctgtaagttattttaaggtgctgaataagcatacttttaccatggaaacacctttgggtaaggcctggaagagttagaaatcagtggtgttaataacttgaaagcataaaagggatattttccccataacatttaagtaaccattctatctccccctttttgagaatgaaggatgtaaatgtaactgctatcctatcagcattgaaagcacaaaggtgagagtataccaaggcagggagtcaaagttctgaaattcccgttgtcatcctaaaagaaggcaaggtaaggaagaaagaaaatgatttcctatcagcagcatttgtacactgtgaacaatttgaaggcagctagtattacatttatctttgtgtc

SEQ ID NO: 137725 - DNA, 1003 bp, Homo sapiens
ttttcacttagcataatgttttcaagattcatgtgtgttatagcatgtatcagtacttaattcctttttctttctttcttttttttttttttttttttttttgagacagagcctcactctgttacccaggctggagtgcagtggcatgatctcggctcactgcaacttctgcctcccaggttcaagcgattctcctgcctcagcctcctgagtagctgggactacagatgtgcaccaccatgcccagctattttttgtatttttggtagcaatggggtttcgccatgttagccaggctggtctcaaactcctgacctcaggtgatccacccacctcggcctcccagcctcccaaagtgctaggattacaggcgcgagccaccatacccggccacttgattactttttatggctgaacaatatttcatcctatggttatgccacattttgtctatccattcttgagttgatggacatttgggttgtttccaccttttgactattgtgaacactgctgctatgaacattaatatacaagtttttgtatgaacatgttttcagttctcttaggtgatatatgcttaggagtagaattgctaggtcataggtaacttagtgtttagcatttttgaggaactgtctggctttttttaaaagtagctacacccttttaggcccagccctgttctatatacttagaaaagaaaaaaagattacgttttcttttcaattttgccccctggagctgaacttcatatgtgtgtgtttgttttgggcttttctttattctatgtaacccaaggacatggtgctagatttagtaaagcactctgaatttagctggtcaggtgctttctcgtctttgttagatggtttgaggcaaaatcctaggagctttggtgtctgtaaaacatcagtttttcctgatagggtagaatgattagaataacagtaatgagaatgagttatttctttttattttattttattttatttttttgaga

SEQ ID NO: 137726 - DNA, 1059 bp, Homo sapiens
caccatgcctggccaacatggatgagttttcatgatgtatcagaaaatgaaaaaagcttgcgtgtgaattgtgagtacatgtatataagccatatatgcatggaagtaagtctggaaggacacatactaaaaataccaacagtggtatcttctggggagtgggatggagaagtgatacagaatttttaaaaagtgtaaactcagcagctttctttgcaggcacataagactgtggcatctttagggctttcctttcctgaaggatttgcaattgtattaccaagttttatttttgagagcttatccactctctggccccacctttcttttcagagacactgcaggatccaattctgtaagttaagaccagcagctccaaactttatcagaatcacactgatgcttgttaaaatgcagattcctgggcccctgctcagtagattctgattctgtgtatctgggatggggtgccaaatcctgatcttttagaggcaccccaacttgtcagtgactggggcaaaacccttcttcggtactgacttctgattgtgccccctcccacttgtttctctgtgattagcaactgggaaaaaggaaagagggcgatgactggatatctttgtgggtcacaaacagttgggttcatctgaatgggaaaaaacaaagcagtttagtagacttgagattttagtgttgcttctttgaagtgggccctctgggttagaggctggtcaggtgggcttcctaggcggtgactttggcctaggagatgtcctccagcattggctgcgatggctgtgttagtgacaaatcagagggaaggagggagcttggcgagtcctgaagtcttagaattgagatgctttttaagggaagcttttgtcctgggaaaatgatacctctaatatttaagatgaggtagtatctaagtctattctaaacagttttttgttagaatgatttttctttgttgtaaaaagttgttaatcagccgcctattgtgggttgttaacatctcaaaagggtgtttaaaaataataaaccccaattgctcccaac

SEQ ID NO: 137727 - DNA, 1043 bp, Homo sapiens
aagcaactgccatgacctgctgctaagttggagttcagcgggcaagtcgattccaaagaagggaatatataaacaagtttcaagaaggggaaaacatggcttaaagatagattgggtgtacttttttgttcacagttcaatgcatagttctttctctctttgacttatcttcccctaagaaagggctgcctggtcagaaatctttgtctcacacggttctgcccatagccggtgagctcagaggagggccagaaaggaacaaatgagaaacaatccccacccagtgtagagggccaagccctggggtggggccagcacccaggcggtctccagaggtagactggcctgctgttatgctctaggacagtccagggcttaggttggggcacctcattgatattgatggcttgccgtgtaaccctcagaacaggaacattgtccagctgttgtctctctaccctccgccaccccaccccccgcaacgtttaatgggtgagtcagtgacttaactgcttcctccaggatttcaggaacaggagtaggtaatgaggacaaatcaccataacaccggcgtgtgatgaatgaaagagcacacgaatttaacccgttggttaaactgatatcacagtgaacaaaagaaactttgttgagaggaggttatttgcctcactccattccttcccctttaggctttagcaattccccttacacccagttgaaggtcagtctggttgctttgcagagggaaggggagtgtcaggtgctggaacaggtgttttgttttctcctgtagagtcatacggactaggtggggatgcttcttgccagccctctatggtgcacgaaattgcttttgtggaattttttcccctggaagtgtgtttgttttttaaagcagtttcccaaccttcaacccctagtataaattttgactcgcttcaaagtcagcttgtcatagtgaagtgtgcctgttttctagcatttccacggcctgtggccttagatataccccattttatgcggcaattataggcctggaaaat

SEQ ID NO: 137728 - DNA, 1048 bp, Homo sapiens
cactagcccgaaaggaagcgtgcatctgcttttcagtgtggtagtgtggctctgaacagctctggaaagctccaggggagcagaaacctgactctctgtcagggatcagtgggtgacttcttagtcttcaaatttagtgactggttcactggttctctgacattgttctgacctcttcaccacatttgtttccatgaattacctgctttcttctttaaaggctctctttctaccctgcttaccattccttaatacctttcattagctctgcccccctaaatggcaatgtcatttattttcacagcttcaaatcctgccgtataaatgacattcctgatctctttactgaactacagacctgcatatctactacttgctggacatgtgcataaataaaactgccctctcagcgcctcaaacaagcggcatgtactttccttatctaagttaattgcctcaccctatcatgtggaaaagggattagatttgttctgtcacccaaggcagatctctgctcaacataaggaaggaagagctaatgattaaaactgtctgaaaatggaatggactgcttccggatatagtaaattcgatctttagtcactcaaggtgttacagaagaggctgggcaaccatttgcctgggtattgcagagggggttgaaactaaagcaataatctgaacatgatctgctcaaaagctttcactagttcctcagtgtcttcaagataaaggggaacaaacatttagggaacacattgttcatcaagacctttgttattctctttaaatggcttttaatatccctttaataatcctacagagtagatattatgattcccattttgcagatgagaaaactgagactccagttagatagctaagaagttcaaaaactggaacttgaacttggttgctctgactataaagtgtggttctttcagtgtttccccaacttcctcataggaatcagctggaatgctagtaaaaatacagattcccaggctccttttctagtgctttggattcatcaggtttgggaaaatac

SEQ ID NO: 137729 - DNA, 1080 bp, Homo sapiens
tggtgtgatctcggctcactgcaccctctgcctcctgggttcaagcgattctcctgcctcagcctcccgagtaactgggactacaggcatgcaccaccacgcccagctaatttttgtatttgtaacagagatggggtttcaccatgttgaccaggatggtctccatctcctgaccttgtgatccgcccgcctcagtctcccaaagtgctgggattacagatgtgagccactgcacccggccgataattagctttttttgaaaaagcacatgtgactgtgacttaggccttatgaaattttctgagatagaagagccctggtctgagagtcacccagtgtgcagttctagatgaggctgtgtgcatatctgggcctggctttcattgtctttgaggaaattttctagcttagtcaaacaaaatttaagcaggaaaaagaggcaaagtagatttagagaaaatccacatcatgggtttggaaaacaaataaaagttatgacaaaggaagggattgttgagggaattgggaatgattagcctggtagagaagatctaggaaagactcagactcattaaatactagagctggaaagaaacttagagagtatctaagggatttcctttatcagatagaaagttggacaaaatgacctctgaggctttagcggtctgcaaaattctttttctatttgcagttctgattgatagaaaaggaaattcttgttcaatttttttgcattctcaactgtgaataatagtctagttcagaatctcaaacctcagatactacatttctatgtcttttacaaaaccatagcttaaaaaagcattgtccatcctgttcatatttcttgtccattcagtattcataaattcatcaaacaaaatccagatagacttgggtaccattttttattgggaaattagagttagacaacttccttttttgccttgtttgccagggaacttagaaccaaacgtgttcctcatctgaagtaaatgactcaaaccagtgcttgatatatctgcttccccactttttttttaattggcttaatgttttttgaaaattgtgaaagga

SEQ ID NO: 137730 - DNA, 1045 bp, Homo sapiens
aatgtatcttgtgttttaaacttacaaccagtaaactccgccctctaatcttctacaaattcatcctaactcccctaattcattttattttatttatttattatttattttttagacagagtctcgctctgtcacccaggctggagtgcagtggcgcaatctcggctcactgcaacctctgcctcccaggttgaagcaattctcctgcctcagcctcccgagtagctgaaattacaggtgcccgctaccatgcccggccaatttttgtatttttagcagagacggggttttgccatgttggccaggctggtctcgaactcctgacctcaagtgatctgcctgcctcagcctcccaaattgttaggattacagacgtgagccaccgcgcccggcctcctaaattcattttaacatcttccttccttctctcaccaaactaatttgtgcttaattcaagttctgttcttttccttactatatttgttctaatctttgaaacccataatgacatccagtgtttctcattgtcactgagaatgaggttgcttcatgatgctcttcttagtaggagtggctgacagaatgtcttccttgctttaggaaatgcaggactcaggcagtgagaatgcattcagttttgattctgtcacacatagcccggaatgcacctctcggacagcacctccttgtctgctgcctctgccattctccttactgctttgagtgtgtaaattgaggggaaaaaagggctttttgttagagtttgggtattttcattttcaaatcatctgacgctgatttttaagaactctgtttcaagagctgtaagcagtaggtgagtatttcactcttcatggttttactacatcctatctcatttgggcttgcatatggtaagatagtgtgttttacttgcagcttccaactgagccaaaggccacagtattgcaggtagaagtcaaagtcttggaactagattttgggctgtgtgtgcaaaggtgtgaaaacaccttattaacagagaatatgaagaagacagcctaga

SEQ ID NO: 137731 - DNA, 1073 bp, Homo sapiens
gggatccccaaggaaatcagccagtaggtaaagagggttgagaagcctggagtttagtctgatgtgtaggagaactggggaacacaaaagaaaatctctttttcagggggctggctctgtcctatcagaacattgactgcttttcagaaagcagagagggagctcttaaagttcacagccagtctgtgctcctttcccctgggtaccggctcttgaagatgtgttagagttggactgtctggaaggctgacttgcttggggaaaatgaaaccactcgtgggtgtctccctggctatagatcctgtcagagcatccggccaagaagcccagctccagagctcccacctcccttcagaccacctgaggcaggcgggttctccattcacccctttttttctatgagcttcacaggccaaagaacttctggagcagtagagggaagagagacgtggagtagatgtgtatatcagtggtaccttagggcatgtgtccaggaggctacagtgacctttgttctttaggaagtaccagtgagtgttatgagtgtctggattatgtagaaacttctaacatccctacaacattttcttgtaaacataattttcctcttacatcaactttcatttaatctcatagactccatttgtgagagatggtcttttatttagctcaccgttgtctccattttagtttttcttgcatgctttaaaatccattgttctgtttttttttttcttctgtccttcccctccatcttcatgttctttcacagtcgatcaaaacgaaacgtaaaaagagtttccgcctctctcgaaagtttccattttacaagagcaaagaaaacatggcccaggagagcagcatacaggaacgtaagtagcagcagagtccagagagcaggccatctgcagccccatcctctcatcctcagttgcccttccctcgagagaagcctgggcagggccacgtgtggcctcgtgcctgcctgtgtgcgtgtgcacctgcttatctacagagtcagggcagaaactggtctgcctaaggagatgttgggttttatttgtcctgctcct

SEQ ID NO: 137732 - DNA, 1503 bp, Homo sapiens
gatgtgctatggaccacagtaataattttgttttcctcttcactttagccattgtacagggtgactcactggaagagatttataacaaaatcaaacaaatcattgaggaccagtctgggcactacatttgggtcccatcccctgaaaaactctgaagaatcccctccaaccattctcttgtgaacagaagaaatcaagtccctcttccctcctccctcttcattcctgtccccatggggagaacaaatgctactgttcttgtccccttttttagatatgtcaaaaaaaattaagttttctagtcctgttctttttttttttttaagtttttgtttgtttcagtttattttttgggatgatgccatctcattcatcatgtgactgtgcccattcctgcatggacctttcccaagcgctagcacaggtgcaaaatccatcagagccattgttttcataaaaaccaagcagaagtgaagagaaaagaggaggactgatggaaagacagactctggacagctgcacggcttgtgaagtgagctaaatgcaccacatgatgagatgctcctgggcatttctccctatctgtactgctgtcttgcagctctgaacggtgcaacgtaatggcgacagaaagtatcttatttatatatagatatatatatgtaatttatataaaatatatagaaattattatatatatatattatacactctcatataatatatatatattcacacacatttgggttagaaaatctatggagacttcatcaatggtactatgttattagagaaatgctttaattttcatattccaatcagatggcatcttctatcccagctggttgggaagggattgaagatggtagcaagtgctgcactaagggcactcgcatttggtcattctcttgagagctaggaggggtcagcctgaggccggagaggaagggcttttgcctggggtgagagggtgagagacttgacctgaaagcagctgctgcccctgaggtgcagccagagtcctgtgtgcggacagagagaatggctaatgatgctccgcgtggaattgcctattgttttatgccacctgatgtgtctgcatgagaggtttcctttttgttcctttttaagctgctgttaaaccaaaaccatgttgtgctactgtgtcagccttttcattattgcaaattttacttttactatttaagtgaatgcatagaatccaatttgccaaggttctaaaggcttatgaggtcctgaaggagccaggccttgtgatggagtaggtgacacaggcctggttgtcctgtcagcagaagggaaagcaggggctgggctgagaggaggacacggagggctctgctgaggttccttcctgggttccaccaacagggacagggagtcacttgccttccagttctgtgctgggatggcgggacagcacttggcttgcttggccagctgcgtcatgagtttgatttggtttttttttttttgcagctg

SEQ ID NO: 137733 - DNA, 1087 bp, Homo sapiens
cactatctcagttcgctgcaacatccgcctcccgggtcccagcgattcttctgactcagcctcctaagtagctgggattacaggcgcgtgccaccacgcctggctaatttttgtatttttagtagagatggagtctctccatgttggccaggctggtcttgaactcctgggctcaagtgatccacctgcctcggcctcccaaagtgctggggttacaggtgtgagccaccacgcctggcccagttactcttattatccatgttttccagatggggaaaccaaggcacacagctaataagtagcagagctatgagcccaaaacaggctgtctggctgtagcagctgtgctcttcagcacaccaggcccaggctgcatctcactttgctctgcttagaacattttcttgccccatctctttgcatctgtcttcctctcctagactcctcgttgagagcagagactatgtcctgttcacctttataccccccgcacttagtacagtatctggcacatagtagatgcttggtaaaagaaaagagctgcactggtctttggctcaagcttggagggaagtgatttgaccaggtccaaacctgtggcgagtgtgaattattttggtttgttttatggagagcttcttttctgaagccactgccgcttcctctgggatttcactccatcattatgactcctctttttcatcttcttcatccatttctgatcctttattgctccttccccttcttttcactctactgtcttctcacccagggttgaaccttttacccgctctgctctcctttactaccatcactcgtttatgcaacacaagttgatcaagcatctagaagccctcaaagaccagccattaccttccaagcatgaaattccaagaccctagacgggaaaatgccttgctctccccgatgacttcacttctctcccatcctgccccaccccttccatgggctcctcccacctacagctcggttccctctgctctcttcccccacccctaagtgctgccattgctctagtcacccaggtttaagccctgatctccccactctggtcatcatatccgat

SEQ ID NO: 137734 - DNA, 1671 bp, Homo sapiens
aaataatttgggttgtgcatggggaaatgaatggggagaaattatatgtaggacagaatgggagactgtgataataatccagttttaaaataatgagagtctagacaagggtagtgagagtggggtattaagcaggcaaaacattgctttcttttcttttaaaataagctaccttatctttaaatccctttacaaaattcattcccccacctcccaagagaaaatgtggatattctaggttctgaaaactgaagcagtcaggaagagaacttccacagattcctactacctctactcacacaccaggaatcacaccacatagtctgccttctcaactgccaccatagattagctatcatgttccttcctaaagccagtctctaaacttacacacttgtttctatcacctcttgcctttttctcactcactttgtcaacattttattctcttactggtttattcccatcagcatatgaacatgctcatttatcccatatcaaacaaacaaaaagtaagaaaacctcttgaccttccttctctcaccaactactccccaatttctcttcttccctttgtagttaaactcctctaaagatttgcctatatttactgtctccaattctctcttgagcttactccaatcaggcttttgccccaccactctaacaaaactgcttttgtcaaggtcaccaatgacctctttatcgtaaattgcagtggttaattctcagtcctcattgtatttgacctatcagcaacattcaatgcagttgatcactctttcctccttgaaacacagttggcttccaggacaccacattatccttatttttatcctacctcatgagtcactctttctttctcctttgctagttcctcttttctcttcaaccattctcagtgtcaaattatgagctcaggagaggaggtattagggagttgagaagaagggataaggtattaactattcattcagaaaagtaagaaagtgaatgactacggaagtgcaatatgcttgccagtagcactaaggccatttcatgaagttttaaaataaaacaagtagttgtatgtatttttttctggccacattcagctgatgagtggatgtaagcaccaaaatcagtagaaagttggacttaatcagagttgaggttttgccagatgaatacaataaagcaaaagaagggcaggaaaatcaaggaacaagggagtggttataattagtctccatggaatttaaactgggtatgcggtagaacatcaaggggatgagggacagtgaaaaactggtaacatcagtgggttgggggtcttactgcagttgaaggattgctggagtcagggtaatagaggtatcaagttggaaaggtaagaggcggtagacagaaagtagaatgtgtgaaagtaagagctggggtggagaactagggggagggagggagacacctagggcacaaaacttaaggaggaacttattctctgggtggtacaagtaaaggcttggtacttgtacaacactgagagcctccttaaatttttcaccctaggtgcttcactcacctcacctgtcccaccctactcctagccctgactgagagtgtgaaatgattgcaattgttagtaatgacagagtctagtgaatgactgtgggagtaaatggctaaggt

SEQ ID NO: 137735 - DNA, 1019 bp, Homo sapiens
ttgaacaaatgaagcaagatacaaagtagtacttactgtatgattccataaatgtaaatgccaagaacagtcaaaatgaatatatggtgttggacatcagggaattggttacccctatttgaaacagggtctgaaaagaagcatgagtgggcttgttgctgttaatgttctgtttcttaacttttttgttgttaacatacatgtgtttactttgggaaaattcgtagagcctagaattcataagagcatagagctcttgagatttttatacttttctgtaagtcttttatacttcaatgaagaaaaatagaatttaaaaaacactactagaagtgaaacaatttgggaagataatgataaactttgtggtactgacctgaagtatgcagaagggcatatagaaaaggagattatcaagattagctagagtagttgtaggagccttttggtaggagacaggcctttttggggtccacacagttaaaagggaggaagaaaatgactccaggcaagggatctagatgggagatgtctaagaaggaaataaggatggaagataggatacaagcttgattaaaatggaatattcatattccatattgtaagtttagtgaggtaatactatgcagtaattttttatttcatgccagcagtcatttatttgaggtgtaatttatatacagtaaacttcacaagtctcaagtgtacagcttgatgagttttaatatatagtagtcttgtatattacaccatacagatcaagatacaaaaacttcccaacacccccaaaagttcccttggccccattctagttaatacccacctctacttccaagaacaaaaaaacaccattctgacttttactactctagattatttttgactgtttttgagctttgtataaatggaatcatacagttgtcctgttttatgtctggcttttttaaaacatacattgtgagattcgttcattttgttacgtcttttggatgatttgacactttcactgttatgaaata

SEQ ID NO: 137736 - DNA, 5052 bp, Homo sapiens
tggggggtctgggggctgtgtctgtttgaagccccgggggaagcccctgggtggagctctgtttaattcccaaatagccacaggccaaggaactgacacattaggtttcaagattcctgggttgagattaggataaaccctatcagtttctggcaagagaaagagacctaatattgattgagcacttactaggcgccagccactctacttcagggggctttcacgtgccatttctgaaattagcccttccaaaaaccttgtaaggtattgtaattcctacttgtttatgaagaaactgaggttagaggtaaagtgacttgcctttgtcccttccatatccccgtcctcatttcccaatagctcctttgcttggtggagggggtcttgtaattcgctttcagagtttagggataatgagccctgtcgaggggtttttgtcttgtttttcaccagatcatcttcttcaattcctgctaggatgccgtggcaagcatttcgcagatttggtcaaaagctggtacgcagacgtacactggagtcaggcatggctgagactcgccttgccagatgcctaagcaccctggatttagtggccctgggtgtgggcagcacattgggtgcaggcgtgtatgtcctagctggcgaggtggccaaagataaagcagggccatccattgtgatctgctttttggtggctgccctgtcttctgtgttggctgggctgtgctatgcggagtttggtgcccgggttccccgttctggttcggcatatctctacagctatgtcactgtgggtgaactctgggccttcaccactggctggaacctcatcctctcctatgtcattggtgagatatggtgggggagggagggaactgcacagccagcaaaggggtttttggtcaggaaatctgggtggaagtattctttatattattcacaggacctcaatctccctaaatgtgcgggtttgctgggggtctgggggggggtgttgaaggtgtggagaaattgctcattctatccatctccgtcctggtttccttaattaagtgaatggttttggttcttaaaaagtaataataggccaggtgcagtggctcacgcctataatcccaacactttgggaagccgaggcagacagatcacctgaggtcaggagttcaagaccagcctggccaacctggtgaaaccctgtctctactaaaaatacaaaagttagccgcgcagggtggcttacacctgtagtcccaactactcaggaggttgaggcaggagaatctcttgaacctaggaggcagaggttgcagggagaggagattgtgccactgcactccatcctgggtgacagagtgagacttggtctcaaaacaaaacaaaagtaagaataggtgaaaaaggcagggacttgtgtgagcctggggtctgggaagaagggaacttggccacatgtttctctctctgctacaccaggtacagccagtgtggcccgggcctggagctctgcttttgacaacctgattgggaaccacatctctaagactctgcaggggtccattgcactgcacgtgccccatgtccttgcagaatatccagatttctttgctttgggcctcgtgttgctgctcactggtgaggcaaagagcagggtataatggtgggggttgggccaggaggggctagtccttggggccagggataaggatgggggatgggcctgagaaaggcttaagggaggtgataatggtggggaagaagaaaagctgggaaggaacctagaggcagggaaacaaagcttggactgaagactttctgggagtcctgaatgcatttctcccacaggattgttggctctcggggctagtgagtcggccctggttaccaaagtgttcacaggcgtgaaccttttggttcttgggttcgtcatgatctctggcttcgttaagggggacgtgcacaactggaagctcacagaagaggactacgaattggccatggctgaactcaatgacacctataggttagatggtcactcttaggagctgcagagctgggaaaatgaaggggaagaaggggatctgctgaaggattctggatggggatgggaaaaaatgggaggctgggctttgaagacctagctaactggtttggcattagagaaaagatacagagttggctgaacacacccttaccttctccaacccttcttccactctagcttgggtcctctgggctctggaggatttgtgcctttcggcttcgagggaattctccgtggagcagcgacctgtttctatgcatttgttggtttcgactgtattgctaccactggtaacacagtcattccattctgtttggggcttgggcacagtgtgtgcccaggctgtatgcagactgggggtggtagaggagtgggcctgcttccctaatttagaaccttacgcccttccttcaggagaagaagcccagaatccccagcgttccatcccgatgggcattgtgatctcactgtctgtctgctttttggcgtattttgctgtctcttctgcactcaccctgatgatgccttactaccagcttcagcctgagagccctttgcctgaggcatttctctacattggatgggctcctgcccgctatgttgtggctgttggctccctctgtgctctttctaccaggtcagtatcaaatgtttgttttcttctgctgtcagagtctcaggttatagcattcagtaccagagaataccccttaaaagggctgtgaggggaaagtggagactctttaaacatacagtcttgggaagagagatcccagtcaactcatgccaccctgggcattctcctctccagcctcctgggctccatgttccccatgcctcgggtgatctacgcgatggcagaggatggcctcctgttccgtgtacttgctcggatccacaccggcacacgcaccccaatcatagccaccgtggtctctggcattattgcaggtaacagaccctctttccccttcccttagttgtttcgccaacttctttaactttgccactcccttctctcatttcttgtttcctgcctattaattttagcattcatggcattcctcttcaaactcactgatcttgtggacctcatgtcaattgggaccctgcttgcttactccctggtgtcgatttgtgttctcatcctcaggtgagactcttcctctgcatactgtgatttggatttttattcttggatgaggaatgatggagatctgctcctctttcctccttcgccttcattattccaactttctttgaggaatctgggtatctcaccctgccaaaaagaacttcccttaatggtgatgaggaaggttaagctgcctgggagaagatgataaagtgagtaaaggttgttcttaatactgccatcttacttttgcctcaggtatcaacctgatcaggagacaaagactggggaagaagtggagttgcaggaggaggcaataactactgaatcagagaagttgaccctatggggactatttttcccactcaactccatccccactccactctctggccaaattgtctatgtttgttcctcattgcttggtgagcagtggaatttttctggggtggctctgagatcagcgtgattgggtcgaagtgtgtggcatttggtggctgaggaagaactagagagagagcgactctccttggaacagggtttctaatgtcttagcatgttggtcttaagagttggttttgatgtctctcaacttgacctttgaagctgtcctgctgactgctctttgcctggtgctggcccagtggtcagttccattgctttctggagacctgctgtggactgcagtggttgtgctgctcctgctgctcattattgggatcattgtggtcatctggagacagccacagagttccactccccttcactttaaggtaaatgaactctgtcttttttccttgccagcccatcttgggagaataggctccagatatcttgaggtctaataaagttcatagatattctttaattgaacatgaaagggaagatataggaggtacctaggccaaagacttcttctctgaccctctttagttcctttccagttccatttacccaaactgcatattcttggagtctcatgaggtatgctaaatgagcagctactgaaatgcagaggacaagtaagagttggactcacccttttctggcctgcataggatagggatctctttctaggtcaacctgtggtatgtacaaagaagattttactttgttttcaggtgcctgctttgcctctcctcccactaatgagcatctttgtgaatatttaccttatgatgcagatgacagctggtacctgggcccgatttggggtctggatgctgattggtaggtatccacttgggaagagtaggcttctttggtgtcctagcccagctcctttccctcttggtctcaagtaggaaacctatgaagcctttacacccccacctcacagctacctttccccactaggctttgctatctacttcggctatgggatccagcacagcctggaagagattaagagtaaccaaccctcacgcaagtctagagccaaaactgtagaccttgatcccggcactctctatgtccactcagtttgacatcgtcacacctaaatgctgtctggtcccctgcacaataatggagagtactcctgaccccagtgacagctagccctcccctgtgatggtggtggtggatactaatacagttctgtacgatgtgaaggatgtgtctttgctatttcttgtctattttaacccgtctgcttctaaatgatgtctagctgcttaccaactttaaaaaatgatattaaaagaaagtagaaaaataaactgtgtcctgttttttgcttgctaaagatgtagagcctgacttttaagagtgaagagcctcagagaagtgtcctttgtgttttcttcagttaccacaaaagcatctgctgtgcctgtgggtgcttcttgttgaatcagggtttgaggagggtggt

SEQ ID NO: 137737 - DNA, 1112 bp, Homo sapiens
actgagagtgaggtggagactcccctgctgtgttccgcttcactcctgacacacacacacacacacacacacacacacacacacacacgcacccaactcccccccatcacaccccacctaccttccccattcctgcccagaatcactggtcctaacagggcacagaggtggaaaatctcatgggttctttggccaggaagcctcttattgtcctgttctgacgaccagcgagacaaatgggaaaagactgccctcccccttttctcgctccccggcacgccaggcttgctagtgaggatgggacgcagtctcaggccccacgcaatccttttgcaaagccaagaagtgtgtgtgttgtgtgtgtgtgtgtgtgtgtgtgtgtgtgtgtgtgtgtgtattgtgtgtagcgaggaggattgggggtgggatcccatgacgttaccggctccgcctcctggtgtatataaggggcgcttggcgcgcaacgaccccaagccgcagctttgaagcctgagcggccgaactcggcagctccaacccaactcggcttaactccgcctcaccgagcccagtccaagactctgtgctccctaggtttgcaacagctctctggtaagcgttggggacccacacgtgtgtcggaggggggacggcgagggtccgggcgtacctaggattctctggcaaccatggcatgcagttgcatcaacggggccgtgacctgttgctggcgagacccccgccccgggagttagggctcccgtctccaccccagctccaaaccatttctagatgggggcaggaaaatctgggacctgagtcggggggcatcgggtggaacccttcctctctgctgagaggagagtgcgagcaatctcgggctgccctggggcccctctgggggcgcatctccaaatctttagatgtcgaagccccgcctcgctgttgatgcttgcaggtcagcctagcagggcttgggaggaagtaggggaacatttgcttactcccctgggcgacagctgcgctagttgagcagtgtgggcttggtgaggagggatggaattgagtcggtgctcacttttaatctgcagcgaggttggtcccctctccct

SEQ ID NO: 137738 - DNA, 1048 bp, Homo sapiens
gggatcataaggagccaatgggggcacttcttttttttttttttttggcatatgaaaatttattactacagggttttcaccattaatatttatgatcttggtctttccttcttgcctttgtatagggccaaaagagaaacattggctactttgacaaccttaaagcggactccaggaatatcaccaacagcatgacctttgcgaccaaatccagcaaccagaacttcatcattttcctcaataaagtttaagcaaccgtcgttgggtacaaaggctgtgattttcttgccattcttgatcagctggacccttacacacttcctaatggcagaatttggctgtttggcttcaactcctactttttccagcacgattccttttgcatgataagcacctccaaaagggttggcctttagggctggggggcacttctttcacaggttttcagttcaccccctagttttcggactcccttcttattttgaccttgagcacttcctagctctgaaacaggaacctctctgggattctgccaggcacgttggcttgttccattctgtttcatcagttgacacacttccaatcttccaaaaatttgttaagcccattttcttcactcttaagggcttattcttttattaccattttaatgggatgtcaaaagggagggagataagcacatatctttaatcagacatcttcaatcagacatcttcatttagaactctcttatctttataatggctttatagtagacctttgtgtggatgtaatatagtttattaaatgcccaggtgatggacatttgggttctttccagtttttcactattcaagcaatgttatagtggacatcttttgtacgtaaatctttgggcacctgtgcaagtatttctataagataaattcatagaagtaaaattggtagatattgccaaatcattctcttaaaacattgatccccttcacacactcaaaacagcaaaaagtggaaatttcttccctacatcttcacaacacattatcattaatcttttttcatctttgcc

SEQ ID NO: 137739 - DNA, 1070 bp, Homo sapiens
tctttttgttttaaaaatttatttcttttcatcttctgtttctcttaaggcattatgttttgtgtttatttgctcttgagatccttctagtttagaattcatttctgattgttttcttttattttcaattatttatttagtcctattactcattttttgagtttttctagttctgatttattttgttatttcatatcttgtatcatttttaacgtctttttacttgttttgaaatagtagattatagtttttatgttttgtagtcatgtatttctgccatgctttcattgtcaaaggctgttattctccttattctctttattcttataataaatgcaaccttgaccctttctgttgaccatttctataggagtttttttttcttgtagaaggctgggttcagaatagattttctaatttcatggcttttagctccctcttctgttgcttttgtgtagttttttaaaatgtagcaactttctttctcagatatcttggcgctgttttactcctccactttcatctgaaccttcttttgctgtgctgctatgtttggattctattcccagcagtttcttttcaatgtggggatttgtcctggaatggagctttagctggttagttttgagagtgcatggggctcacactgttccagacccgtgaaactgcctttgcaaaaattctaacactgagaaaattatggcagtgaaggagatctgagctggctaaccccatcttgcctttggccttaaagctgcccttaattattcctgggcttaggccaaactaactttgggagacatttagcttatagtttaaatgataatagcccttccccaaaactcaaccacctttgtaaagctaatgagagaccaccaggctgagaggataaaggagcctgaattctaccaaggtgcaaacataaatgatttccagcccttattttggaggtcacacgatatgcatcttccccaattactcctgcagataatatcactattgtagaacctaagattggtcttttgaggtctcttttcaggttttttgcatgtctgatatcgatggcgcca

SEQ ID NO: 137740 - DNA, 1103 bp, Homo sapiens
ttcggacattgctggaagttaaaatcactccggaatgaaaaccactgctttagaggctcacaggacaaagccagtactgcccaggaagttcttcatttcaaagagagtgactcttccccagtcttttctcgctacaaagtcaatggtagacagcctgatgtgaacacaaattgaccttgaccagttctaagtcattgccctttttctgtgccctttatactcttccctctctacaggagatttctgttttcccttcccttgcaaaccccacccctacccccaccctttcaaccatatcgtccaacgttgtgcttggtgtgaaaatagcatcctatgggcagtagaatggtagtcacttagagtgtgtttgaattttctggtgaaatccaggccctttctgctaccaaactgaactctaggccctgaggttggttggctctccattctcatctctgcttctctgccacggtctcctttgtcgtagggaaatgccagtcatagtcatatttgtggaattccatccatagttttcaaaaagtggtggagtcaggtctgtctaaatccaatgcctttgtcttgcctctacccaagtcgttctcaaacttcagtgtggatcagaatttctcaaagctcaggttcccagactgagaaaagcaaacaaaaaacaaacaaaaactagcattcccagttaaatttgaagttgaatgtgtgtctcaaatattgcaaacttttatactaaaaatttattcactgttcatctgaaattcaaactcagtgagtgtcctgtattttatctagcaactctgtatagagagtttattaaaacacggattgctgggccccatccctagagattctgattcagtaggtttggatggggtctgagaatttgcatatgctggttcagacactacacttctgagaaccactggcatataggttaaatggtgaaagacaagacgttgcatctgtgaagtcttcccctcaaagtagcaaagcagaagggggaaaatggctaaaaagaaggtaactgcctgatcagaaatccatgtgtgaagatatatgaatttttattgataacaatagcgtgctagctattcaaa

SEQ ID NO: 137741 - DNA, 1029 bp, Homo sapiens
tgccctagaagatgttattcatttccctgactgaaacagatggtagaaaatgcaactcagcttacttactgttaaaacaaaccatctttttggacttttattatttggaattttcttataatagttatatttattttagaaattttagataatacagataaaaaataaaagaaaactggcagccctactccccaggaataatcaatattaacattttggtatatattctttcagtcttttttcccttatctgtaataggaggaaaatatgcaaatagccaacccccatggaaccacttccataaggcttctgtcagattccaaatgttcccaaggcttctatagtacttatgtaacaagccacacagtggattgattactgttaatgtatgtcctctgggagttgccaaggaggctcacactttcaattactgtacatcccagatttgaaagcatatccctaactatttgtcttaaggattttaatttttttctttcttgctactggatataagtgtctaacaattctcactgggaattgattagtgagtaggtattgtcaggtaacatgattaatgctgtaataagtatataggaaactaagaactcagaaaaagaattactcattgaaattttaataataactgtcatttaagagatgagattaactatgtggagaagtggtttacaactgtgttgctaatgaaaacataggaaataaccaagttaatcaaagtgcaactttagaactgggtggtaacttaaaaaagcatttctgccctccctcagctgcaggcatctcggcacagagacagagagagagagagagagagagagagaagagagagagagagagagactctgtttgtttgggtaaaagtaagggcagagaaaaaaagtttctgtctggtaatccagagaattctttcggatctgatccaagaccaccaaggcagtacctcaatgagtctgcaagagccacagtgttactgagcttggggtgccccctaacgtagatgtgactacagtg

SEQ ID NO: 137742 - DNA, 1038 bp, Homo sapiens
ctcactacagactcgaactcctaggctcaagcagtcctcccacctcagcctcccgagtagctgggactacaggcacacaccaccatgcccggctgcaatattttatttctatcaccatgtatcttacatctagtgggggatgatattgtgtaaacagaaatattacattctagtgtggtaactgccattgcagagtggtgaacagagtgctatgggaacacagagaacagaacaatcaactatgtttaatacacattgcctgtagcatagtggttaaaagttcaggttttgaagacctatatttaaatcccaccatttactagatgacaatgctatttagcccctttaaatctcagctttttcatctgtaaaatgataatagtagttatagaattgattgaggattaaaataagctaatgaacataaattgtttagcaaaactccttgataaataatagctagtttgtctttcccaagaagacacatactaaaggatgagtaggacattgtcaggtgaggaagaaagaaaaggacattctaagaggacaggatacaatgtgtgaagacatggagacattatagggcctgctgtgtttgtggaatggtgagaagcttagcatgcaggagtttgggggtggagtagagcgtgaggctaacaacctggactgaatcctaacatgctagaccaaggagttgtgttttatcctgtaggcaccgaggagtcaaaagagtgagttttgttttgtaaagatcatttcgaaagtagtgtggaagttgaacaggtgtagaatggagagagattggtggcaggactacttagcagacgtaatagtccaagctggacattatgagagtctgaaccaagatcgaggcagtatgggggaaaggctaggcttgacagaatgatatttatgagttaaaatcaacaggactgtatgctgattgattagatgtgcagcgttagggagaagggataattaaggcaaaagcaaaagcttctagcttaggaacatggcttgcgattgtgaatgagaatg

SEQ ID NO: 137743 - DNA, 1063 bp, Homo sapiens
agcccaggacttggaggctgcagtgaactatgatttcacaatatgaaatcatatgatttcatatgatatgatttcatgtgatatgattgtgctactatactccagcctgggcaacagagtgagatcctgcctctaaaaacaaataaataataaataaataaaatgttaccctcacatgaagcttttcttagctgtctctgggacacttagttgctttctgatctatattcccacagcactttattcatatttctcttctatcacttagctggattgttttgtaacctgtcagttaacatatctatttcccatttgatcagtgacttttaaactattttagaggtcatagatgatgtactataaactgtggaatctgtctagaaaaatacacatgtacgtatatatttacacagttgttcatcaggttcatgaacctcccaaaggacatgcacagactattcacctgcattagaatcactaggaatgcttgtttataaagcaacctgagttactaaatcagaatcttttgagggtaggcctcaaatatcttgaacaatcccaccaggtaattcttttattcactaggcttcaagaaccactgtcctagcttaaggacccccatggtagacagtgagttcttgagggcagagagtggatattattgatctttagatcttatctatcctaaaatcttattgatctttggatcttgttgatcctaagatctcaccatgtaatagagaccgggctaagaaagagatcatttttagccatggtgatcagaaaaggtagcaacaagagataagaatcacctgccccatggaaaataggttttcagtaggttgagatgaagtagtggaaaacactgtaggcacagagattggcagcagcaaaggagagaggctagaaagtgctatgtgtatccatggaaccagtaggatagtaggaaataaggccagagaggcggcttatttagtcattaactaaccatctcctcccaacacactatgtactagatactatgcaaaacattgagaataaatatatgaataagacatggctt

SEQ ID NO: 137744 - DNA, 1144 bp, Homo sapiens
tgcataattgctggcaatggagtggaggagaggagttgatcagctggaaaggagccttatagctgcttctatactagtactgtatatttgatattggttgacaacagcagaaaaattatttatcaccatgctggggacttattaaattgatttctactctgaagtaatatggaggaatttaatggttactcttagagatgtaatatttctttatttttcattctagcagccatcagaaaaaaaaatcacaaaaaatctattgcttgtacagtcctgtcatttgtgacctgggatattgtgctcttgggctgtcagaattccagtttatgaggcaatctgtgtcattctggtttagccaggtgagtagtcctctggctctgtagaaaagaacaagaaagaaaaataataaaaaaggggaatgtggaaaaatatagatatgaatcttagaccctagaggacaagttaaggcctgggttacaagcagcaaaacagagaggaggccccgggggttatggacacagtcagtagagtggtagtcattaattataaaaaccgagagaactaggagaactaagcctgtgtggggacctggcttgagttcaaaaatgaagaagcttacaatgaactataataaaaatatctgtgaaggcaaggttaaatagaaaggaagtatgctttcaagttaaaatgaatagaagcccaggcatggtgactcacgcctgtaatcctagcgctctgggaggccgaggtgagaggattgcttgaggtcagaagttcgagaccagcctggacaacataatgagaccctgtttctaaaaaaaactttttaaattagctggaaatgatggtgcactaatgtaatcccagctacttggaaggctgaggctagaggatttcttgagcccaggaatttcaggttgcagtgagctatgatggcaccactgcactctagccggggcagtagagtgaaaatatctatgaatatctgtctgtctcaaaaacaaacaaaaaacccaaaaagacccccaaaaaactaaaaatactaaaaatggatagaagtttaattataggctgggcatggtggcttgcgcctataatcccagcaatttggaaggctgaggtgggaggatcacttgagcctagg

SEQ ID NO: 137745 - DNA, 1042 bp, Homo sapiens
tggtgaaaccccgtctcaactaaaaatacaaaaaattagccgggcatggtggcgggtacctgtgctcacagctacttgggaggctgaggcagaagaatggcatgaacctgggtggcggagcttgcagtgagccgagatcgcaccactgcactccagcctgggcgacagagtgagactccatctcaaaaaaaaaaaaaaaatatatatatatataaaatatatagtatattatatatataatatatattatattatatatataatataatattaattatatatatatttctctagacagtaaactaaggaaactttttgaaattgttttgtttagatctcagtgaaatttgggaactgatattggtagctgggaagtaatttgacagctttggaatactgtgactatgacaaatgtgaaattggtatgtgtgataaattattaatgccaccaatagaattaaagttgactatagatcataattttggtaagaatgcagtttagtatcaaacagatttttccttgggctgtatccagtatactgtgatgaatttttgatctatttgtaattagaaaattggagcttaaaaaaatgtattgatgctgggcatggtggtgtgtgcctgtagtcccagttactcaggagacagaggcagtaggatgacttgagcccaggaatttgaggctgcagtaagctgtgattgcaccactgcactccacgctgggtgacagagtgagaactcatctctaaaaacatgcattgactttttggaatgacctttttatattcttttccaggactatttgcaacccacaatatatataggactactcaggatctgctttagtgtgagggttccatcttaattaccctagctatatttgatataattttatctttgtataaataagatacatagctagaagcatagaagagaaaatgtaaagcaacaatgagagtgaatcagagatgtagagctccagttaagaaaccctaagaatattaattgccggatgataatctggcacatattgagttctggc

SEQ ID NO: 137746 - DNA, 1088 bp, Homo sapiens
gtgattctcctgcctcagcctcctgagtagctgggattacaggcgcatgccaccacgcccagctaatttttgtatttttagtagagatggggtttcaccatgttggccaggatggtctcgatctcttgacctcgtgatctgcctgccttggcctcccaaagtgctgggattacaggcgtgagccactgcacccggccactaatttatgttttaaaagatcattcttaagtgttcttactacaaaaaagtatgtgatgtaatgcatatgttacttattagctcaatttagccattccacaatgtgtacatatttcaaaacatcatattgtataccataaatatatatactttttatttgccaactttaaaaaaagaacattctgttaggagtggaggatggaagggaagctggtgaccaggagtatataattttactcagcagtactttgtaagcaggaatggagaatataaatagtttggttgatttgtgggtgagaattgacataatagggatggtggaaaatcaaggggataggagaatagggagtgttggttactgttattgaagtctcactgtccatggactctttcctaagtagacaaggaaatgcagtccaaaagtacatgatggcaatggactttagggactcagggggaaagggtgggaagggggtgagggataaaagactacaaatatggtgcagtgtatactgctcgggtgatgagtacaccaaaatctcataaatcactactaaagaacttactcatgtaactaaacaccacctgttccccaaaaacctgtggaaataaattttttttaaataaaggaatttgagaccccccgccaaaaaaaaccaaaaaacccaaaagtacatgatggctttggaaaataggcaagagggttaatgaattaaaggccttgaggcagtttaagggtaaattcagggagtataaggtttaagagaagtagaacaacaagtagttctgagagtggaccctctgtgtttggttttggaagtagagccattccaagtgtcactccagcaacaaataattgatacctggcaggggagataccatgatcacaa

SEQ ID NO: 137747 - DNA, 1332 bp, Homo sapiens
aatcctttcaggtttatttgctaaatattcactggatccatatacttcaccttttttcctaatgccactaccctggtccaggtcactgtcatctcaaactttattgcaactgtctcctaattcatctacttgcccccactcttattttaccctcaaatcatgtcccacactatagccagagaatatattctaaaacaaaaacccttcagtgacttcccagtccccttaagagaaaattcaaaattctttaagtgacttacaaggccctacatctggctcctgcatcagcttcatttatcaccactcctcatctcacactctgtacctcagcaattctaaattccattttcaatgatcggtatatgccatgctctctttctcttgaatccaagccctcatacatgctaccccaatgtctggttggtccacttttagtgatactatggctgagcagtgtgtacagattgtggacagcttaatctttctattttaaaagtccttattgcctttctcatctaccctcattgttagaaaggcatcctcattgtcttagcatccactgatgatcattatctgaattattagtttcataagggtattccaaatggtgattttcctagttctgtcattccttctacactattttttttttgagtcagggtcttgctccgtcatccaagctggagtgcagtggcacgatcatggctcattgtaacttggaactcctgggctcaagcgaccctcctgcttcagcctcccaaagtgctggtattagaggtgtgagccacctcgcccagcttcttctacaactattaactgaaattcttctgtaaataattttcccttaccaactaggtctttttggtatcctaaaataaccatttgtacatgatgagtagaataaatgtttcttttgtgaatttttctttgtgcatatttttttgtgtatttttaaaaatttaagtatttaaattagtgatttgaagctttggacaattttgtcagagaaaccatttataagtagtggttatgtttccagaatagcagataaaaacttgcttaatccacagggtcaataaaatattacacatagcaataacaaatataaaatatttttgtaatattagttatgaaatgaaagaaaacagtttttaaagtttaacttgagtaccagtacttgagagaaaagcaatcttaattagaggaagaagaggtagatggatacttatggtgatgtgaagggatctgcagagtaatttcaaggacttttagaatttgacggcattggttctttttttttttttttttttttttttttttttgagacagagt

SEQ ID NO: 137748 - DNA, 1362 bp, Homo sapiens
gggagcttcttcaagctggtttctgtgtccattgacatgcctccatcattctttggcactttcttactttctgggacaacaggaatatttcaggcttatcatgtattttcctggccctaaccttggaatcagctatttctccaaggaagcctggctcccttaagtggggaatgatatttagcaaccaggatctctgtgctggggtatacttattgctactgaggtgtcatcactttggggctcctttagctgagagacctaggatttatcccaggcttttgaatcccttccaatatctccaccaagtgagtttagatctgtgcttgaatacttcattatttgaggaaattgctcgagagacagtctccttcattattgggcaaccctttatatttgaaaacagtggccattggtttcctctactaagtcttgtcttctctgtgctaaacatctgcagttcctttactgccattactctcatggcagagtttgaagatctcctcatcattctggttattctgttctgttcatacttcagctcatgaatatctctctttaaagattggcatctagaatgaaatgtactatttcaggtacatgttctgatcagtacagaagagtgggttagtgattttctttgttctagaccctatgctactactcatgcaggccaaaattgttagcttttttttcttttcttttcttgttttttttttttttgacagccacattgatcactctgttgaattatgttgagcctatagttagttgaaatcactaagactaaaaactcaactatatttatccatttggtacttaaatgcttatgttttaggacctagtatgaggctttaatttgatctctgtcttttcagcctaagaaatttagcttatcattcctgcttgtcaaacttcttttgactcctgaatgtcatccagttgtactagcttcttttccagtttatcatctgcaaatttgattagtatgccactaagtgtcttcatacaaatgactatcttaaaatatcaaaaaaggcagagcggagctcaaatatttgcagcctgactagacacctttcctatgttgaaatcaatccatcaaataagggattgctactgttcatctactttcacctgctgttgtatataggatctgacccaacagacctgtcacaatactaccttgaaccaatttctagtgttttcctgggattagtgtttcaaagttatagggaagcttgtttattgtaaaatggggacctttcacacagtccaaacgtgctattcttgagtggagatcgtcctggtgtggcttggtctgtgtcctccttggtgccagaggcaaagagaaatgtttgaggc

SEQ ID NO: 137749 - DNA, 1037 bp, Homo sapiens
acaaaagtgcctattttgttaaaatgttttattgtgataaaaattcaaaaattattaatgttagccaacaaaattcaagcaaaacataaatgtgtaaagtaaaaagtgaaagatttttccttagtccctctcaccactcccattctccaagaataacttaatttggtgtgtgtcttcccagatgttgttctgtttgtgtttatatattaatatacacatatatacatatatgaatacccacacatttgtatataggttttttttaaatgaaatgggatattatatgtactgttttgcaacttttttcactttgcattgtattctggacctcctcttgcattaatacatggaaatttacctcatttaaaaaatgactgcataacatttcatggtatggttgtatcacaatttaatgattcacctattgatgcaaatttgtctccaatcattcactattataaataatgctacatataaccttgctccagtgtgtaagtatttctgtaggatagattttgagagaaggaattgctgggtcaaaaggtgtgtgccttttactgtgtgtgtgtcttttactgtgtgtgtgtgtgtgtgtgtgtgtgtgtgtgtgtgtgtgtagagatgggggaggggggtggtctcactttgttgcccaagttggtctcgaactcctggcttcaaacgattctcctgcctcagcctcccaaagtgttgggattacaggcatgagccactgcgcctggcctcattttacgttttgatagctaaagctaaattgctttcttaaagaatgcagtttaggcttccagtgacagcaaatgagaatgtttccccacccaaagtggggaaattctgttcacaaaaatttccttgccaaaagtggtaaaaatttaaataattgataattatccaaactatttggtgaaaatcatatttcatggttttaatttgcattttctggtacatttagttgtaatgataccactgtcaggttttagtttccccacacatttacttttggtcgttctagaggcagt

SEQ ID NO: 137750 - DNA, 1026 bp, Homo sapiens
ctaccctttgacccattctttgagacaaggaattaagccagtaaaggtgggagaggtggataacattcaggcttctctggagttgatagttatcctacatgagatacttctatgttgaagatattcctacttctatgttgaaatatatgctgtaataatttaagtaaaattactttcttttgtggaaatgtagaacagctgctcactgaaatggatatttcttcatatccttgaaaactgttgagtcacccttagtattctcttcttagatataataagttctaatttttccttacttggctcatttttaacccttttatctttttattattctgaaatctctccaaggccctcacatgtcctcaagttgtagagtcttaaattggacaacactttaattacagcctgaaggttaggtagttgttattccatttatatatcttagtatttgagtttacttttgaaatataaagtcttagtgactaatttagcatgtggttctctgccactcccttcctgaccacccaccacccctcattcttatcttctttttttaccttgtttgtacaaaaaccagttgttgcctattttatttcttctgtccataccctgtctgtctatgcatttaaaaacagagaactcattccttataaaacagacaaaccagggataattgtcaacatcaaaaaagaattctttaaatcactgcaggcttcctttaaataggtgtttcctgtggtggttttaagtgtttttatataggtcatcaactgcttgatataaagaaactaaagataaagggttaagaggcagtgccagttgaagaacagttagaaattgggataaaacagtagttcttaggtaaacagtaaaatacattcagattcacagaaaaaaaatatgtatatatatattttttgagatggagtctcacagtgttgtccaggctggagtgcagtggcgtgatctcagctcactgcaatctctgcctcccaggttcaagcgatcctcctgcctcagcttccc

SEQ ID NO: 137751 - DNA, 3184 bp, Homo sapiens
agaggtgggaacccacaggcagatgccctttgcttggggttggggtgggtgggtggggggattagactggaaggcaatttcttgggcatttacccatgccagaaggctaacctggggggaggggggcgcttgtgctggtgaggcacttggatacatactgatgctgcaagttcaggggatttttcttactcttaggtttaaccaagaacactgagcagggaaaaaccctgcctttcctaactgcatgtattttttcctttttggaaaggtggtagagactcagaagctttccttgttttcttcaggcctgctcccagttttcttaacagtttcttttgttgctttctctctcccttgttgctttccatggcagtaatcctcctagagtccaagcagtctgttgtatggagcagggtgtgtgggttttctgggcccatcattatggctgcttcagagtcagaagaaagccatagggcagtaggggagctcctattgcctagcccctctccctttgtggctcccactctagctgcctatttttgctcatcagctggtgagtcagtatgggccagcagttctccctccctaagcccttgctactttatgggttagctttgcaggtttggtggcttgaggggtgggggcaactcaccactgccaggtaactccctgaagggtgggagtggattatcttctaggctcttacccgcggtagggaagggcatcaacactgtcttccttccattctcctttcccccatcccatttagtgctgccacagggcagaagcacacaaaccaaccacacagtctctgacttctcctaagcactttgagttgttgaatggggctcaggggcaagagtttttgctgccctccccagcgtggtcacagggttattgaactgcctgcacttgtttctcatgcaactccagcattttccccagaagttgaactatggatagcagcttggtatggatttcctaaatcttaacatttgaagcagcttcttgaggctggcaactatcctggtttctgtcttggagggggtggtttgtttgctggggcccaacgtctgtcccaagtggtggggtgagagtaagttaactttggtgccaggtgagaggtgggggctctttgcttagactccctatcatggaaagattggagttttctatgcagggcactgtggaaaaggattgctgattctgactgaccctgatcagagagattaggattgtattttgacataggatttggaacccatctaaatgttgaagttccctgagacagctctccagctgctgagcctgcgccaggggctaagcagcccctaatgagaggctctgctccctttcccacctcgccaatgttgttgttgctgcctttttgatttgtatcctctgttatagacattttttaaaaacgatttcctctttcattgtgcacaagtgctgagagtctgaggccccatttctgctgtgtatatatatcctgactcggggcttttattcagcaaactgttcattcttctgtcagacaatgtcatattcaactctgttcatattaaaccactgtgaagcaagcctctgttttcctgcttaagttgtaaatttagtattctttagtgtctaggatatgctgggtattatgcagaaatcatacagtgtggccagtgtcctgaggtaatgttttgcatttaaatttttttagaaagcagaatcttaacttatcttaatgatatttacctatcctttttgcaactcacaactgactttgtcacagaggtaatgcatctgcttgcaggaagtagctgtaggctcagtacctgttgtttgagtcagatttagcagatttggtttttaagcttgtgggtttgtgctaatttgggcagaatatatttattatatatgtgtgtgtgtatgtgtgtatgtgtgtgtctgcatatgtaatacatgtacataaacacacatgcatgtgttcatcctctgacacacccacacaacaccaacaaacatttcttctataggctttttatctcaactgacactgttttttttcccaaataaatttgacacaggcagaaaggtgggtgaactctcagaacttttggtgggtggatattcatctgaccagtgagctctgaaatggtttccctacacagagtgggttttggcaagggttggaatgaggggaggtagcagtcttgtcatttagaaaatcaaagctagttttgatgtagctcaacatggaaagaaggtacagaaagtgatgtgttcaaaacattagcaaattaaggctgaatgtggttggctcatgcctgtaatcccagcattttgggaggctgaggcaggaggattgcttgagcccaggaggttgagactagcctgggcaacagagtgagacactgtctctacaaaaaatttcaaaagaaaaaaaaaaaggaaattaatgttacttagcagtatttggttctaagtagaagagtgggggctgtgaggaagttgaggtttttggtagttcatgaatgagatgactaaaaatatctgaggggatagggaagaatgggtatttctgtgaaataaaggaaaggaagggtaaagagagatgcaaccttcataggcagcagtgttagagaatgaactgcagaataaatagaaaagcagctataaaataaagtgttaacaaaaatttggacagatgacaactcatttaacaagtgctaatagtcttctgtgtgtctggtcctatgctaacagcagggctggggatagggtggagtggttgtggtacaagtaaaatatgatattacattctcttttttcgtagaccttaagagttcagttgaagagatgtttagctgggcgtggtggcttatgcctgtaatcccagcactttgggaggattgcttgagcccaggagttggagactagcctgggcaaccgagtgagatctcatctctacaaaaaaaaaaaaaaaaaaaaattaaaaatctggccaggtatggtggcacatgatagtcccagctacttgggaggctgaagccggaggattgcttgagcccaggaggttgtggagtgagccatgcagtgagccatgattgtaccactgcactccagcctcaaaacaaaatgaagagatgtctatacaaggcaggaaaatgctagagacagagtaagagattca

SEQ ID NO: 137752 - DNA, 1070 bp, Homo sapiens
ctcctggattcaagtgatccttttgcctcagcctcacaagttgctgagattacaagtgtgtgccgccacacctggctaatttttgtatttttagtagagacagggtttcaccatgttggccaggctggtcttgaactcttgacctcaagtgatctgcctgccttggcctccaaaagtgctgggattacaggcgtgagccaccaagcctggtgaaaactcttatatgtacatatttacatactactgcaagtctacttgtaggataaattcaaagcagcaagggacttctgatcatcagctatgataaggttggatgtggtaagggttggtttttacctggtggtgatttgaaggggttataggagcatgatccataggagctatttcttcattgggacctgtccaagttactcagacaggtggctaccacaggctgaacattaccatctttcttctttaatttttccttccatgtagacaaacctacctatcttcaagctaaaggagtcctgcgtacggcggcgctacagtgactttgagtggctgaaaaatgagctggagagagatagcaaggtatggctttgttctctgtgtggcatctttggaggaggagctctgcataggctgagtgggcatacaaccacagtctataaagtcttgaagggaatgaagagggtgaacacattcttatccatcaaatctcagtattttagatcggggggataccttttgaaacttgaaagtggtaagttctggctgggcacagtggctcacgcctgtaatcccagcactttgggaggctgaggcgggcggatcacctgatgtcaggagttcaagaccagcctggccaacatggtgaaaccccgcctgtactaaaaatacaagaatcagccaggtgtggtggtggatgcctgtaatcccagctacttgggaggctgaggcatgggaattgcttgaacctgggaggcagaggttgcagttagctgagatcgtgccactgcactccagcctggatgacagagcaagactctgtctcaaaaaaaaaaaaaaaaaaaaaagaaagtggtaag

SEQ ID NO: 137753 - DNA, 1897 bp, Homo sapiens
ggctgctgcttggagcaaaacaaaagggaaacccggggggcggggggtggggggggttgataggggaatcggtgcgggaataagggaggccgcagccgcggggacccggaccctagtaagagtggcgagaagggaagaggcgggggaagggggagtcaggggaggggcaagtgacgcgggggagcggggcgtgggggagggcagcaatccgggtggaggaaatttgggaggagtgtccggggggcagcaacttaaaagggggagggaactgcggctaaggagacgttcggtgatgggagcgcaatatatgaggggatacagtgcctcaggtttaaaagagcaggaagctgagtgagaggttgcagaaaaagtgtcttcgctcggcagaggttacaggtggcatctcagaaagagctttgaggctacaggctgtagtcgggaaggggatcggagaactgtgtgaagggacagcttagggactagcgtcctgggactagggggaagttcgcgactttctgaagactggcaggaatgtgcctcctggccctcgatgcttcccccctgaggggaggcatcgtgagggactgtggcaggcttcactgaacgctgagccggggaggtccaactccacgtatggatccggggaatgagaattcagccacagaggctgccgcgatcatagacctagatcccgacttcgaaccccagagccgtccccgctcctgcacctggccccttccccgaccagagatcgctaaccagccgtccgagccgcccgaggtggagccagatctgggggaaaaggtacacacggaggggcgctcagagccgatcctgttgccctctcggctcccagagccggccgggggcccccagcccggaatcctgggggctgtaacaggtcctcggaagggaggctcccgccggaatgcctggggaaatcagtcatatgcagaactcatcagccaggccattgaaagcgccccggagaagcgactgacacttgcccagatctacgagtggatggtccgtactgtaccctacttcaaggacaagggtgacagcaacagctcagcaggatggaaggtaattatgaccctcttaccttcttcccaacaccatctaccccctggaccccctagcctcccttacttctactctggggccccttttactacctcccacccccaccccctttgggaagcccagagatccaccttcaatctccagttagacaaacatttacttagtacatagtatatgccacactcggtgcttgatgctgaaggatcacagatgaataagacactgtccctgccctggagaaaattgaattctctgctcactgctcaatattcgcagcactttggcttgggctgccccaaacacttattcccacagagaagtctttatcctatgtacagcaggaactgtgtggattccccacatgaacctacccttccctcctcccccacctcccaccccaacaccttttctcccattcctgtgggattacttggattccctgcttgcctcccagtacctcagtgtagtggtactgttctagcactgctctacccaggaggagggagtgcagtggcaaagggtaaaaacaataatattcatggggaaaggtagctgatctcatgcactaagaagaaaaagggctgtgagctgccacttggctcagcttaccctgtgctgccaagaaactctcccttgtaaggggctatccaagttttggggggaagtcatcctttactgttaaggaatattagtcatgaagaaggaggtagggctctgactttagagcacaaagttgggagttctcttggccttctgtgaagaaactgtgagagaatatctcaaaggatactctgaaaaacttgtcctgaga

SEQ ID NO: 137754 - DNA, 1895 bp, Homo sapiens
ggactggacttcaactttgagccaggtacagtaccccctaatcaccacagcacctcatagcctattaccactcctaggtgcccagctagtcccatgatctgggcgaaggggagatttaggacaagtggtagccagagctcctggggaactggagggaagatgtcatattacagtagcatagtttccggatgggacctccaggccccttagctgtgcccagccctgcaaggtagcacagaaaaggtatgtgtatggaagcgggttaggtgccaccatcttctttggtgggaatctggatgatagaatgttggcaagccccaggtaagcctcttaccttgttctctgtttcttcttcccacagatccctgagtcatgcctggaagctttgtcccctgcttcagatgtggagccaggcgtgttcatatctactctttacccttgagccctccccaggaatttgggaccctgctttagagctagggtggggtctggtcacacacaggtgttgaagaaattataaagataaagctgccccatctggggacgatatggggagggagatgggaggggaaaggggagagggtttttctcactgtgccaattagggggtaaggccccctctcaggagccatcatcggctttccccattcctacccacttaggctttgtagcaagatgagcaatgctgttggaaatgtgaagtcaccagtggccttacccctgcctttgggagcaggatttttttgtagagagtcttatctgagctgagccaggctagctggagcctgggatttctatgcagtggccccttaggccagtgatgtgcggtgggtgggctgtttaggggatctggaagggccaaggtctgagcactggagtggctcgccaggccaaatcacccttagaaggctgcagataacagaaaggctttttataaacttttaaagaaatataaacacaaatatagagattttttaaccatggcagggtgctagtggtgggcagaatgcttttttttctttctgaaggctttgtgatagtgacatgatacaaacactacagacaataaatattaggagacacagggaagtggggagaggtggggagtaatagtaaacacagggaagagctcccctacggaccaggtatagagaaaggtctatgcagaaataggttagagtttccctaacaaaaaagctaacccaggtcccctcattccttcaacttgtgcctgggagtgtgtggtgttagggtgcagccacactcttctatgacccagcatgggttagtgctatggtgggagagtacattgaaggcctggaattagcttggggccagggaagggactgggaggggagagaagagaaggagggaaggatttaggatggtaaagttaggtacagagacctccctgttcaaggcccctgacagctgtccctgcccttcttccccttccctgactgcaggggttatgtggaagtgtgtgtggcagcaggcagcggggaggggaggaacagggaagggggagctggggagcttggctgagggtctgggaaatgagcagggatggggggggatgtggatcaggtttactagcacctgccagggaggccatctggggctccttctccaccccagcccccaaagcagcccttcccccagtgccctttgcatcgtcccctcccccacccctgctgtgggttcccatcatttcctgtgtcagcgcctggcctacccagattgtatcatgtgctagattggagtggggaagtgtgtcaaatcaataaatgaataaattcaataaatgcctataaccagctctggtttctgctgccttgcttctccccttggataagggggagggaggggaaaaggcaaagggcgggaggaagaaa

SEQ ID NO: 137755 - DNA, 1006 bp, Homo sapiens
tggggtccaagtgaacgtaagggcccagctttaagtaacgatctgttctacacggaaccctcctcctgccctttcaccttgttccttcttttctcctgccctactctcccaccccttcccccttcccctaaggaaaaaacaactaaacgccgctttcctgcctcaggatgaactgacggccttgaatgtaaaacaaggtttcaataaccagcctgctgtctctggggatgagcatggcagtgccaagaacgtcagcttcaatcctgccaaggtgagacaactctgccaggctgaaggaaaaggctggaagaatctaagaaggagcaaaggccctgggttgggaagacttatagggacaacctaagtggctgagtttgccttcatgacctaatactatctcattggcatttgcccagcaaaaggcaggaccacctgtctgccccttcttcccaccctgaggtacacttttcttccctcagatcagttccaacttcagcagcattattgcagagaaattacgttgtaatacccttcctgacactggtcgcaggaagccccaagtgaaccagaaggataacttctggctggtgactgcacgatcccagagtgccattaacacttggttcactgacttggctggcaccaagccactcacgcaactagccaaaaaggtaaggtactgtttcctgtccttcaggccaaggagggagcatggggtaccaagtaccctcctattcccatattaagctacatgggtgtcagctcatggggataatagagacctcactatttgcaatgtccatccaggtccccattttcagtaagaaggaagaggtgtttgggtacttagccaaatacacagtgcctgtgatgcgggctgcctggctcattaagatgacctgtgcctactatgcagcaatctctgagaccaaggttaagaagagacatgttgaccctttcatgggtgagtaactcctaacaccaggtgtactgctgatggcttcaa

SEQ ID NO: 137756 - DNA, 3658 bp, Homo sapiens
cccttgccccatgatgtagaggtggcaatccggcagtgggattacaccgagaagctggccatgttcatgtttcaggtagagagtagggcatgctgtgtggggcattgggttgagcttgaacttgtactctgccagtagagaacagaatctgcctgccaccttgccccagttgtggttctcttcatcttttcatttactttatctgcttcatctctaatagtcccctcttccctcccctggtacccataggatggaatgctggacagacatgagttcctgacctgggtgcttgagtgttttgagaagatccgccctggagaggatgaattgcttaaactgctgctgcctctgcttctccgagtaaggcttggaattttggtactggtggggcagggggagtctaagaagaatttgaggaagaataaaatgttagagcagggtcccctggagagaactaggggctctgatggtcgtgtcttcacagtactctggggaatttgttcagtctgcatacctgtcccgccggcttgcctacttctgtacacggagactggccctgcagctggatggtgtgagcagtcactcatctcatgttatatctgctcagtcaacaagcacgctacccaccacccctgctcctcagcccccaactagcagcacaccctcgactccctttagtgacctgcttatgtgccctcagcaccggcccctggtttttggcctcagctgtatcctacaggtaggtactaggcgggcccaaggaagcattgagagatagcctgagaagaatcaggtgcccatcccagagaataggggtaattccaaattggatgtgggagtaggtgctgagtacttgcttggaggttgttgtttcttggtaatggggtgttagtcccctttgggggttttcaccagcctctctctcccttccaaggctaaatagtgggcccaaagccttttaggaaagtgagtgaagggaggggatcggggtggagtgatgcctgtcttggggacccagtcagaataactttggatctggaatctacgggttgggtcttagaatgggattccagaggggtaaccatggtgaatgagttggacttagctgtttctatctggtagaccatcctcctgtgctgtcctagtgccttggtttggcactactcactgactgatagcagaattaagaccggctcaccacttgaccacttgcctattgccccgtccaacctgcccatgccagagggtaacagtgccttcactcagcaggtatgtctgaccactagcctggtactctcagattgggctatgaggctaaattactctttcagaagtagtgatttggagtctagtactattcttctagcctggggctctggccttttatatgccttggtacatccttgtagccttcctttttaacattgcaggtccgtgcaaagttgcgggagatcgagcagcagatcaaggagcggggacaggcagttgaagttcgctggtctttcgataaatgccaggaagctactgcaggtatgtgtcagagaacagataataggaaatatgtttgaggaaaggatggggatagtaaggacatgtagatctaagagccagaatgcaccgggcctctggttcagtcccctttaccacttttcctccttaggcttcaccattggacgggtacttcatactttggaagtgctggacagccatagttttgaacgctctgacttcagcaactctcttgactccctttgtaaccgaatctttggattgggacctagcaaggatgggcatgaggtaagcgaaaaggggaatagaaggagcaaaaaacattgcaagagcaataatatgtctgagagggaagtcatggtgaggcattgaaagcagagcatatctgcagaaatgatcttactgggcccaggatgttttatgatagagcccagtctttaggaaattggaactcatttctttgtccccacccctaccttactcctccttctcttcctttgttctccagatctcctcagatgatgatgctgtggtgtcattgctatgtgaatgggctgtcagctgcaagcgttctggtcggcatcgtgctatggtggtagccaagctcctggagaagagacaggcggagattgaggctgaggttagagggcagagataagagaacaagattggccaatgggaaggaatttactgcggttggagaccgagagatggaggtggtggagggaccagagttgaaggtgtgagaacagagtaaagaagcaaaagagaacctaaaggcaaagttacggacgtgaggcgaaagtagagaagagtggattgtagtaagagttagagataacatcaaggcttcagttgggaggtggtaaagaacatggaggtcagcaggggaatgaaagtgaaaagcatggggtagaggtcaagcaggtggtagtttaaggcctacacattgaggagtgaagaagcaggtaaaagtcagttctacaatttgttctgtcatcttgcagcgttgtggagaatcagaagccgcagatgagaagggttccatcgcctctggctccctttctgctcccagtgctcccattttccaggatgtcctcctgcagtttctggatacacaggctcccatgctgagtacggacccctaccactctctagttacctctgcctagactcagttacccaccactgtcatcagaaagcataattaacagccctctggtctatatttctctcttgggctctatgcagaatgacttttagatgtagttctagtgatcctctttaactggtcatcttacagttaaacagagtagagaaatacagagaaggataaaaacaagagcttgtgattgaagcattttcactgcataaatcgcaacaaagatgttacattcctttctgagatgatgtgtgggacagcatgtggggtaaccaaccacactttgtccctcaacaatttctgggatttctatttgatcactcttattattgccttaggtgtgtccctctctcttttggcccacctttttgtgttctcctaacttatgtttcctcattcccttcctccagcggaccctcgaagtgagagtgagcgggtggaattctttaacttagtactgctgttctgtgaactgattcgacatgatgttttctcccacaacatgtatacttgcactctcatctcccgaggggaccttgcctttggagcccctggtccccggcctccctctccctttgatgatcctgccgatgacccagagcacaaggaggctgaaggcagcagcagcagcaagctggaagtgagtgggcttttccttgcactagatcgtttcttctgacatttccatcttcatggctcccaggggcctctaagagcctcttttgcctgggggaggggggtagtatttttcttagcacttggtgattgaccaagcactctcacatcaattgtttcattggttcctcccatcagccttgtgaggtactcttatccccattttcaaactgaagaaaacagaggcctatactggttaagtgattggatgaggcttgactccagatcctgtgctttccccaatctggtcttctctctccacttccccaatgaagttttacagatggtgggagccactccctagggctaaag

SEQ ID NO: 137757 - DNA, 1042 bp, Homo sapiens
ttgaggacatggagaagcctgatttctcagtaagttcaatcctgagcgtggcagaatctggatccttggatcttcccattatgcctgcttttggcatgtttttttgccccctcatccactttccttcttctcatgttctgctttctcacctttctctcagttgttctcccctactatgccctgtgaggggaagggcagtccatcccctgagaagccagatgtcgagaaggaggtgaagcccccacccaaggagaagattgaagggacccttggggttctttacgaccagccacgacacgtgcagtacgccacccattttcccatcccccaggtactattccccagcaccttgtgatgatctgttttgaacccagattgctgtcaaaggaatttgctgaggggttggagctgttctgaggatgtgggttgggaaagggaagggctttagcatgtggatgctgaggggtgtggagcatgctttcaagaggagggaaggagatcggtgctggagtctgatggtgctgctgggatgcaggaggagtcatgcagccatgagtgcaaccagcggttggtcgtactgtttggggtgggaaagcagcgagatgatgcccgccatgccatcaagaaaatcaccaaggatatcttgaaggttctgaaccgcaaagggacagcagaaactggtgggtttgaggctccttaaacagatctcccccaaagaatgccctagtcagtcttcccttccccagtatagggaactccccagtcatgtcccaatgtcctgtctcttggagtctcctgagagctctagtccttttgaaacttcccccctcattccccccctctacagaccagcttgctcctattgtgcctctgaatcctggagacctgacattcttaggtacctcacagtaagccccatactgccctccctccctctcccttccctccctgaacctagcacctccctgtacatattcctttaaggtccacatagtctgtggtcctctaaacctttgcttcactgtccccttcccttcattcc

SEQ ID NO: 137758 - DNA, 2516 bp, Homo sapiens
ggtgtgggcctaagcccagcccctttcccacattctggcctcctgttctgttttccttttcttccctatcttctccctgctaggcaggctaagcctcctggtctcatccccttccagtgtcatcctttcctccttccctggttctttcctctctccactcccatctcactcccactgcccttatcaggtctcccggaatgttctggagcagatcacgagctttgcccttggcatgtcataccacttgcctctggtgcagcatgtgcagttcatcttcgacctcatggaatattcactcagcatcagtggcctcatcgactttgccattcaggtggggaagttggggagatgagggtggaggcaggagttcatgccatatagcggctacggagggtcataaggacaggcgtagaggctccagccagtttcccaagctatttgaaggggcagaaagactagcatggggggagtggaacatgagctaagactgcaggaatagagacttaagtgctccctggggaggccaagaggcagattagagcattgggcacagaccatcctcccactgtggagttcatagaactgtatcctggacactggttagaggtgttgttgatagaataaactatcaacaataaactatcaatagaggtgttgttgatagactgtggcatagggtaacgagcccttctatcctgtggtggctccagcaggaaggggctcaggcccagccttgccagcgtccccacaggaaggtggtttctatgtaacacaaggggcctctttgcatttctcacccccgtttactctgctagctgctgaatgaactgagtgtagttgaggctgagctgcttctcaaatcctcggatctggtgggcagctacactactagcctgtgcctgtgcatcgtggctgtcctgcggcactatcatgcctgcctcatcctcaaccaggaccagatggcacaggtctttgaggggtaagcagagcttcggaataactgaaacaaagctctggcgaatgccggtggaagtggcctgggaagagcatgcacttcctcacactctggggaagcacctgctgctcaggtgggaaaagaatggtatttcccagaggcttgaatctgtttggaggagcccgcataccatctgctgaccctcccaaccttgcttcttcatgcaggctgtgtggcgtcgtgaagcatgggatgaaccggtccgatggctcctctgcagagcgctgtatccttgcttatctctatgatctgtacacctcctgtagccatttaaagaacaaatttggggagctcttcaggtaagagaggtggaaggtaaggggtagcgagtgggacctactcccttcttcccatgaccacccaactcaggaggagaggatggcccgggaccctgctgcctgtctagggtcatttgtggactgtgtcctccacatactgttgtgttaccaagagtgggccctcttcctcagcaggcttgctccccgcctatatctgtggggcccaccctcttcccccttttcctcactgccttcagaggccccagttccttattcccatgtggttcctttcctgcccagtctgttttgtcccatctcccttttcttgtctcaagatccttcatccctcactttctcctttttttcttttctcccctttcctgaccatccctcgacctcagcaggccttcttcaacactactatctcctttcctccatccctgcagcgacttttgctcaaaggtgaagaacaccatctactgcaacgtggagccatcggaatcaaatatgcgctgggcacctgagttcatgatcgacactctagagaaccctgcagctcacaccttcacctacacggggctaggcaagagtcttagtgagaaccctgctaaccgctacagctttgtctgcaatgcccttatgcacgtctgtgtggggcaccatgatcccgataggtatggggtgtactgagtgaggaagggcaccatgcccccatctgagatagggagggctgaggtacccgggaggtactacaaccttgattatttagtggggcagagatgagaagttaatgggtctgaggttttgtggagcaaggtttttcctgagggcatttgtacttttccctagggtgaatgacatcgcaatcctgtgtgcagagctgaccggctattgcaagtcactgagtgcagaatggctaggagtgcttaaggccttgtgctgctcctctaacaatggcacttgtggtttcaacgatctcctctgcaatgttgatgtgagacttggggtggggttttgctagtggggcagtgaccagggcagggggctggttgtgatcctctgaccagggacagagttccgtagagtggaggcacaccgctttgagtgggcctccacactgagtcatggtgtctgtctgttttttcctccaggtcagtgacctatcttttcatgactcgctggctacttttgttgccatcctcatcgctcggcagtgtttgctc

SEQ ID NO: 137759 - DNA, 1369 bp, Homo sapiens
acctgttttttagccctggatttgcagccctgacctttccaatttctgacccttcaactgcgtaacagttctctgctctacctcgctttcaatattatcttgctttttctcctttcactttacctcatcttctctcccatgcccctgccatacacttgcatgcatgcaggcacgcacacacataaacccacatacagtttaacttcatcccttccagatctgttttgtcttccttttagcttgtagtgaacaggactctgagccaggggcccggcttacctgccgcatcctccttcaccttttcaagacaccgcagctcaatccttgccagtctgatggaagtaagtgaccctgatctgaaccagccaacagtagaaagtgtggttcccctgcctccgtggattctacttttgcttcccctgacttcatcgccttccccagacaagcctacagtaggaatccgctcctcctgcgaccgccacctgctggctgcctcccagaaccgcatcgtggatggagccgtgtttgctgttctcaaggctgtgtttgtacttggtacgggggtaggaagggagtggtgccagaagtgtgtatagggtggagtgccagctaaactacaagggacagtctttctcccttctgaaggtggtctctctgacctttggggaggaggggagggagagaagtatatttctgtcccatagggcaggatttggggtgtttctacctctgtgggcccagggtgggtctccacacgtgttccaatctcactctgccctccctatctcccacccgtgaaccacaggggatgcggaactgaaaggttcaggcttcactgtgacaggaggaacagaagaacttccagaggaggagggaggaggtggcagtggtggtcggaggcagggtggccgcaacatctctgtggagacagccagtctggatgtctatgccaagtacgtgctgcgcagcatctgccaacaggtcagtttcaccttcctcccacacctcctaaatgcctctgtgtaatatagttctgtttccagcccatgatcacaccagctccctactatacattgtgttccttaacaactccagcccatcccccatattcctaaccccctcactggttgttcccagtccctgattgtcagcttcctcaggaatgggtaggagaacgttgccttaagtctctgtgtgaggacagcaatgacctgcaagacccagtgttgagtagtgcccaggcgcagcgcctcatgcagctcatttgctatccacatcgactgctggacaatgaggatggggaaaacccccagcggcagcgcataaagcgcattctccaggtaggccaaggccgtgggggctgtggagg

SEQ ID NO: 137760 - DNA, 1499 bp, Homo sapiens
tcaactagtttggactatttaaatgtagtcttttttttttttttttttttgagacggagtctcgctcttgtcgctcaggctggagtacagtggtgcgatctcggctcactgcaacctctgcctcccaagttcaaacaattctcctgcctcagcctcctgagtaactgggattacaggtcgcccatcaccacgcccagctaatttttgtatttttagtagagatggggttttgccatgttggccaggctggtcttgaactcctgacctcaggtgatccgcctgtctcagcctccctaaatgtagtctttcttaaagatggggacatagaggtccctttcagacctccaggagtctgtgattcaatgttgcaggagatcaggaattggcctcagattgttgggtagctgggggtaacacgatgatgactagcctgggtgtggggcctctatcacagaacttggaccagtggaccatgcgccagtcttccttggagctgcagctcatgatcaagcagacccctaacaatgtgagtagtgcctggaccctccctttcctgtgctcacgttcagctccatgtgtcagggaggcggtccaccacagaagaacctagatcctacccttgggctcttgagctgagagataagaggggatgggaaaatggtgaacaagtggagctgatgataagggaaatgggttgagagtgttggagctctgagctgtggggaagcttggtggtggtggtggagcctgtttctctggccatagatgtaaggaggtatgtaaaggagaagacagtgaggaattggagaaatatggaggtactagagggcatgattcccaacagagttgcgttcctatctccccatcaatctccgccagtgttgtccttctccgtcatctccgatctctcctaccatctgctttccttcacccttagctacctattttagcacttctgtgcctttcatcctccccaggagatgaactccctcttggagaacatcgccaaggccacaatcgaggttttccaacagtcagcagagacagggtcatcttctggaagtactgcaagcaacatgcccagcagcagcaagaccaagcctgtgctcaggtcggatagaaacatgttaggacccatccccttaggagtttatctgctggtagcgtgagtgatatcagatgcgtggagatgccagcatgtccatcagggaaaggagaggatagattgttccagccttgcctggctcccctgtgaccctgtgtcctctgtctgttctccagctctctagagcgctctggtgtatggctggtggcccccctcattgctaaactgcccacctcagtccagggacatgtgttaaaggctgctggggaagaattggagaagggtcagcacctgggttcctcttcacgcaaagaacgtgatcgacaaaagcagaagaggtaaaggggcttagggagtggaccaagattgaggggtagaaaggagaagaggcagg

SEQ ID NO: 137761 - DNA, 1059 bp, Homo sapiens
cccacccatctatctggccgacagcctgtatctcttttatttctgtgtttccctacacccacccatctctgcacacttttatcttttccctctctgtcagttgcggtatttgttgagtaaccataattattgtgtatagtttaaaacccaaagtctaactccttcatatatacattctcttcatctgtcttcctagtccatctgtctcttttcctccgtctctgtctctctccctgtctgactcgtttgcctttctttgtctctccacctttttgtctctctcttcctgtttctttctctctctgactctttctcggcctgcctaaaggcagagtctctccctgccttcctctctctctttctctgccttcctttttctgtcttcctctgaatgtcaatccctctccctccccgctccctctctggctttctccccaacccctttctctcccgatcttctctccccacacgccccccgccccgttagttcatctcctctcctggtctgggctggcttcatcttgtgcctccacacctctccctgtgccccacccttcactctctccccgcataactctcttccgcatgtatatgtgtatccatgtctgtctgtctgcttcttaccatctctcctgaatctgcctatgactttctttctacccattcctacaaatgcttgcagtcttctgttttctaagtcccaacagcttattgtttttcattttctggagcagggtctacaggtttccaccaaacagaagatctcgccctgggatctttttgaggggttgaagccgtcagcaccactctcttggggctggtttggaacagtccgagtggaccggcgagtggctcgaggagaggagcagcagcggttgctgctctaccacacacacctgaggccccggccccgcgcctattacctggagccactgccactgcccccagaagatgaggagccgcctgctcctaccctgctagagcctgagaaaaaggctccagagccccccaaaactgacaaaccgggggctgctccacccagtactgaggaacgcaaga

SEQ ID NO: 137762 - DNA, 1053 bp, Homo sapiens
ttctttgctatcgggtctaacaacaactgcaccttggtttccattttttctgtccctggacttctgtcctgtctgagtgaagtttccaaggtcctttctctggacccatgcttctacctggactaatgcacaaggggttggggtcattgctgtttctctatcccagaaggcaagcccacccttgcagtagggtctgttttatcaggtcttttgaataacttctgagatcacctcttcaagatagcaacttgggggagattttaaagagagtctttggcagtgggaactggggagggttgcataacaacagcccgacaggatgttgggttggcgtgggagagggagactgacctcttcttccacctctccatcttgatgagactgtaatttgtgtcgtgacgccttctccctgtgccctgaactgtgctcttggatgtggctcatggagcctgtgttcttaatgagtctgaatcatttccctcccctatagacacgggtcctggaaaacggaagagagaagatgaagcccctatcttagagcagcgtgagaaccgcatgaatcccctccgctgccctgtcaagttctatgaattctatctctcaaaatggtgagttggtgggttggcaggaaaagcgttagcatggggacccgagggatctactttgccttggtactgatcttctgtcctgccacccccactcccactcccacccccgatgttgcagtcctgaaagcctccggactcgcaacgatgtgttctacctgcaacctgaacggtcctgcatcgccgagtcacctctctggtattctgtgatccccatggaccgcagcatgttggagagcatgctcaatcgcatcctggctgtgcgcgagatttatgaggaactgggtcgtcctggggaggaagacctggactgagctcgtgtgccatccatatccatctttcacatcaatgtctgtcctgtggccatgtccctcagggtgacaggcccaggaaccaatgctactcattctgaagggccctgactgctcctttccgctcacccattccc

SEQ ID NO: 137763 - DNA, 1924 bp, Homo sapiens
agcagtcagcctagttgtaccgggctcaactattcatatggtgtcaatgcttggaagtgctgggtgcagtcaaaatatgccaatggagaaaccagcaagggtgatgagctgcgctttggccgtaagtacttggggatggggggtgtggggaggcagggacagggaggaggaggggaaaggggagaaggggctgggcctgtgattcagctgaagatgtctagaagtgataagggtgtgatcccttaaggatgccctgtgaagatggggaggagttgtagattaaagggaaatgctgtctaggttccaggttaggggctctttctgtaattgttcaggagctaggcatgactaagggatggaggggttaatggtgatggagctaagtgaaattctccatgtagagtttttcttaatcctgtccctgcacaacatatcactgcagccaaacccatgcgtatcaaagaggatattctcgcctgctcagctgctgagctcaactacggtctggcccagtttgtgagagaaatcactcggcccaatggtgaacgatatgaacctgacagtatctactatttgtgtcttggcatccagcaggtacctcttgtgcaccacctcacttcctgtcactcttaacacagcaggcagggtctaaacagaaatgattctgggttaggcacggtggctcacgcctgtaatcccaacactttgggaggctgaggcaggaggatcgcttcaagccaggagtttgagaccagcctgggcaacaaagtgatacccatctacccaaaaaatatttttttaatgaaaaaaaaaagcagttattctgttgcactccctgttcctcatcttgtcccctacctgaagcaggcagcttgcctttaatctcctactccaaatagaacatgagatatcaatactcttctaaaatcaaaactgcattccaggaccgttggccaaggagcagtcttcattgctatccaggtcccctttgtaatctttaagcccattctaggaggggagggatgggtggagctgggatccttgagtgctggggtaatgtttagttccccctgggagaagtcaaccatgtattacctgagaaggaggtgtgggcttctaaagaacatctcctccaagcctcctcctcttcgagcaaagcctgagtagcgcagagctgtgggtatacctgggggaaagcactcgaggccacctaatcaagcaactgtttcccatcgtctcctaatgatcaaggacaccatacctgggggcttcagcatcattatctttcttctaggacctacagtctagccttaggtgtgtctgtttttctttccccagtacttgctggaaaataaccggatggtgaacattttcacggacctttactacctgacttttgttcaagaactcaacaagtctctgagtacctggcagcccacactcctccccaacagtaaggaacagggacgtagcaacccctacccgctttctccattcttccaatccaccatcccgagagtcctgtgctgtttggtctgccactcttcacaaagggcccgagggcaggagcgtgtagctggatgcctcagggtttagagttaaaggagcacaggagcgcctgttcttgaacgtgagatggggatcaagacttaggtctgaagagctatctctaggaccagaaaaagatggcctgggtttgggtggtaagtaaagaaagaaagcaagaaatcgtgggactcctcaaggtttacatttacttgtctacaacttgagggtggtgagaggcgttccaaatgcaggtgtggaaagtatatattttttaaagcccagtcccactgtgtagtgtagcaagtgtagcgaagtgacagtgttttatatacaaaggttactcaccaaatgagaattgtgtgggaaatgagcaggg

SEQ ID NO: 137764 - DNA, 1093 bp, Homo sapiens
ttacagcttgtcctccctgccctgtgcccccacctcaggaccaagtgttccagttctgctgccgtgattgctgtgaggacttcaagcggcttcggggtgtggtgtcccagtgtgagcactgtcggcaggagaaactcttgcatgagaaactccgattcagcggagtggagaaaagcttctgcagcgaaggtaaggagatggggaagggcagaagacactataactcccagccagggagaatggaggagaagggagggaggccgggaaagtggtccatgaggcagggccttctgcccgggatgttctacccccatctcccctaaagttttgggcacaaggggctgcttagagagaggtttcaggtatagcaccttgaaaaggttgggtctcttgcccttgggtatctgtgtctctggactctctttcctcttctcctctttccaggctgtgtgctgctgtacaaacaggacttcactaagaagctgggcttgtgctgtatcacttgtacttactgctcccagacctgccagcgcggagtcaccgagcaactggatggcagcacctgggacttctgcagtgaggactgtaagagcaagtacctgctgtggtactgcaaggtaaggagggtcagcatgcgagcgaggcgggaaagagggcagtggggagcacgggctgtggtactgagctcggggtgtggacagatctccagggagggcagccagccttccatctctaagctggcccgatctccaaggggaggagcatggcttatcccgggggaaagaaagggcccaacgcattttagggaggcaggtctgaccatccttttgacatcctcaggctgcccggtgccatgcgtgtaagcgccaggggaagctgctggagaccatccactggcgtgggcagatccgtcatttctgcaaccagcagtgtcttctgcgtttctatagccagcagaaccaacccaacctggatacccagagtgggcccgagagcctcctgaacagtgagtcccaggcagggggtacactctgttagagggagcctggactctcctaatcctaagcctagcccctttctccttcctcttgcg

SEQ ID NO: 137765 - DNA, 1184 bp, Homo sapiens
ctgtgaaggtctagggtgaggtggggggctgaccttgcattggggtgggcggtggtggccaggccctagctcagggtgcgtgtatgtgtgtggcaggtcctgcacgaggtcagcaatggcagcgtggtacaccggctctgcagcgattcttgcttctccaaattccgggccaacaagggactgaaaaccaactgttgtgaccagtgtggggcttacatctacaccaagaccgggagtcctggccctgagctcctcttccacgagggccaacaaaagcggttctgcaacacaacctgcttgggggcgtacaagaaggtggggccgagggagtagtgcattagagggctgtggaagggggtgtggttcttgggttataaataaaggtggctgatgggtcaagggctgggagaaataaaacaaataaagggggtttcaattgtatccgttatgttttatttttgaagctggctggtggatacacaggtctttgttacatcatcatctatactttttttgtatgcctgaaatatttcatgtttaaaacatttaaaaaataaaagtgaagggacaaatccagcctcagcctctccttccccatcctcacagaaaaacacacgtgtgtacccatgtgtctggtgcaagaccctgtgtaagaactttgagatgctatcacatgtggatcgtaatggcaagaccagcttgttctgttccctgtgctgtaccacttcttacaaagtgaagcaggcagggctcactggtaggtgcaaagccctcttctctgagtcccctgctggccttctctctacctcccatactcccctcttccagagtaatccttgctgcccgacctcagtcccaaccacatctccccatggattttctgttcgtctcttacactgccttacaccttctgtgtgctctctctctccctctctctttctcttttcctctctctctttctctctatgccccaggccctccccgaccctgcagcttctgccgccgcagcctctctgacccctgttactacaacaaggttgaccgcacagtctaccagttctgcagccccagctgctggaccaagttccaggtactccagaccctggaccagggatagaagggtttggcaacataaagagggttggagaattggggtaggcaggcctgggcagagcaaagaacaa

SEQ ID NO: 137766 - DNA, 1055 bp, Homo sapiens
actaggttctggagcccctaacagcataaggatttcagcagagcgatagaaatgcagggtctaggattgcgtctctgataggggagggacaaccttgacttgagaggctctagtgtctcccctcttctgcctagtggtgtgcctctatcaggctgtgacgagggtcttagggcttatataaccacctgaatccaggggaagctacccatacactgatgcttccttttccttttgctacctttgggtggttgtgtgtgtttttcattggtaaaatataaattcttaatgaaaggtatattacctgtgtttccttaacccccaaggattgggacagaaagctggtgggaaggatagattttttttttttcatggaatagctgcacgtgcacccccccacccttagtacagagcctgaggtaaccctgagaggggccccaagaagccacaggcactcgagttttccctttcagttttgagtaagttcttccccaggaatggaggcgggggttgggccggggagagggtggtgagggcaggctcaacatttaggctgccttctgcttcctttgcaggagatggcctgactgcgaaggcgagtgagaagccgcctgaacgggtgagggggaggggattggaaggagtctggttcccccttagctctgggaaggacagacccttcattttccctcccagatgttgttctgtagagagtgtgtgtaaggagagttaggaggagggagggagcactagtgtctactgcttgttggggagaaagtccaacctccttttcttccctcctcctaagggctgggccaagggtccccactctcccttccccctcccatcttctatccccccccaaaccctgtactagtgttagcctggccagggtgtcagttttcctcccctcccatctttccgaggtacagaagagaagcgagcgcgttaggagagcagaacctccaaaacctgaggttgtagattccactgagagcagtaagtaggatttgaggaagtgtgacctgggagttctgggtgtggaaaaggtccgaaag

SEQ ID NO: 137767 - DNA, 1090 bp, Homo sapiens
tttgaatgagaggaggggatcacgggtagagtgggctccaggaggtagggcgagcagggtgtgacgggggccagactcttgagccaggtaaggggagcaggtgcgtagatctgtgttttttgtgggtgagcgcactcggcccttgggtggaaaggggacgccgcctttcccggggggccggcttcaaagctccagaggctatcttttccttctcaactaacggggccccgggcgggggctcaggcgccgtctctagtggctgcattccactccgcaatttccaggcggccactggactgggagtctcgcgccgggggccggcgctgtctcgcgagccccctcctcgagccagccaatggggttggttgctggcaccgcccgcccgcctggtgcagagcgctgggcgctgcgagcggcgctgccatttaaaggggccgcgacccctgtcccggctgctagggagggaggtagagaaggagcgcggggccgtcgctgtctgcagttctaggcttgtagcctttgcactaaccctgccgcaggtaggggtcgggcctgctcaagccgaaccgaacctgcaagcgggatcttgcagtagccgggaggcggtggtgggggggtctaaggagagatcgtagctccaaaatgtcttcctgtaaatgcctgaggttgggggtgggcaacaggagaagggaggactggaggagcaatgggaaagggggacggggctgaggaagtgggcgacctgaaaggtaactggggggaaggggttgcgaagggcagtttgtgggggcgggggaagggccgagggaggacctagcaacgcggggagggggggtggggccagacagggtgggtaaagactggggagctggggggctcctgcagagtggggagggaatagaaactgagatcgcgggggcgggaaaggctcctggtggcgacggccttaggagactctaagggggcgttcagcctgagttgcggggggtaaaaggtaaggggggaagggaatgggagttgcagtcgagtaggggggtgggcgggtagaacgaccgactgcctggccagtgtgggcacggggccagggcgg

SEQ ID NO: 137768 - DNA, 1959 bp, Homo sapiens
aacttaaatttatggatttcgcatcgagtattttattttccagtttgagaaactcttaccataacctgacacgtttctttgtgtttttaacagagaagtcgaggttagagggaactgggaggcactttgctgtctgcaatcgaagttgaggtaggtgtaaggaagggatagggttgccagacaaaacaccgggcacccagttgaattagaatttcacctacacaaccaattatttttaagtatatgttgcatagttttcaattaaatttcaaatttaattgtgggttgtgtattttatttgctaaatctggcaactctagtgggggggccctggttatatttatactgtgtccttgtccaccttccttgttattaaatgaaaagtcctaagaaactcttagagaaggaccttagttcattttacagctttcaggctggccatccaggcagccatctcagtcttgtaaatttataccagatttagatttcagatatgtgtgatgtagtgtttggtcctctacctaaacatttgtttaactgtagcatgcccagtggttagagtctttctcaaccagcaatacgtgttttctctcaaaattcttcatcaggattattagtctcagggacacaagtagacagtaatctttgctgctgatcttcgtgctgtgttctcttttcagaggcccagtatttaggcgacagtgaatttattactctgaagagggttctgcacatatttccaaattatattggtggtcatcagaagtaggtgataggaagaaatacttctcaaggtacttgctacttggtgggcactgttataggtgctttattatgatagtcttcactagtgcattccatcctgggcctctccggggccaggggaagagagatgtttaacacctggaacccaagtaggaaaagatttgattctgatgcccaccttgccccatccccaactatttccagggtggactttagattttgtatgttttaacttcctgcttttatatcttattttttaaaacactattttctttttttgttgtttttttttaaaggtatctcatttgccatgaaactgctacacctgctcatggcgtttaaaatccttacaactttttgagaaaacgacgttgcactatgtggcaagagtcacaggatagattctatttttaagaatttatcctatggaaataattaaatggaaataaagctgaaagccagaagacatttactgcagcgttataataggaaaagccaaaaacaaccacctaaatgtcttatagtagggagtagtttagtaaagtagtacatcctggtgaactttatatagtcattaaaaattacaattatgttgacattagcagaaatgaggaaactctgaatatacaagggtgcattatcagttactgaaatgataatgtatgtctaaataagcaagaatggaaaattgtgggaggaatatttaatcatggatatgtccaaagatttagctatgagcattgattataatggtgaaaaattagaaacgacccaggtgtccaacacaatagggacttggttgacaactgaatgctgtgtccgttaacgtaaaagatttaatgacatgaaagctgtttatgatacatcataaagtggaaaaaacaggttacaaaatagtatttatcatatctcatttcaaatacataaattaatgactagaaggatataccaacatgttaacagtgactatttttagtggcaggtctatggatttttatatttgtatttttatttattttggtttttctaaattttctataatacattttgtaataagtatctgattgtaatttctgtttaaaaatttttaaataaaattttaagttgtaatttctgataccttataacattaatgagaaacaaaattgattaaatgatataaatgtgaaaatttaaatcttggctgaaatgtca

SEQ ID NO: 137769 - DNA, 1378 bp, Homo sapiens
cagcttggttcttagaggtagtcatcagatgactggtagttaaaaataatatagaaaagtctttaaggcttaaatggagaagtctggtactgaatactgtacttttagccttgagcctgtaccagctcattgtaaaaagtctttaagtatatgttcctgtttgagtaccaattgtgtgcctctaagactagaaccaatcccaactttgtttatttccagagattactataaagagttgctctttcctaactcatttcattctgttgcccccagcctgaaagaatgggaactgttaaggttatgaaaattggtgagagattaggaaaatggaacagttactttgttttttgtttttttttttgtttgtttattctcatctgaaggtacgttttgaatgttaaaatctgatgccttgtaacatagggctgcttccttgaattgcttaatttttctctttggccggtaacgcctatatttttctttctcttgcttagtccagcttggcttctggcccgtcgtagagctgttcagatgtcctctgcatactgctttcacattctaaggcacaatttactcataagtggttaggttgccttgggaaatggtgtttacattctctacaacaattaatgtttcctcatttatcagtggttataggtctttgaggatacgactataattctatttccccagtcttttaagtgactgtgtgtcttctctcagatgaaggcttgactattgacctgaagaattttagaaaaccaggagagaagaccttcacccaacgaagccgtctttttgtgggaaatcttcctcccgacatcactgaggaagaaatgaggaaactatttgagaaatatggaaaggcaggcgaagtcttcattcataaggataaaggatttggctttatccgcttggtgagcaactgttggcttttgaggcatgtgctctaaaggtggggaagctggagaataatagatgtgcaaaaataggcagtggaaataattctcagatgatgtgttccttgaaagcttgatgaaacagaaccacaaaaatggcacattttaatttttcctcataagttttgtttcaaggataacaagttttttgcctaggatactggagctaaagtatgccctttggaactttttttttttttgagacggagtatcactcttgtggcccaggctggcgtgcagtggcatggtctcggctcactgcaacctccacctcccgggttcaagtgattctcctgcctcagcctcctgagtagctgggattacaggtgtctgtcaccacacccggctaatttttgtatttttggtagagacggggtttcactgttttggccaggctggtctcgagctcctgacctcag

SEQ ID NO: 137770 - DNA, 1050 bp, Homo sapiens
ccaatggtctttgttttctggatgatctgttgtcattgggagaataatacctatgaaattgatgatcacctaagtgttattgacttctagaactacatgtgatttattgcaaggccatcagaagcaaactagggtggccaaagagctgaagcacacagttaagttctttcacttctgtttctttgtatggttgtttagtttttccggggagatattgaactatactgctttagactgttgatggctgctaaggtgttctttgtcaaactgagttattctgattttcctctgcttcctaggaaacccgaaccctagcggagattgccaaagtggagctggacaatatgccactccgtggaaagcagctgcgtgtgcgctttgcctgccatagtgcatcccttacagttcgaaaccttcctcagtatgtgtccaacgaactgctggaagaagccttttctgtgtttggccaggtagagagggctgtagtcattgtggatgatcgaggaaggccctcaggaaaaggcattgttgagttctcagggaagccagctgctcggaaagctctggacagatgcagtgaaggctccttcctgctaaccacgtaagtgagggtcattttcagacgtagaccttagattgctaattccttccatggtctggagagttagcctctagtaaccacttttctatgtttaaagacttttggtcagcctggcatggtggctgactcctgtaatcccagcactttgggaggccggggcaggcggatcacctgaggtcaggagttggagaccagcctgaccaacatggtgaaaccctgtctctactaaaaatacaaaaaattagccaaacatggtggcgtgtgcctgtattcccagctacttgggaggctgaggcaggagaatcgcttgaacccaggaggcagaggttgcagcgagctgagatcacgccactgcactccagcctgggcaacagagtgaaactgcctcaaaaaaataaataaaagactgggcaaaacagcggctcacgcctgtaatcccagcaatttgg

SEQ ID NO: 137771 - DNA, 3760 bp, Homo sapiens
caagactccgtctccaaaaaaaaagacttttggtattagcctgggcatggtggctcatgcctgtaataccaacacttcaggaggctgaggcgggtgaatcacgaggtcctgagtttgagaccagcctggccaaggtggtgaaaccccgtctctactaaaaatacaaaaagtagctggacgcggtggtgggcgcctgtgatcccagctactcgggaggctgaggcaggagaatcacttgaacccgggaggcagaggttgcagtgagccgacattgcaccactgcactctagcctgggcgacagaggaagactccgtttccaaaaaaaaagacttttggtactaagctttctcgtatgatttttctgtaatcttatattaatagacgtgggatgacgattatgaaaaataactttttagtcattcggtaggttgtcatgtagtcagtgttaagtctctctttactttgaagatttagagttctgaaaagttgatttgtgcctgcagtatctcttagtgtttaccacaagtcatttctcagagtgtctgtagatgtttaggctgtacttaagtactgcacctacctacttggaatatctttttgagactgtattcagagatctaagtcctgatttcgtcctgtcaaccccagattttcttttttctttttcttttctttttttttttttttttgagacagtctcactctgtagcccgggctagagtggtgcagtggcacaatctcggctcatttcaacctctgtctcccgggtccaagtgattctcctgcctcagcctcccaagtagctgggattacagacgtccgtagagtcagggtttcaccatgttggccaggcttgtcttgaactcctgacctcatgattcacccgcctcgtcctcccaaagtgctgggattacaggcgtgagccaccacccccagcccaaccccaaattttttataatgtcattaggtataaaaacttcagaagcctccaatcctgagccctagctaattcattgtgccagtgacatgtgtagagaagaagcctggtggggtatgatttgattaacactgaactttgttctttcttccagatttcctcgtcctgtgactgtggagcccatggaccagttagatgatgaagagggacttccagagaagctggttataaaaaaccagcaatttcacaagtatgcagtcttgatagatttccctattaggtgtttccttcttaagaaagcttataaagggatatgtaaaagaggcaggtctttgctgcacatgttcactggcagccattatcttggtcctcacaaggaatgcaattcttagctggggtaattctggacaaagttagtaacctaggaaccttgcctatagggaacgagagcagccacccagatttgcacagcctggctcctttgagtatgaatatgccatgcgctggaaggcactcattgagatggagaagcagcagcaggaccaagtggaccgcaacatcaaggaggctcgtgagaagctggagatggagatggaagctgcacgccatgagcaccaggtcatgctaatgagacagggtgagtctaggcctgtaagtcttaaagctgaaaggacaaaatgacatttttaaatgggtttctttgtatcaattaacagaagggcctacatctctgcttttatacttagtttgcgttgattttggtagataaataggcttggagatgtggcagagatactggattctgtggagaaggaaatgataggtataacttcattttggaatctggacaccacaggtggttccaaaggaattagatcctctttgctttctggatctttatttgaagaaagtcattagatctatatgaagacaatgaggaatattcttagtctgttgtttttttagatttgatgaggcgccaagaagaacttcggaggatggaagagctgcacaaccaagaggtgcaaaaacgaaagcaactggagctcaggtaacttttctcgaacactttttccctaacaactctaaaaggtaatgtctcactcctctttcctactgccatgctacctcgtgtatttataaatgtgttggcaaatatttcctggctgcttctcaggttctttctttggattggagatgttttagctgcccatggtcctagaagttacctgctaaaaagaaagcagctgaatgctggtctcatgaggtttctttgggggttgcctcagggctgggcacacttaacagtgagtttcctggtgaactgatagttttcagtaggccagtctccttggttgagtctcctgttaatctgctcaagttctgaaatgcctctgtcttaaatacattggtgactctctgtaggcaggaggaagagcgcaggcgccgtgaagaagagatgcggcggcagcaagaagaaatgatgcggcgacagcaggaaggattcaagggaaccttccctgatgcggtatatctcccatgtgcccgtgatgtaccagaccagtcctgataaactcaccatgaattgtctgctaggttaccggttatgaccaattttcccgtgttgtgaaataaccctttagaaaaaagaattcataagaaggagaggtaaggtttgaagaggagatcttgcctcacaagcaatataggatgaaaaactgggtctgctgtattctgtttagactcagtgactataggaagagatatgcaaccttggctagtcctctgctgtccttgcaattgtacaagttggagcttcagaagcaatctcttccccctttcacctctctgttgctaataggaggctctggcttacgtcctagtagctctgtgaccttgaatttgttgcacaactagcaagggttgtgctcctcagctttctcagtgctgtttggacgtgttatcactctatctacttcccttagtgtgtggtccttgatggattgtggtagaatgcactgctgtcttggactgtcttgagtattttttgtttttcagagagagcaggagattcggatgggtcagatggctatgggaggtaaggacttaggaggttaatggctctgatttccttttttgtttggtcttgggtgaactatgtagcttctgctgcctactttaagggggtgacatatatgtcttacttagcccagaggtcttgttgaattgtttcctttggcatagaaagagactaacaatctttatcccttgtgctgatcacactactctgccttaggtgctatgggcataaacaacagaggtgccatgccccctgctcctgtgccagctggtaccccagctcctccaggacctgccactatgatgccggatggaactttgggattggtaataaaactgcagtgccttaacagtaattctaaatggtggtaggaggagaacaggcattgctttcacagcccctgggggcctacctcagtttgctatagatagcagtctttttttttttggagacagagtttccctcttgttgcccaggctagagtgcaatggcatggtcttggctcactgcaacctccacctcccgggttcaagcgagtctcctgcctcagcctcccgagtagctgggactacaggtgcttgccaccatgcccggctaatttttgtatttttagtagagatggggttacaccatgttggccaggctggtctcgaactcctgacctcaggtgatccaccagcctcggcctcccaattttgtatttttattagagactgagtttgaccacgttggtcaggctgtt

SEQ ID NO: 137772 - DNA, 1056 bp, Homo sapiens
ccactagagttctaaacagacttagtcacccactcctacctaccatcaggagccttgaatagttgaatggaaatagcctccagtggagggactacagatgggtgggaagcttccaacaatggctctgttacagtgttgctctctttttctctttaagaccccaccaacaactgaacgctttggtcaggctgctacaatggaaggaattggggcaattggtggaactcctcctgcattcaaccgtgcagctcctggagctgaatttgccccaaacaaacgtcgccgatactaataagttgcagtgtctagtttctcaaaacccttaaaagaaggaccctttttggactagccagaattctaccctggaaaagtgttagggattccttccaatagttagatctaccctgcctgtactactctagggagtatgctggaggcagagggcaagggaggggtggtattaaacaagtcaattctgtgtggtatattgtttaatcagttctgtgtggtgcattcctgaagtctctaatgtgactgttgagggcctggggaaaccatggcaaagtggatccagttagagcccattaatcttgatcattccggttttttttttttttgtccatcttgtttcatttgcttgccccgcccccgagacggagtcttactctgtcgcccaggctggagtgtagtggcatgatctcggctcactgcaatctctgcctcccgggttcaagcttgtccaggttgatcttgaactcctgacctcgtgatctacccacctcggcctcccaaaatgctgggattacaggggtgagccaccgtgcccaacctcacttgcttcttatccttacactcccccagccccagagaaactgccacatacaccacaaaaaccaaacatcccccaatgaccttagccccattgctccattcactcccaggtgagaattcaggcaaacgtccacaaaggtcacaggcagcgtacatacggttctgttataccccatatattaccccttcatgtcctaaagaagacattttctcttagagattttc

SEQ ID NO: 137773 - DNA, 2187 bp, Homo sapiens
aataccctttcagtaatcattcaaccaacgcttccatgtctctactctgtcgtaacaaaggctgtgggcagcactttgaccctaataccaaccttcctggtgagtaaagaatcctgacctggccaggggctctgtgtgggtgttggggactggtcagctggggggcagtgtgtttgaggagcggggaaagaaactacctgccctagtttaattggtctgagtgatcttacagcctttgctggcttttttttttttcttcacattatatgggaagaaaccataaatagaaacccggggaagaggtgaaaaatgatacttggtatagttatcttcccttccttgataacttctactgatgtccacagattcctgttgccatcaccctggggtcccaatcttccatgatgcacttaaggtgaggagtaggtgaggggggttagcaagagcatttcccagaagagataatacccaggaagctaagctgatctgggtctcttgttatcagggttggtcctgctgccgaaagcgaactgtagatttctctgagttcttaaacatcaaggtaaattatttatgtacttggattctgcccccaatagaaggattctatccctaatcctatctccttatctatactagggctgtactatgggaccacactgtgctgagaagcttcctgaggcccctcaacctgaaggccctgctacaagcagttcacttcaggagcaaaaacctctgaatgtgattccaaagtcagcagagaccttgcgccgggagaggcccaagtaaagaggaggaggcccctggacttttcttattttcatgtagcttcctaggagtgattaatgggtcattgaggactgggaactagggaccagggatgtgaggagggccagatgtcagggtttggatggtgtatatcctgtgccttaggggaaatttgtgtctggaaataacgccctttcctctaaggtggtgtgggatgatgggatagatacctgaatcaacagagtagatagcccctcacaaatacatccttagtgtataacacaaaagggattgttgagaatgacttctctttctagaaaagaactttaagataaatctcatatcaagaaaaggatgtattgtattattggcagccaggagacttcccaaattttgtgggaataataagagcaacagaaggaagtcatattaggtccacgattagataaagaggaagaggatatgactcagttctgcagagaaaagtggttaggtttagagcaactgagtagatgggtaagagaagtgctggggatttctctagggttcaggtatttgggatgtccacagagatgaaaattggcaatggggttgctacccaacctctccaactctgcctcactttcaccaggcttctttaattccattaccatcggtgggagtgttggagctagcaatcatagctaatgggtcagaactaaatcaccacccttaacccctaggtcagagttgcctctgaagctgctgccgctaaatatatcccaagccctggaaatggcattggaacagaaggaattagaccaggaacctggggcaggtaggtgggtctttagtaggatcaacttcatagactggaatttagtggaagtggcaattgagtggggggatggataagttcctgactctgtttcccttgcccaggacttgacagtctgatccggactggttccagctgccagaacccaggatgtgatgctgtgagtgagagttttgaggggctcaagcatatggctgagggatgactgggtatagataggctgagtaggatataccttagaatgacctggttctactttatccttcttaggtttaccaaggccctgagagtgatgctactccatgtacctaccacccaggagcaccccgattccatgaggggtgagggaggggactgggtgggctatgaggctatgagacaggtttctcctaatatttggtcataagataatattgggggtgagagaattcagttgaattatcttcctacttcaggatgaagtcttggagctgttgtggcatccagaccctggattttggggcattcttggcacaaccagggtgcagagtcggtagacatgactgggggaagcaggtaagccccagctttcctgaactcttgattagaacccaatctcagag

SEQ ID NO: 137774 - DNA, 1145 bp, Homo sapiens
aaattctcctccctctctgtaccacatagccaagctccctgtcttctccctttagtatagaccaaataagattctgctccttatccctcaacagcccagaggttttgcaatatgaggttgtgttaatctttttgagactctctgtctcttctccacgtgcatcatgagaactccccttcagttaagaatttattcttaccacctgcatttcacatcttctctttagctcccagcatcttgccgccatgattggcaccagacagattccttagtagtggtgactgtatatggccagattccacttcctgcgtttaactgggtgaaggccagtcaaactgaggtgagcaatgatctgatgttggatgggaggatagtcaattgggtgatactacaatctcacaggcagagttgccatttgctgttaacctgtaggctccatagtacccttagaggaaaggagagttattaggtcagggctgtctggccaacctgtggatcatacctctgacctggttatctgtcgtaatgacctattctgaccttctgggtttgttactacccctgtaattcttttctctcagcttcatgtccacattgtctttgatggtaaccgtgtgttccaagcacagatgaagctctggggggtaagtgaagaccaggggacacaagagtgggaggcagatgggtgaaagagcggctagactggaatagagggtgtcttgagggaaggagttgtactaggaaaatggaggttttctcttcatttgctttcattttctctctctctcctactcttcctatttccctctttccctcccctcttccttctcccttttcatctctcatttctttcctctctctcccttattgtcttattcctcccttaccttttttcttaccttattaaaaatttctctctctcatttgtcaccactccaccctgaccccaatgcctttgatttcctcattctctctttcttctgttttcctttgctcctcctcaggtcataaacgtggagcagagctctgtcttcttgatgccatctcgggttgaaatctccctggtcaaggctgacccaggatcctgggcccagctggagcaccctgatgcactagctaagaaggctagggcaggggttgtgtta

SEQ ID NO: 137775 - DNA, 3251 bp, Homo sapiens
aatggtttagaaaaacaaaaatcctagcaaaatgttaaccattgtgagtctaggtgaggggtcagctgttcattttactaaactttcacattttccgaaataaaacgttgggggaacaagtattttttttgaggcgggctggagtgcagtggcccgatcacaggtcactgcagactccaactcctggctcccacctcagaccccccaacagctgggactacaggcactggccaccacatctggctaatttttttgattttgtgtatggatggagtctcgctttcttgtccaggctggcctcatactcgtgggctcaagcgatcctcccacctcggcctctcaaagtgctggaattacaggcgtaagccaccgcgtccggtcaaaaaatcaatttctagggaaaaatgtcaactcaaaacaagtaacctgcatagctcgggaatgcctgtataatttacgtcaagtctctccttgggacggaccggtgaaattgcacgcagcacaaagaccggctcttacccttacttccgggtattgtggtacaggaacccgaggttgcctgcgcgtaagccacgtgactcgagcagctccttctgattggaggaagagccactgctctaattcggtgccgtgagaaagctcgcgcgcggagcagtgggagcgggcgggactgaatattttctttgaccaaccgctttccacatatccatcctcctgatcccgtagcgtcgaatcaaaagccgttagtaaagtagttacttctttctcttaggatagccggtctttccgggttttcccccccttccccctcccctctccccacttccccctccctttcccctctgttttgagcttccggtagaggctggtagggtaagggagctcagtaagtcacttctgggcgactgttgttttatttccggtctatgggacccggctgcgatttgctgctgcggacagcagctaccatcactgctgccgccatcatgtcagacacggacagcgacgaagattccgctggaggcggcccattttctttagcgggtttccttttcggcaacatcaatggagccgggcagctggagggggaaagcgtcttggatgatgtgagggggtgggcgtgggggtagggctcggggggtggggctaagcagaggaaggaggtgcggggaggaaaggagagggtgctcaggcagcgagaacagggcgcagctaacgccggggaggaggatcccgtcctcatgggtgcgggagcaacgtggcgtgggagtgatcgttctgggggagagtgggcagaagagagcgcgaggcgagcccggggccaggggcgcagggaatagtggctttggagctagcgctctgccgaccagacagtaggacacatgctggtttcgcctactgagatggcttcccacccgtaacctgcttggagattcttgacactgcctgcccctctgacatcgctgccctgagatggctctatagagccagaggactggacaggacctgcctcccgctcgtttggttccggcctcaggcttaggacaatggggtgttcctagcacccgagcgggcctcctggtcacagtgcgccttttaggtggctctcccagcgtcttcactgactttcgtgaaatagtgtcctgcgccctagtgaaactaccctgccttcacttaggcccgttttcttgaggagtgaagctgtcggccgctgtggcccctcctgtgccgcaggcgcatgcgaaacagggaccgaacgagccccgcctcgacgcctccaatcccactgatccccctgcctcggccctcgttccgagaacgaccgttccattcattcagtcttggcagtagttatttgattcgtcttctcttgtagtatactttaaagtgtgggcgatgcagttggctgtggtgctttaataaagatctgatcgatgcggagtttggtagatgtatattacagttctcgaacgtgttgcttgttttggcacactgcacagtcatttttcatgtggatttgtgactttgtcgtggaccagggaaataagtcctgtggtgtgggagtcgtaggtttagttgttatcttcgactcgtgctgtccctttttcaggaatgtaagaagcacttggcaggcttgggggctttggggctgggcagcctgatcactgaactcacggcaaatgaagaattgaccgggactgacggtgccttggtaaatgatgaaggtgaagtctgggttgtggggagtaggcgggggaggaggctagccacctactatgtatgtacttttttgtgtgtgtaagacggagtttcgctctgtctccgaggttggagtgcagtggggcgatctgggctgactgcagcctccgccacccgggttcaagcatttctcctgtctcagcctcctgagtagctgggactacaggcacgcaccaccacgcccggctaatttttgtatttttagtagagacagggtttcatcatattggtcagactggtcttgaactcctggcctgaggtgatccgtctggcttggccttccaaagtgctgggattacaggcgtgagccaccgcatccagcctgtacatgtacttttaaatgggaattatctgagggagtgagggtcgcttactgttgttgcgattctccctgcttttttcatagggtgggttaggagtacagaagatgctgtggactattcagacatcaatgaggtggcagaagatgaaagccgaagataccagcagacgatggggagcttgcagcccctttgccactcaggtgattctttggtgtattggcttgaacattccagtgcattatcctgctgtatagtccagtttgggctctggtttctatacccgctgtctgccattgtttctgctctctatgcctttgctttggctcctccactccctttgtcaggtcagttccaagtagctgctatctttttttgtgttctggccagtcttaaccgtattcatgtggttattcctcacactgttcagtcatgaattcttagttaatgacaagtagctttcttgtcacctggtatttgaatacctacagggtttgtgagatacacttcaaagttggaaactatgaaacaaattcagtttttgcccttaaggaatggatagttcaagaaggatacaacgtcatacataagcaatgaactaaggcaggacgtggtggctcaccagattacctgaggtcgggagcttgagacagcctgaccaatatggagaaa

SEQ ID NO: 137776 - DNA, 1061 bp, Homo sapiens
attctcctgcctgagcctcccaagtagctgggactacaggggcccgccaccaagcccggctatttttttgtatttttagtagagacagggtttcaccgtgttagccaggatggtctcgatctcctgacctcgtgatccgcctgcctcggcttcccaaagtgctgggattacaggcgtgagccaccacgcccggccacatctggccaatttttttgtatttttagtagagaaggggtttcaccatgttggccagattggtttcgaactccttacctcaagtgaccctgctcccctcggtctccataagtgttaggattacaggtgtgagccaccgcaccctgcctaaaacaatgaacttgatacctgcttgcaaatatgtttttttcctctctggtatagggtgctacattgtagaatcaaaacatcagacttagaaggtagagtcagtgagtggaaggagtcttaggaattatttattcgtaatctctagtagaaaaggaaaacttgaactttagagaactttataataaaatgtgggattttatcaaaagtaatacaattagctagtagtagactgactaatttagctcagttcgttagacattgtttgagcacttgttatgtactctaaactgataggcagtgtgtttcttttttttttttttttttgagacggagtctcgctctattgcccaggctggagtgcagtggtgcaatcttggctcactgcaagctctgcctcccaggttcatgccattctcttgcctcagcctcccgagtagctgggactacaggcgcccaccaccacgcctggctaattttttttttttttgtatttttagtagagatggggtttcactgtgttagccaggatggtctcgatatcctgacctcgtgatccacccgcctcggcctcccaaagtgctgggattacaggcatgagccaccgtgcctggcctaggcagtgtgtttcaaagataatgaagtccgctgggtgtggtggctcaggcctgtaaacccagcactttggggggcccaggtgggcagatcacgtgaggcca

SEQ ID NO: 137777 - DNA, 1023 bp, Homo sapiens
tcaccagggctggagtgcagtggtgtgatctcagctcactgcaacttccacctaccgggttcaagtgattcttccacctcagcctccccagtagctgggactacaggcatgtgccaccactcccggctaattttttttgtatttttagtagagatgaggtttcgccatcttggccaggctggtctcgaactcctgacctcaggtaatccgcccacctttgcctcccaaagtgttgggattacaggtgtgagccaccccgcctggcctgcttgaaacttttatgtgaagttgctcgttatttattcatcgtccacctcttcgaactagatttcaggcttctgataaatgtagataaaaccttggtaaatacttgaacttagttttttcgggacagcttatggatttgagtgctacttatatgaaaagaattaactgtgttgcatatacaaaaagtaacccacgaaaaatagaagatataagccctgcctttaaggatattgttatcttttggggaagatgatgtgaacaaatgcagaacaattattcatagtaagacaaaccacctatgagatcatgtttctgtatatagagtgttacatttagttttgatgggctgcaagaataggtaagtcaatagctgtcatttttgggcaccctgactggggggacatggtggcagttattttcagtagaagttataatttccaggtttgtgtttgttgtcttgactagggatggtaaggaaaaggctgggagtttccctaggtgagttttatgagctaacttcctataaaaggaggatgctacatttgacagaatctcagtactctgggatgctcatttctaagttctcttgtcctctaggggtgccttcacctatacccttagttttttccttccttggcattggctcctttgcatggcttggtttacaagggtgcttctttggaataattggaagtgggtgtagattgctaataaagctttcatggaggtgaattttgagtaaaattttgaaagtga

SEQ ID NO: 137778 - DNA, 4148 bp, Homo sapiens
cactgctccctgccgaacccgggaatcttaaagagtttcttaagtaatttatgatacaactgatctgtatactggtatttggaaactacttgtttagatggctttattttaaatgaagtggttaaattaggaaggtgccctggaatgttgataaatcagatagtgtcaactaccagatattcagagatttcaaaggctagtagagtcttcagtgtttatcttacctattcctataacagtaactgtcctaggcttgaaaactggggaagagcagtgtttttgacctcctgtattttgaggcttgtattaacctaaattcttcctgttggagttttaagccatttcttttaacagtctgctaaatgtcagctgttaactttgttttatagatcttatttatgccaaagaaccttaatgttgtcccgtgggcttaaaaaaattctccagctcatgagtctctgaactaggactacctgagtggtataaagtattacatagttttgctattggtcacaacattggttacaatattggttacttatcagaaagtagggccaggtgtggtggctcacacctgtaatccgagcactttgggaggtggaggcagatgatttgaggtcaggagttcaagaccagactggccaagatggtgaaaccccgtctctactaaaaatgcaaaaatttagccagctgtcgtggcgcatgactgtaatcccagctactcaggaggttgaggcaggagaatcacttgaacccgagagagagaggtttcagtgagctaagatctcaccactgcactccagcctgtgcgacagagcaagactctgtctcaaaaaaaaaaaaacaacaaaaaatcggaaagtagtaaatgtagtaatagtgtttgttttctcatcacaaccctagggtaccaggtacgtggtgagttgggggacgatgggagataacgagttagaatgagttttctgggttgcatactagtattatgatttgggtgcttgggcctatatctcctggcattgagccatgtgtatagcctaaagtgggtgtttgcggaattcgaggaaatatgttcacagttacatgccaaaggggtttctcttccttgttgcagtgtctgaaaatggagaaggcatcatcttgccctccatcattgccccttcctctttggcctcagagaaagtggacttcagtagttcctctgactcagaatctgagatgggacctcaggaagcaacacaggcagaatctgaagatggaaagctgacccttccattggctgggattatgcagcatgatgccaccaagctgttgccaagtgtcacagaactttttccagaatttcgacctggaaaggtacattctgtggagaatgctcagattgcaaaccactgacctcttccaaataatgagttttgttgttaagatgctgagtatggaatggggtttccttactcagtgacatattattggctacataagagctcttcacactgtattaggtcttttttttaaagttgtatgtattgatagtaaatgtgatttatgctgttctcattggaaatttctctgttatcttaaaagaactagcccaaattattaaggaacgcttctttactttcttagacgttacaagtctgaatgcgacactcctttgtttctcccccacatttgaagagatctctcaagggagttttcaggcccagatgctgctgttttcccatctgactttgagtctgtgtcatagtaatgtattctgtgttctaggtgttacgttttctacgtctttttggaccagggaagaatgtcccatctgtttggcggagtgctcggagaaagaggaagaagaagcaccgtgagctgatacaggaagagcagatccaggaggtggagtgctcagtagaatcagaagtcagccagaagtctttgtggaactacgactacgctccaccaccacctccagagcagtgtctctctgatgatgaagtaggcaaaatagagacctgagattaaggcctatgagaggaacaaatgaattcaatgagttctccctaatttatgtctaaattgtaaataataccatagcagatagaatctgtgctaattttcaatgagtaatcatgggttcaatctcagtggctgccccttccctattgtaaaagaaaaatgtttggtggggtaggcggggatgagaggggtagatggtgatatgctgctgaataagaaggtttgattgataggtggaatgtgctatgatacatctccattgtttacattctaactccaggtaaatcatcctcagtttctctaagttcccctcctgactgttaactctctatagccttaggacatctgggatcaggaaattctccctgctctacttctttcttctgttacagatcacgatgatggctcctgtggagtccaaattttcccaatcaactggagatatagataaagtgacagataccaaaccaagagtggctgagtggcgttatgggcctgcccgactgtggtatgatatgctgggtgtccctgaagatggcagtgggtttgactatggcttcaaactgagaaagacagaacatgaacctgtgataaaatctagaatgatagaggtgagcaacactggtatgtaagaaaggaatcaatgtactcaggtcctattacttttactaactttactctttaattggggagatactgggtggtagggtttctttggtgggagattgaggtgtctcagccttttatttggtatggtgtatcaccctggtagctaggtcctattctaaggattctgtttgtgaaatgaatgctgtgccagactaggagtgggaagaggcaaatattcctccgttatcaggtggttgtttcaagtaaaggaccacttacaatgtgtctgatgtatctttaatgtggaatttggagtggaaaccttgaccagtgaccaatcaaggatgtgttttttcttccctacttacacaggaatttaggaaacttgaggaaaacaatggcactgatcttctggctgatgaaaacttcctgatggtgacacagctgcattgggaggatgatatcatctgggatggggaggatgtcaaacacaaagggacaaaacctcagcgtgcaagcctggcaggctggcttccttctagcatgactaggaatgcgatggcttacaatgttcagcaaggtgtgcttctgtgccagctgtgtctagcagatactgcccttaatcttagtcaccataagtgggctcagctgtgatttttttttttttttttttttttcggtgagacagagtttcgctcttgttgcccaggatggagtgcaatggtgcagtctcggctcactgcaacctccgcctccccagttcaagcggttcttctgcctcagcctctggagtggctaggattacaggcgtgcaccacgatgtctgactaatttttgtatttttagtagagatggggtttctccatgttggtcaggcaggtctcgaactcccgacctcaggtgatcacccgcctcagcctcccaaagtgctgggattacaggtgtgagccaccacgcccggctggctgtgatgttctgagctgccaagagatagtgaaatttttaggatctgaggcctaattctagtccctgtaatttttattttatttttatgctcaacctggaggaagatagtccatgtaattttttgccctgttaagaagctaggccagactcaggtttcttaaaaacatgtgataaagatcttttttttttttttttttttgagacggagtcttgcttgctctgttgcctgggccggagtgtagtggcgcaatctcagctcactgcaatctctccctcctgggctcaggcgattctcctgcctcagcctcccgggtagctgggattacaggcatgcgccaccatgcccatctaattttgtatttttagtagcgatggggtttctccatgttggtcaggctggtctcgaactcccgaccttaggtgatctacctgcctcagcctcccaaagtgctgggattacaggcatgagccaccacgcctggcctgaagttaaagatctttctgaactataacagtactttatagtatatttttgttcccaagtccctttgtatttagaattctag

SEQ ID NO: 137779 - DNA, 1954 bp, Homo sapiens
atttattttttgagacagaatttcactcttgttgcccaggttggagtgcaatggcacgatctcagctcactgcaatctctgcctcctgggctcaggtgattctcctgcctcagcctcctgagtagctgggattacaggcatgtgccaccacacccagctaatttttgtattttttgtaaagatggggcttctcaatgttggtcaggttggtcttgaactcctgacctgaagtgatccacctgcctcggcctcccaaaatgctgtgattacaggtgtgagccaccgtgctgagcctgcaacattattttaaagtgagaaatacactgtgtaggttccttttcagtggacacatgaataactccactaactcgctctactaacatgagtaactctttttatctttgccagaatcttgattgaaaggggcataaatgttttctctgttactatttcctccttgcactttgactaggttttgcagccactcttgatgatgacaaaccttggtactccatttttcccattgacaatgaggatctggtatatggacgctgggaggacaatatcatttgggatgctcaggccatgccccggctgttggaacctcctgttttgacacttgatcccaatgatgagaacctcattttgggtatattactggcagaggccagtgtttcttctcctttgaaaacttgctgttaatgtcaacgggcaggaggaaatcagaagggttggagatgattaggactagaaacctgtaggtagcggcttgagagagcgaagttttggctgttagtttatattatttgtgtatatgcttagggaacactcacgtaggaatgttggaaagttgcaactttgagatgtcaagagcatagtttgttccgttagtgaatcatggactcgaaacttctaggtagcagtttgagagagcaaaattgtggcagttagtttttattatttgtgtattccctagggaaaactcatgtaggactgtcggaaagtagtacctttgagatgtcaagcgtgtagttcacttagtgaatcatgtactagaagtgatttgggatgggatgaaaagatacaggtgtagttcagttagtaaatcgtggactagaagttacctgggggggggtgggatgaaaggtctagttaagaccttcactggaacatccgtcaccttaaagaagaaaactggatacttgtctgtaggaaaggtgaatcttcagggagagcaactcaagtgatttttgttttattctcagaaattcctgatgagaaggaagaggccacctctaactccccctccaaggagagtaagaaggaatcatctctgaagaagagtcgaattctcttagggaaaacaggagtcatcaaggaggaaccacagcaggtgtgtgaagaaaaaaggggcttggtgtttagaagaacaaagaaaggtaatagagaaggatagtctgaccgagatttgtttgattatctatcattagaacatgtctcagccagaagtgaaagatccatggaatctctccaatgatgagtattattatcccaagcaacagggtcttcgaggcacctttggagggaatattatccaggtacaaatagtgtcttttctgtgatagaggagaaccccatggctttgttctgacggaggatatgggaaaatcttgcttaggatggaattagctaattttaacccttctatttcctgttttagcattcaattcctgctgtggaattacggcagcccttctttcccacccacatggggcccatcaaactccggcagttccatcgcccacctctgaaaaagtactcatttggtgcactttctcagccaggtccccactcagtccaacctttgctaaagcacatcaaaaaaaaggccaaggtataattgaattctggttagaaaacagctataaaggatattggggtataaattaaggga

SEQ ID NO: 137780 - DNA, 1021 bp, Homo sapiens
tgcctcagcctcctgagtagctggactacaggcgtgtgccaccacacccagctaatttttgtatttttagtagagacagggtttcatcatgttggccaggatggtctcgatctcttaacctcgtgatctgcccgtcttggccttccaaagtgctgagatacaggtatgagccaccatgcccggccaatcctaaactttttgagcactatgatgatactcaaatgctcattggagcattttggatttccagatttgggatgcccaactggtaagtataatgcaactattccaaaatccgaaacacttctggtcacaagcattttggatgagggatactcaacctgtattagtaaagtgctatggtcatattgtgtaggattattgatatattctaaataactgggtcttctgtgttccttatagaaacctggaaaagatcctggagcaccagattgtaaatatggggaaactgtttactgccatacatctcctttcctgggttctctccatcctggccaattgctgcaagtgaggaattctttcctgtttttactgttaactaaggaaattgataaatgaggaaccagtcagctcagaaagaactattataattctagttgattgagatgctttaattttaagtacaaagaaaataagtataatccaaaaatgttttaaagaaatctttttcttaaaactggctgtgaattgtgttattctcaggctaaatgtaaaataggtttttaaaaatacacactggtaagctcagtaacatctgggaagcataaggaagtcaacctaggatgaatttactataaatttactataatttatgaatatttaatttttgtgtataaaattgataacattttgatcacattagctgtggttattgtgaatattgaaccacacctgaactgtgccatctacagtccccagccatagtgaaatgctttttttttccctcctttgttctaatgggtgtaaagaggctctcttataacagcttttatatattcaa

SEQ ID NO: 137781 - DNA, 2478 bp, Homo sapiens
taattagtttaataatttattcaacaaatgttgctctcacacgttgtgtgttgggctacactggggtctagggtagtagtatagtacttggtacattatgaagtgattttcatatgtaatcttcatagcagtcctgtgaggtataggcatttttaagtatctctgttttgtagatgaggaaaactaaacttagacatgttaaatagcttaaatagacatgttaaatcatagaggtaatggcagagctagcatcatctgaattcacatcctgtattttctcccctactgactctgaaagatagtggatgaaaaattgtttagtcacatttgataatctatattttaatttatttgtattactggatagaccttagatggcgtaattaagatggagagcaataagcttggtatttctttctcagcagttgactgaatttcctagggctactctgtatataatttttgtgtttttacttttgttaggcatttgagaacaacctttttcgtgctccaatttatcttcataagatgccagaaactgatttcttgatcattcggacaagacagggttactatattcgggaattagtggatatttttgtggttggccagcagtgtcccttgtttgaagttcctgggcctaactccaaaagggccaatacgcatattcgagactttctacaggtaagaatgggaggatagggaggggattgggttgtatacagaaagggtatgttggggccgggcatggcggctcatggctgtaatcccagcactttgggaggccgcggtgaatggatcacttgaggtcaggagttcgagaccagcctgaccatcatggtgaaaccctgtctctactaaaaatacaaaaattagctgggcgtggtggctcacgcctgtgatcccagcactttggaaggccgaggtgggcggatcacctgaggttgggagtttgagaccagcctgaccaacatggagaaaccccgtctctactaaaaatacaaaattagccaggcgtggtggcacatgcctgtaatcccagctactcaggaggctgaggcaggagaatcgcttgaacctaggaggcggaggttgcagtgagccgagatcgcaccactgcactccagcctgggcaacaagagtgaaactcagtctcaaaaaaaaaaaaaaaatttagccaggcatggtggcgcacgcctatggtcccagctactctggaggctgaggcaggaaaatcactggagcccgggaggcagaggttgcagtgagctgagatcaaggcactgcactctactctgggtgacagagcgagactccgtctcagaaaaagtaggctgtgtgggtttgggagcacatcgggaaagatgaaaatacattagagcttagcaaaggaagaggccctagtgaggacttttatccttttctttgccaaataaaatacacttggtttgttgggcaggtttttatttaccgccttttctggaaaagtaaagatcggccacggaggatacgaatggaagatataaaaaaagcctttccttcccattcagaaagcagcatccggaagaggctaaagctctgcgctgacttcaaacgcacaggtcgtctgttgtgactagttatttgtctgcctttttccaagaaaagaattttgatggctttgagttaaaggataagcatatagttaataaaatagaaattgatggctgttgaaaggaggtagcagatcttctaacactctggttgcttttttgaatttggctgccaggaagtttaatgtgattgttggatatcttctatgagttgtaggaaacttagcagctggggttttcttggccagtcatgccaactgtggctaggcctgttacagttttggtttgctgtccctgttgctgtcaataaatatcagggcctttggaattcagaatggtctcattctctatgtatatgtcttttccagggatggactcaaactggtgggtgcttaagtctgattttcgtttaccaacggaagaagagatcagagctatggtgtcaccagagcagtgctgtgcttattatagcatgatagctgcagagcaacgactgaaggtgaacaccttcctcttagacaccacttatgcctgtggttttttgtttttttttttcttccccccagagagatgagagagaagattctttctctgactggcttagggaggatggtttactagattattaccaattactaaaaagttcaatttgtataaagtacttctacgtacatcagttctggagaaaaactatagtgtagctaagtatcagtgggaaggcataatgaggaactttgggcatattgttttgctttgaaaatggtgactgggtgactttaatctcttctttgcaagataagcatataagcagggaaagtacttgtcagcctctcaggtaggcagagatgatgatggtgctgaatgtgtggtttagagaagcacagaa

SEQ ID NO: 137782 - DNA, 1081 bp, Homo sapiens
ggactataggtgtgcgccaccacgcctggctaatttttgtacttttagtagagatggggtttcaccatgttggccaggctggtcttgaactcctggcctcaagagatctgcccgcctcagcctcccagagtgttgggattacaggtgtgagtcaccacacctggcctcatgtactcctgactggtctgtgtgggcaggcacattcaccccttggcttaattctttaagaatcttgcaggggttggtaaacactattcagggtcccaggagaggacagacctttttgaccaaaccagtggcagaaatagaatggactttggtttagtgtcactggaaaaggggccaatgctttgaaagcaagcatgtcaagtatttcgagaaaataggtttcattctaaaacagctgtttgagcaattggacaatcaaatgtagtcattagtctaattttgagcatcatgagggtgagggaaacactgtccttaagaatgtttattgaagcccaagggataaggggctgaagggataccactgttctttatttttctccttatcctgcctgagctcttgacctctatttaatatcatgttgtaagtattgtaccataggatagaagagaactgagtactaggtagctatatttaactgttgatttttgtggacagtttaagagagcatgaacccacagaaattaaaaattagaaaaaaagaacatgaaaatagtttgtaattattctactcttgtagatattggctagacatagaacaaatgtttcccactgccctgagaatctttttctttatctcaggttcgcactgccccttggaacaccacaagggccttcattgctgccatgaagggcaagtgtctgctagaggtgactggggtggcagatcccacggggtgtggtgaaggattctcctatgtgaagattccaaacaaaccaacacagcagaaggtgagattgtgtttatttctagaatgaaaaagtcaagggagaaagaaatgggtgagtggaggacttggaatgtagttaaggtagcagaatgacttagatgcctacttaaaaggaattcaggtt

SEQ ID NO: 137783 - DNA, 1856 bp, Homo sapiens
gaggtaggatgataaagaaccgcagccagtgaagaagacagtgacaggaacagatgcagaccttcgtcgcctttccctgaaaaatgccaagcaacttctacgtaaatttggtgtgcctgaggaagaggtgagtgtggaagtggaaaatttagagtatactaggggctttgtatagagttggaattgctaggaggcagatgtaaagaactatctggggaactttattgtagggtatagtaagctaagtcttagatattgttttaggagttatctttctatgtaatctgctttggggtgatttttcttttttggtctaactgtgtacattggcttgtcctttgaaatccctgaatgatttgtgtgtgtgtgtgtgtgtgtgtgtgtgtgtgtgtgtgtgtatatttatatttgtgtgtggctatttgtctcgtagattaaaaagttgtcccgctgggaagtgattgatgtggtgcgcacaatgtcaacagaacaggctcgttctggagaggggcccatgagtaaatttgcccgtggatcaaggttttctgtggctgagcatcaagagcgttacaaagaggaatgtcagcgcatctttgacctacagaacaagtgggtcgttttagtgctgcagaaaatccaagctggaaagggggaggagttccaggcactatttcataataaagaggaggtcacctaaaagtttgactacctaggtagtcagatatctgacatgtcagggtagtatatgtttgtaatcccaccaccagattacctattcccttcaacccaacttggcaaaatttttgaacagaaggaaacgctagtcttgtgttctaggttccatgacaacttttatggcctacttgggcctaacaaatagcacaatggtagcaggtgacaggtagggcttttttctaaaggtttagttgtgagaggatgttaatacactattaaaaatgaccagtgtgctgatttatttatcaagttgtctccaggaattctgaaagagttactacaatttttcaaacttatcttgttgaccaaatgtctaggaaaactttgtaaagcttttctgttaagggccccatgtcttagtggattttgagtatgcctttttaaggttgatttcccaattttttacttttgcctgcaaccatatttctttagttctttctgcacattgctttttctctttttagggttctgtcatcaactgaagtcttatcaactgacacagacagcagctcagctgaagatagtgactttgaagaaatgggaaagaacattgagaacatgttgcagaacaagaaaaccagctctcagctttcacgtgaacgggaggaacaggagcggaaggaactacagcgaatgctactgggtgaggatcttggcttcacagacagataaaaaagagaagggttaaaaaaggagcctacgtaactgcagactgtaattgagggagatctggaggcagaagatgtaagggatgcatgtagaaaagtctgtgaatgaagtagaaagctttttacaaactggactctaggattgtctgtggaggaccaattgcagagatgatgccactccactaactgcctctgtatcaggtgcctggccaagcctgggctattagtgctgtacttcaaatgagctttttgtgcatttatcctagagggtaagagtttttaatacagaatttgtaaatgaatttagggagttatctttgaaacttctgaaattacatgtaaaatatgtaaatgtgcattttattatttttttattttggagacagggtttcattctgtcacccaggctggagtgcactggtgtgatcttagcttactgcagcccccgcctcc

SEQ ID NO: 137784 - DNA, 1066 bp, Homo sapiens
aaaattgtagaaattgagggtgggaataataaagacctgaattgggttgggatatggagggcattaaggatgaaaatcaaggcaaccttaagatttcactctgggattactagaaagatgttggtaccattgattaaagtagtgaatttcaaggtctgacatgctggctcatgcctgtaatgctagcactttgggaggtcgaagtgagaggatcatatgagccccggagtttgagaccagcctgggcaacatggtgaaaccctgtttctacagaaaatacaaaaattagatgtggtggcaggcacctataattccagctactcgggaggctgaggtgggaggatcgcttgagcctgggaggcagaggttgcagtgagctgagattgcgccactgcattccagcctgggtgacagggtgagaccctgtctcaaaagaagttaggaagggaatgtgtaatatgtggagtttgaggtccctttgacacccttgaagtatacatgttaaagaggcagttgaaaacttggttgttgatactgcgagagaggataaaggctgatgatgaagatttatatggcttctcagtcacagtagtcttccctttgtttcctcttttctgtaaaagttttgtgtaatttcattgttttgggtcctttgtaaaaatgtgatatagcccttccaccaatgtggtcatctatgttttctagtatagtcctggaacacagtatctgtatcatttgggaattagaaatgtggaatctcaggcctcactccacatctactaaattagaacctacatttgcagccgggtgtggtggctcacacctgtaatcccagcactttgggaggctgaggcaggcggatcacctgaggtcaggagtttaaaaccatcttggccaacatggtgaaaccccatttgtacaaaaattagccgggcatgatggtgggtgcctgtaatcccagctacttgtgaggctgaggcaggagaatcgcttgaacccgggaagcagaggttgcagtgagctgagagtacgccattgaactttaccctgggcgacagagtgaaac

SEQ ID NO: 137785 - DNA, 1050 bp, Homo sapiens
catatttaatattttcatagtttacaacttaaattgggagtggaaatcttctctttattcttcttacctgatttttaaagcaatgtttagtctctggatttcattttttttctatgtgtcatttccatacatgcagatttgtctagtggcttctggttgatcagtgcataacaattctattagagcaaaagttctgaagctgactttgtttttcccatcttgtatgtacagttgagctttgaacaacataggtttgaactgcatggttccacttatgcgtggatcgtggtacgtggagcctgtgtatatggagggctggctttttgtatatatgggcttcactatgtgtggattttggtatacttgggggtcctggaaccaatcccctgcatatactgagggatgactttatttcttacctgcttatctctgatatgtgtttcagcctacttacctctgacgtgtttgatacttttccttttgcagctgaaatgtggggcatgtggtgccattggacacatgaggactaacaaattctgccccctctattatcaaacaaatgcgccaccttccaaccctgttgccatgacagaagaacaggaggaggagttggaaaagacagtcattcataatgataatgaagaacttatcaaggttgaagggaccaaaattgtcttggggaaacagctaattgagaggtaagagataccaggcaggaagtgctatgggacagatttatttgaggttggttatattggtggctggcaggggtagatgtgatgtgttctctgaagtggaactgaaggaacaggaattttgatggcgtttcctcagttattgttgccagtaatgaaaattatagcgctgattaggttgtaccacttgttttggagcatgctgcctaacttctgagtctgtttccttagttacaaaataaaaccacctttaccaggatagttaagaagataaaatgagacagactacaaagcatacagtacagtgcctgacatatagtagatgtcagttatctcttcttgttctacttctaga

SEQ ID NO: 137786 - DNA, 1009 bp, Homo sapiens
tgtgcgtggtggtgggcttctgtaatcccagctacttgggaggctgaggcaggagaatcacttgaacctgggaggtggaggttgcagtgagctgacattgcgccattgcactccagcctgggtaacgagcgaactacatctcaaaaaaaaaaaaaaaaaaaagagaatgttggaactagaaggattcttaaaattctttagtctggtttccttatcttcccaataggaaactgaggtaaaattgtgacttgcctagttatttattaacttggagagcctatgagggcttgcctgatctgaaccttagaaggtggatgtttggcctttggtttggctttttcctcgctaggctcgtgcttaggtaccttggacttttttttaattatagttgctttttttccccctgggaactagaaataggggctgtatctaactaaagtgttttgattttagtgcggatgaggttcgcagaaaatctctggttctcaagtttcctaaacagcagcttcctccaaagaagaaacggcgagttggaaccactgttcactgtgactatttgaatgtgagtatgtgcattgcttccttctgattaggtaggttatcattgattccccagccctgtatgccacagctctgacagccttagattctccagttgccttgccctgagaattatttgtactgttcattataagatttctaaaatatgtttgtctagttagagaaagtggatttttttttttttttttgagacggaatctcactctgtcgcccaggctgaagtgcagtggcacagtctcggctcactgcaacctccacctcccaggttcaagcaattctcctgccccagcctcccaagtagctgggattacaggtgcacaccaccacacccagctaatttttgtatttttagtagagatggggttttgccttattgaccaggctggtcttgaactcctgacctcaggtaatccactcgctttggcctcccaaagtgctgggattacag

SEQ ID NO: 137787 - DNA, 1062 bp, Homo sapiens
ggacagaatgtggattttttttggtctgaggaagcattctgatttcacatttctccttagagacctcataagtccatccaccggcgccgcacagaccctatggtgacgctgtcgtccatcttggagtctatcatcaatgacatgagagatcttccaaatgtgagttcattgcattggatatctatagtagggatgtcaaggccttttgttctgtctgtgatttccaatagagggcagtaatctgtagatttaggtaactggaatgcctaatttttagggagttagttttttttgtttgtttgtttttttaagcagtttagtagaggaaacagacgtgctccatctagaaagattcctttcagtgttgatagccaggtagataggtaagatgtgaaagtcttcaggaattggctctggcaactgttatttgctgatgtatggttctggcccttgtttgcagacataccctttccacactccagtcaatgcaaaggttgtaaaggactactacaaaatcatcactcggccaatggacctacaaacactccgcgaaaacgtgcgtaaacgcctctacccatctcgggaagagttcagagagcatctggagctaattgtgaaaaatagtgcaacctacaatggtaagaatcaaatgttccgtgattgcaaaggtcactgttcagatccttattccttactggccctaaattcagactagattggactgagaggactacagtgtatttgtgcattcatttgtgggtatgaaaatcaggtaatgtacattttcagtcatttaataaatatcacttctttttttttaaggagggggttggagtctctgtcatccaggctggagtgcagtggcgcaatcttggctcactgcaacctccgcctctcggttcaagcgattctcctgcctcagcctcccgagtagctgggattacaggcatgcgccaccatgcctggctaatttttgtatttttagtagagactgggtttcaccatgttggtcaggcttgtctctaactcctgacttcgtcatccacccgcctcagcctccca

SEQ ID NO: 137788 - DNA, 1040 bp, Homo sapiens
aatcttaaactttttgaatgcctgcttgatgctctaaggaaatcctcattggagcatttggatttctaattttcggattagggatgttcacatatttgcagatattccaaaatatttcagattcttaaaaaacctgaaatctgaaacacttgcggtcccaagcatttcagataagggatactcagtctgtacctaggagccgaattgctgagtccacatggtaactcttatgtttaattaactttttgaggaactgccaaactgtttgccagagcagctgcaccattttgtaatcccaccagcagtgtataagggttccagtttcttcatatccttatcaacacttgttattgtctatctttttccttctaaccatcctagtgggtgtaaagtggtatttcattgtaattttgatttgcatttccctattgactaattatgctgaaaatttttgcatatggttagaaataccattcttgaacttttgtgcatttgccactattgaccactttttcctccttgatactgtcttctcccttttccagaaatactttctcgaatcatttccttgccttttcattctcattacttcagccataatatatctgttaacatcactatctccagccccatacctctcttcagggctccatacctgtgcttctagttgtctgccagacatgtccatttttcattgcccaactggcaacttattgtctgattgtctatctagttgtacatcctagaaatcatagtcataatttattccatcttcacttccccatactcatagataaccaagtcccataaattggaaattctaagttgccaatggaaaaacaaataacaaagatactggtctggggttaggagagtgttcgcagtcatcatactcctcttggccagcagtgtcccacgtgttcaggctaacgatttgcccatccacggatgtctggacgctataattgtcaaagacagtggggggatatactcctcaggaaagacatttgttgtataactgatgaggaggcaggttttac

SEQ ID NO: 137789 - DNA, 1202 bp, Homo sapiens
ctggtatgtgattttaaatattgacctttttgctatatgggtacattatcttttttttttaagagtacattatcattgaaatcaaagaggccaggaatctttggatgtagggaggtttttgcttcctgttgttgacattcagtatatgaatgctcctgaatagccctgtagagagaggatgctagcgaatgtgaggcttttgatttagaggtgcttctaagcaaatgatgctttgataattagacaccattggttgtcttttatttcatttttatattgttacagtgatcctccccaggaattctcaacagagtttccttttgtactataggaatgtgttctatatgtgtaatgctataaaacttctcgttgggactagggaataaggaattttaattatgactatacagcaagtgtttttatcctatcatggcatagaaatccttaaaggaatctatgaaccccttacattataaacagaagttttgtatgattatgtgtttttctaggaaaagagtccatagctttttttaggaatatttgtaacccaacaaaggtggtgaaattctcgtatgaagagtggtttccatttaatttcttatgctttctatttactagtcttggccatttcatcacccagttaataagaaatttgttccagattattacaaagtgattgtcaatccaatggatttagagaccatacgtaaggtgagtgagtgatttgatctaaatgcctttttgtaatcaagtgactgtgtgtgtgtgtatctgagtgcctgattcttttcatcacagaacatctccaagcacaagtatcagagtcgggagagctttctggatgatgtaaaccttattctggccaacagtgttaagtataatggtgggtatttctcattattttctttccatgaatccgtccatcttctatccatctaacattacttagcattattaaaaaatttttttttgagacaggatcttgctctcttacccaggctggatgctgtggtgtgatcatagttcactgaaccaggcacacgccaccgtgccaggctcttttttttttttttttttttttttttggtagagacagggttttactattttgcccaggctgagctcaagcaatcctcccacctcggcttcccaaaatgctgggattacaggtgtgagccaacacgcctaaccagtattattaa

SEQ ID NO: 137790 - DNA, 1017 bp, Homo sapiens
gaataacatatgccaggccctgtgctagctgcttaatctactgataagaaagacagtcactgtcctcaagtaattcacaatccagttggcagaaagagacaattaaaatgcagcttggaaccaggcatggtggctcatacctgtaatctcaacactttggtaggctgaggtgggaggattgcttgaggccaggagtttgagaccagcctgggcacacatagcaagaccttccttgtctgtataaaaaacttataaacaaaagcttagctaggtgtggtggtgagtgcctgaagtcttaagatatttgggaggctaaggcaagaggatcacttgaactcaggatttcaagactgcagtgagctatgatcacgcccctgcactacatcctgggcaacagcaagaccctgtctctataaataaataaaataaataagtaaagtgcagcttgacaagagctataatagaagtatgtgcagattgcatcagacgagagcaaggaataacctgagagttagggaaggcttcataaacgagctaatatagttcagtttttaatgactcaatttttaaacattgagtacttacatgcgctggcactgatagatgttactaatatcaaattagatatggtctctgctccaagttagtttagttggagaaacagaaaagaaaaattatagtacttaaattttattactataagcatgcacagagtgtcacaggacagtatatctaaattagagtggggctgggtgcggtagctcacacctgtgatcctagtaccttgggaggccaaggcgggcggatcatttgagctcaggagtgcaagaccagcctgggcaacatagtgagaccccatctcagaaaaaaaaaaaaagtggggttagaggaagctttctggaagagggttttctttcttctttttcttttttgtaaatagagatgggggtcttgctgtgttgcccagtctggtctggaactccagggctcaagccatcctcccatcttggcctccca

SEQ ID NO: 137791 - DNA, 1691 bp, Homo sapiens
ttgaatttctagtttagattctgagtgagattatgttactctggtttaagagactgaacctcttaatcttggaaactaaacatcctaatttacatttgatcctcattctacataaggtaaggagcctagctatattgtgaaagattagattcacttctctttaattttcacttgttttggatctagtttgaagataaatatctaagaattgcaaagtcagagctcatctctttgggatctggactatgtgtagttgcatttagtaattctaatttctttaggaatttagtatgcagatttttctttttatatctggcactgatctttttttttaaactttctacttctactgagcttttattttttaattttaatggttcacattggaacaaatgcatatcctcacaccatccactgtcaagataataatttatgctgttttgacagagtactcattttcttagggaggaattatttttagtatttgtggaagagttctcaagggaaacatgagcctaggagtgatcacaaatcccctcttctccttggtgcccaggggtgcttgccaacttgactggtgtttttctctgaatcttttcagaaagttagcagcaataggttgggcgtggtggctcacgcctgtaatcccagcactttgggaggccgaggcaggtagatcactggaggtcaggagttcgagaccagcctggccaacatcgtgaaactctgtctctgctaaaaaattagatgggtgtggtggtgcacacctgtaattccagctacttggggaggctgaggcaggagaagtacttgaacctgggagacgggggttgcaatgagcagagatcgcgccactgtactccagcctgggtgacagagcgagacactgtgtcaaaaaaaaaaaaaaaatagcaataatgcttgctttccccccttactggaaccatgaagcttgtgacttgcgtttcttctcacatcaccatacagaaggaaattaacttataaaccagaaaaggaattttcttggtggaatatcaactttccaaagctgtcattggcattatctctatttaaggacatttgaattcgaattgtatgtgattctgtagaccctaccgctccttatttggtatgaggcaaagtataaataaataacgtttctccaacgtgacatgtagagttgcttcagccatgatttaacaagaagagaaaaagcaaaatatactcagaaaaaacattccttttcgtgagtgggtagcttattcttatagtgacaagtcacagattatctttcattcattttggtgtcattctagaaattctttataactgaattctggttttctgtgtagtaaccctttagggactgggaattggagttcaattctgtttaatcttcttcccagcccccctacagtagcttcagcaactttactattcctgtagaggctctattgtctttgtctctttacttggattcctcatttcttcctaagctacaaaacctatagctgatcatcctacttttagtaagctcctgattgctccagaatgtagaacgatatttttagatttttggagatggttatggatctctgtgaaaatccgatgaaaaactaaggctgttctgctctcaaaaatgtatattacatacagaattttgtttatagttctaagggattcatagctct

SEQ ID NO: 137792 - DNA, 2050 bp, Homo sapiens
ggtcaaggctgcagtgagtcatgaccatatctctgcattccagcctgggcaacagcaaaaccctgtctcaaaaaataaaagaggtctccttgggatctagctttttgaaatcctgttcccttgaatgaggagctttccctgattatcctattttaaaatgtagtattccctaccccccaactccgcatcccctgtttccttccctgcttaatttattttgattattatctgtgtcctgccactagaatataagctccatgaagatagatatttttgtcttttgtttacttttgtatccccagtacttaaaatacatgttgaatgaatttattttctttgtttctcagtatgatgaacatttgactcaacttgagaaggatatttgtactgctaaagaagcagctttggaggaagcagaattagaaagcctggacccaatgaccccagggccctacacgcctcaggtgagtctgaggactaagtacttcctcatatagttttcttattggtttgggaaattgggagcatgttaacaaatccgtttactgagataccattcttctctgtccttcctcttcatatgcctttcgtgtgctttcttgtcttctcaaaggctaaggtgagtgagggccatgggtcttggtggccttgaatccagaaaaggcagctgtgggatgaatgaatggggtggggccttagttgtttaggcagtgtttgggaatatcagatccctgacccagccatcctctgggtctcgggaattttcttgtccatgaattttgggactctagaacatccctagagtgtagacttctcagttacagacatgggccatattgttcctgtgccttacagacacttgattactcattccctcagagatatctcagtgtagctcagaagtcacccattttcctggattgactcctagtaaatgaagaaaggtagtattaataatgttcttaaatgttcatgtcaaaagaatgagagagcaggataaataagaaatttttagtcttcctggtctaactgaacccttgaaatacactaagagtatatttcctccatactgtactcttagagggttggcatatttgaagaataggacttaacagaatatcactggtgcttggtttctgtattggaggcactatggtagggtggaaagtacataagaattgacataaagcaggcctgggtttgagtcttagttctcctgctgtctagctttgtaatcttggaaagttaacctctctcacttagtttccttttctctgaaatcttttcaagattgttgtaaacattaaatgaattaatttaatttgcctgacacatctttatctgttctctgagaccctttcaaatttaatcaaatattttaatgcagaactctgccaattcccacaggaaaattttttttcattctatccaggtttccctctgaactgataatgcaacctatgtgacctctgttggattattgctgtctctatatctcgttcatgcactatccctatctatcttttactctctctttcatctcacaacctaggttactgaggggccaggtataaaagaaccctcagatacttcttcaaggtccagaacaaggaaaggctcttggagtgtgtgggcagattgggtcaagggggcttgggtgagtgatgttgcccaggaaggccctatttgctaataggcccacagcttccacaaggtactttctggtaagttaaagcctgggtattagccatcattccccaggagagtctagccattgaatggcacatggtttgctcatttctaggacagcctaagcctagtcctttggtgagtcaaagccttagaccccaaagtcaccttcctttcttcactacgtctcccagactacctcaaatggctaaggacaacctgttagctatttctctcttgagcattagctgtcatttggtgcagttagagggtttcctatgaagagtaggattagatagtactgcttcattattccagttcaccttttcatcattcccttcactcacaaacagtttaagat

SEQ ID NO: 137793 - DNA, 2550 bp, Homo sapiens
gctatttgtgttccttactcagatgcgccagggccgaggtaggctgggcgaggaagactctgatgtagatattgaagggtatgatgatgaggaggaggatgggaaacctaagactccagccccagtgagtatgcttatagaaagcttatggttacgttatgcccttatatgataggagccccatcagtacaggccaggccaaatcctaagatgatatcagggggtctccttagtgagccccaatctgactttaatccttgggaccaactaaacagtctatccaccaaaaataattacttaacttcttgtgaggcagcaagtggagggatgggcggggcggggagggggggtgtgcctggtggtggcttctggtctcttatgtggtcagttgataggactttgacccccaactggtctcattcaggaaggtgaagatggagatggtgatcttgcagatgaagaggaaggaactgtacaacagcctcaagccagtgtcctgtatgaggatttgcttatgtctgaaggagaagatgatgaggaagatgctgggagtgatgaagaaggagacaatcctttctctggtaggcctcaaccattgcttctattcctttataactcactacagcaccctcagaactggactggataggcgctcttggccacatatgcttttattggaagctgcctcttttattgaattcctattaatagacctgagagtactgagcactcaggcgtaggatgatcatattcattagcaggaggtacaaaagacaacagtggaaaagacagtgcctaagtaacagctttgatctggatacttgttaaaggctgggcacagtggctcatgcctgtaatcccagcactttgggaagccaaggtaggaggaacacttgagaccaggagtttgagaccagcctaggcaacatagcgagaccctgtctctacaaaaagtaaataaataaaaattagctgggtgtggtggcgagtgcttgtagttctagttaggaggctgaggcaggaggatcgcttgagcccaggacttcaaggctgtagtgagccatgatcataccattgcactacagcttaggcaacatagtgagactctgtctccaaagaaaaagaaaaaaagatgagaacagaatgatcaagtgttatatgtggcaacagggaaggaaaattaagaaaaatcctgtttggggatattttgtggattaatggcaatggccgaggaaaagtatgggagtagatggtagaaaaaatacagataggttggcatgagatggaaaaggaaattgttatttggattcagattctaaactacaaaccttgctgctgttgaccctaggcagttataagaggcatttgaggagaggcgtataggcaagatacctgtgtagatgtgtgagagttactagtttgggaagatcaagccaaagatcaagttaaatctgtcaagcttaactcttgatgacccagaatctgtctctttttacagctatccagctgagtgaaagtggaagtgactctgatgtgggatctggtggaataagacccaaacaaccccgcatgcttcaggagaacacaaggatggacatggaaaatgaagaaagcatgatgtcctatgagggagacggtggggaggcttcccatggtttggaggatagcaacatcaggtaatcgacagcaacatgctacagggctgtggcatcagtgcccagctatgatgttgaggggcccaacatcagattacttttcatccatcaaacatttcctgggcacctactagggccaggcactgtgctaggctctggggatacacagaggagcaaaacatatcctgcccttgaggagcccacagcctagtggaaaagactgacacaaacaaatcattacaaatacaatgtgataagtgctatagcgtaagtaagacaaagtgccaaagcaccactgagaagggagtgtctcagtctgcttggagttatcagggaaagtttcacagacaagggaacatttgaattgggccttaaaagattaataggagtttactaagtaggtactatggcagggggtggggagaactttataggtggaacaatgtgttcaaagacacagaagtagaacacaaagtatgttccagagcaaatggaagttgttggggagttgaggctccagaagtgtagcaagggggattatattgtgaaggactttaaaaggcatgctaagacctttggaccttaacctgcgggtaataggagtcatcagtttaaggaaaaggaagtaacatcaaatttgtataacttaggacaatgtgggacacatgatgaggatatcaacagggacttgtcaggagtggggaaaataaagggacataaagaggtaaggaggttagatgaataatgaatggagatgtctggtagaggaaagaggaagaatacatattagatggggcaggaaaggaggaaaaaatggatttggatttggctttggacaagttaaatttaatgtatctatgatacatctaaccagcaagcagataatatgcaataa

SEQ ID NO: 137794 - DNA, 3419 bp, Homo sapiens
ctaatagtggaataattggagacagcttaaatgtcctagtgagagactgttaagtcatgttacagccatgtgtggaataccatgtagctattaaaattatgctatagacgttatgtttattgacatggaaagatgttcattataatcattagtgaagagggcagatttcctggagagtatgtagagtatcccaattttgtaaattaaaaaaaatgtttaagcatctaaagttcacaaaaaattttggaaggtaatataccaaaagattatctctggatgatggagttattgatttttttaaatttttttctggtgtatattctaatttttttaaccagtgaacgtgcattacttgtgtgatttttttttcaagtaaaattaagaataaacaaacaaacaaaaaaataaagagcactctggcagaagtgtgaagaagtaattggaggagagcaagactggcggcatgacgacttatttcagtagtgcaggccagagataacaaaggactaagccaaggtaggcagagtagggatggaaaggaggggatagagacaagatatattgaagagagaatcttcaggactattgactaattggatactgtaagtggtagatgaaaccatgaggctgtcagagcatttatggtcatgtaagatggcagtgtgttgttcaggtgtaagggagtttcttccattcaggttcttgtgtatatgacgttggcaagttgatgtttttgaacagggtcatttttctctcagggacatgtagaatagtccagaaccagtcactttagtgtccaggggaggtgagatgggctgatcctttggtggcactgagaatgggaatggtcaggtagaggatggtgtccgagcttgagagatgacatgtttctcttctcagttatgggagctatgaggagcctgatcccaagtcgaacacccaagacacaagcttcagcagcatcggtgggtatgaggtatcagaggaggaagaagatgaggaggaggaagagcagcgctctgggccgagcgtactaagccaggtccacctgtcagaggacgaggaggacagtgaggatttccactccattgctggggacagtgacttggactctgatgaatgaggcttcctttgggcctccttggtcagccttccctgttctccagcctaggtggttcacctttccccaatttgttcatatttgtacagtatctgatcctgaaatcatgaaattaactaacaccttagcctttttaaaagtagtaagtaaatgataataaatcacctctcctaatcttcctggggcaatgtcaccctttgatttaaaacaaagcaaccccctttcccctaccactacggaaaagagcaagctcatttttccgtgtcctcctttatttaactccatttattgcttttggtataatttttccctggggaaggaggggaaattatgaaagaactagtaactttatgtcctcttgatgtattaggaaatttccggccaggcgtggtggctcacacctgtaatctcagcactctgggaggccgaggcgggcagatcacctgaggtcagaagttcgagaccagcttggccaacatggcgaaaccgcatctctactaaaaatacaaaaattagccaggtgtggtggcgtatgcctgttaatcctagctactcgggaggctgaggcaggagaattacttgaacccgggaggcagaggttgcagtgagtggaggtcacgccactgcactccagcctgggcgaaagagtgagattcagtctcaaaaaaaaaaaaatttccaagcatggtatcatctcacttttctaatttacaggctggagcagatgagagccctcctgctgggacagagaattgggttctagtggactctgtgctacacttaaacctgtgagacaaaccgcccattattttattatttaattatgcaatgcctagttcctaaatggattggaggcaaattaccgtaaattttgaaacagcctatatgtcagaaatgataatgttgccacctaaatgttttctgtcccccccaccctccccaggggaaatggtaggaaaatggtaagtttcttagggcaaagactgtgtcttctgtttcttttcatgcttaggatatggttctgtgcatagtaggtactcagtaaatgttcctagaatcataaaatcctcaacagatatgttactgagcatctgcttttcatgataagcactctatcagatccttgggatgcaaaggtaaataagacaaatcccttttacccaaagagctcaccatcaagttgggggagggaaagtggaattcaaaacatgttaataaatcatcatagtactgtgagataagtgcaattaagaagctagttataaagtataggggaaatagaggagtaatcatgtctgaaaagtcaggaaagtcttcctagaggtaatttttaagctgattgttttagaattagtagaagcttgccagatggaaaagtccaggcaaagtgtaacatgaatgggaaaggccacagtctagaaatggcagagtgtgttcctagtttgtttgtttgtttgtttgtacctgccttgttccaggaaggatttaatgtggtttatattccagtcctttaatgctggaagggctgagatgagactgaaagatgggcaggaagtatatcatcacaagctttgtgtttgatgttaatgtgtatgatttttatattatgggaaataagctcttagaggagtgatataatcaggtttgtgttttagaaatctgtgtaatgaatgaatgaagaaagaaattgaagaatcatgtaacatatgtgatcgcatttttgtaaaagaaccatgtgtgtttatatgtgtttatatatatacttgtgtatgcaaaggtaaaagtctgaaaggatatatgctaactgttcacaatgataaccccccaggaatgggattggaggggagggggcttctgtgtttgttatgtatgctgggtgggatattgtgcttttatttctatattgtttgaatttttttacagtatgtattatttttgtaataaaaattttaaaaaattccagcagtagtgtggagaatggtttggatggatctagttcaagtaagagagaatggagcccaaactggtgctatggcattgggatggggaggagggggatggatttgagagatctttagggagtaggacttggcatttgtgggtagagaaggaggaatggaaggtggcttccagaattttggttggggggattgggtgagtacatggtattcattggttcattttaacatttatcatgccacctatttttgttttgtttttttagatggagtctccctctgttgcccaggctagagtgcagtggtgtgatctcggctcactgcaacctccacctcccggg

SEQ ID NO: 137795 - DNA, 4536 bp, Homo sapiens
cagaattgatccgtgagagtcgtaaccatccgtttttgtacgaatacagttgataaacttttttagacgcctttggcatttatgtttaaaacgacaccacctgctaagtaacaaacactcttcttaatcgcggtggcaaaaacgtatccgtcccgtgtgtgtttgtttttacccttccgctacactcttaagaaacttggccgcttccgccccagagagtgccctaaccacgagtcgggttgacagggctgctcgcatgcgcggtctccaccgtggtgtttgtcgcaatgggcgctgcgcggaggactacatggaatctcgactttgcagcttgaagtcattttgttggcggcgctggttaccggctacctccgcgcgggcacttgattgtaacagaaagtagttccggcccatgttgtttcggccgaggagccgtcgccgccatttcaagaccgtactaggtagatggtcaattagagttcccagggtttgaagcctgtaactgctgccgccgctcaagccctccagagcattgctacggctgctgcccttgtactactacctccaaatacgttcttgctggtagtggcggcagcaggaccaattacctcttttttgctctccctcgagaagctccagatggcgtcttccgtgggcaacgtggccgacagcacaggtaccggtgtcccgttctaccttggcagatgcccccttggggtctcgcgccgtcctctaccttgtatcactccttccctcccttccctcgaaccatccccattacatcagtgacattgctaagcttttcgtggtctactggcatctgatcacatcgggttttccgctgttgtccgcttcccgaacatttcctcctcctcccttgcttgctttttgctgcctttcttgctttgtttttatttcgtaaatgttctagcattccactctctccaggcgcttttatcacacgtgcgcgcttagaatgtcgtggaatggactgcattggaatccctgccctttcactcctttgcagcggttttctcccctaattccagctcatcgcctctcctttttcccctccatctcctccttcatctccccccccagtcttttccccttagccagatttggtccttctctgccaatctagggcgggggtgccgttccgatgtaatcatatcctcactttgcatcacccgaggacgatcaaaagctcgtcgatggtgccacaagtcacctcgagaagaggggacattgagcagcaccctgctaggcagtgcctttctggtgttctttcggttgagcggtcccggtttagattggaaatttccaggggtttcctttgccatcgcccaattccaccgctgccctcagcctggatttcccaccctgtccgcggggaaccacacccttcccttcgcgaggttgccagccctgttcacttcctatccttgggggagaaaccaccccgatgctgctgctttggcgttgaccaccctgcccgcccaattctcgctttgtgttactttctcgatgtattcctccgccgccgcctctgggtctgccatccccattcttcagcccagtatctctttattcacagggtgtaatattcttttaagtttccatccctgcttgaagagtttgtaaagcaactggagtgtagctgcacaagtacaaggcggttgcccttttagacacttcagtcgcgagcatttggtactgaaaatacgaaaacaaccaaattgtaggagtgtccttcagctgcctttccatattgaggcgatttgggcggaagggggtggggaattgggctgcgcttctgaggtttcccgcgaggttattttttggttgtttctcagttgagatgtgtggagggttttagctactgttcctggaagttgtgctgtaagtagtaggtgaatcgtcaatagtgtcttatccgtaattgtagggagtgggattaataattagtccgtgctcctctccccacgtctccaccgtgattttcaaaggtttaagattctgtactggattctgtactagcttgccctttttaatgtgttatttatttgagaaagctgtcgtttcaagtgttaaaatagcagataagcggcattgaaaagtgacaaagtaatgtgtgaaaacaaggagctaggaagttctagagacttagctaaaatgtaattttagtttctattaaagatataacctctcccagatgtggatgcaagtctcaatgctctttgtgttggtggtcagctgtgcattctgtcaggaaatttactttgctttcctcagtatccggaacgctcatcagctctgatgattggggagctgggctcaaatttgaactagtcaccttaaccttggtagaattaaataatttgtccatggtttcccatttcaaccagctagtgaagtgctacggtcgaattcccagtttaagtatttacagttgtgacaagcagttttttttttttttttttccctctctgggctttagctatatcctttaaagatctttatgtatctggattaagtcacttgcagcgaagtgcttttatttattcattatgttgcgctttatcaaatatattttagcgtccatcctccctccctcccaacgttttgaccattgcagttgcaggtaactgcctggcttatataggcttgtttgcaatgtcttaatcctttagtcaataccagagctgtttggaaaatgttagtgctaaaccaacgtgggtgggatttagccaatttagtctccttttgagtttgggatggtagaggagcagtgtaatcttgggtctttatttaaaatgtttgatgacccctttaactattttggctgttgtcaaatgacaaacatcttgtttatcagctgttttaaaaatagcactttgactttttggtttttcccttaggctcgtttctacttgtccttttaaagaattaaattctgaaatatacaaaaattgatataatttaaagaattaacacatctggtgtcctcactgaggttaagattgatagattgttaccagtactccacctcaacaaatccaacctgaaatatggcacaaaatattacgtttcccaatatgttattctgatattattaagtctttgtgaccttgcaaatcacacgtttaatattttgtttctgtatgttaactaaggtataaggaataatgttcagtgaatccttagatgctacctatgatttataatttaaaagtacaaagtatttttggtcataaaatgtaatctcatatggaagtaaatattcctttctagtttgggaaagaaagtattaatgggtgaattctaaaaatgccaattctgcacttgatgttaacttgaagatatacataacgtgcagaacactctagtgctttacatagtttcaagcatttccatttttaagttaaatataccatatttttacatttttttggtttacatttctaactttttgttttcccccctccttccctcaaatgttttgatgattctccagaaccaacgaaacgtatgctttccttccaagggttagctgagttggcacatcgagaatatcaggcaggagattttgaggcagctgagagacactgcatgcagctctggagacaagagccagacaatactggtgtgcttttattactttcatctatacacttccagtgtcgaaggctggacaggtaggagatgttggggtacctgctcgtgattgctgcctctgggtgctgagcttgaaaaatgatacttaaatatttgaacttgaaatttttccagtaccgggtttcaactgagccgccaacgcacatctgctctcttgcccacttgtgacatgcccagctgccagtttttctccttccttttgtggtggtggttatattatcagtatgactagggaccttttctagatttttctatctgggtctgctgctttctagactctgttcaggtaataaattattatcaatgtatatctgagcatccagtctccctttcatgagacctgtcagtttgagggactgaaatgctcagaaatgatggttatgtatgctgtggcaggagatgcatacctggagtttcattaagttgttatggtgtgttgcttttagttaatcagttgaattaatcaaaagggaagaatttgtgttcctgtccttttaataattgttattctggcatatttagacacttaaagatgtgcatcattaaatcttaaatggaaaatgagactcgtgcacatagctttccattttttatcttaatgatcatgatttccaatgtggtgggtttttttttttttttttttttttgagacggagtttcgctcttgttgcctaggctggagtgcagcggcgccatctcggctcactgcaactctgcctcctgggttcaagcgattcttctgcctcagcctcctgagtagctgggattacaggcatgtgccaccacgcccagctaatttttgtatttttagtagaaacggggtttctccatgttggtcaggctggtctcaaactcccg

SEQ ID NO: 137796 - DNA, 1025 bp, Homo sapiens
tttgctcttgtcacccaggctggagtgcagtggcgcaatctcagctcactgcaacctccgcctcccgggttcaagcgattctcctgcctcagcctcctgagtagttgagattacaggcgcctgccatcatgcgtggctaaatttttgtatttttagtggagacggggtttcaccatattggccaggctggtctcgaacacctgacctcaggtgatcctcccgcctcagcctcccaaagtgctgggattacaggcgtgagccactgcgcccagccaataattttatttaataagaaaaagcttttcattttgaaatctagaatacctccacttttgaaaatctttgatttcccaaatttttcttgctatgcactagttaaaagataaggtattatataatgagcaatagcacagatctcaaactgtttgagttgcatatgggccataccttcttttctgtaacgtgcatacccatgcattaacacttgtcgccttttccagatctgctcactttagcactctggcaattaaacagaacccccttctggcagaagcttattcgaatttggggaatgtgtacaaggaaagagggcagttgcaggaggcaattgagcattatcgacatgcattgcgtctcaaacctgatttcatcgatggttatattaacctggcagccgccttggtagcagcgggtgacatggaaggggcagtacaagcttacgtctctgctcttcagtacaatcctgtgagtaaaattttaatggttactttcccttcctagaaacccagaaagaaacatagtgtgatatttcagacactaaagtaggttttcacatggaataaagtcaaaagtttagaaatgcgtatgtacttaaaatggtgaaattgcttttagctggtctgcgttatgctaaaatatttgttttatttagcaagttatattaaaaagcataaaaattcttattgcaagaaactacatcaattttaaaataacacgtataaagtacagagcacatgacttttttc

SEQ ID NO: 137797 - DNA, 9676 bp, Homo sapiens
ctattctcttctctttcaatgtaattagaagtcatagaatttagatgatactacttatactgggcttttgattagtttaaaaattttttttgtctaagttgcagatgtgttctgggaacaagtaaggctcagctggcagaccttaaattcatactgtgtttaggatctccgaaagatacaaaaacataagactttccctcagaacttatgatgtagttagagaaagtagatgtaaacttaagaggtaaatgatagtggggttatagaaatctagaaaaagttcccaagttacattgtcaacattcagttttgtaaccaacctggaaatggctaatagtttattttagctaccgtttactgaaagtctgtgtggtcagacactctactgacagctttaaatgattggtcttagttaatcctcacaataattcttcaaaatagatgatattatttctgatttttatcaattaaaaaaaaaccatggactcagggttatgtggctttcatggggacaaagctagtaatgaagtattaatagatattaaaacctgagtctgaatatcctcaaagcaaatgttgaagtgaaaagaaataaaagtgggatgatgtgcccagagggcactcacccatcaaagcagcccttgagcacagttaaaaaaccattgatcatattttgctgtcccttattttttggttaggaaactgaaactaaatttagtagtttgttcaaagatccgaagtcacttctcatgatgatatctattaacaatttttgtagttaattttgagagtttaaacgtgtcctttttagaaaatccattgctttaaaaaacatttttttttaagagatggagtcttgctatgttgcccaggctgtactcatactcctgggctcaagcagtcctcctgcctcagcctccagagtagctgggactataggtgtgtgccaccacacccagcttctaaatttattggtttttgaatggatacagtgaatacctccagttagcactcttggaggtagcaaatgaaactaatttcttgtctatcttttctgagacactcagtgtatatatatgtacatttgagtgactttttgtaagttttattgcaatactaatctagctagttacccacataaagttttagggagcctggtatgtactgccactgggccttggaccccatttttcccagggctcagggctcacctctgtacccagttgtcacagtaagttctttacctttattaatcaggttgattctactcttattgatagtgtaccctcttacacagctgtggttcttgccatctttaactctaatgcccttggctcaggtttccagttgcctatgtgtgtagcagagcagtcattgctactgatagtgtacccaagcagtaggactatgctgagaaggaaaactaaagtgagagatggaaccttgctatttaatatctaacctgctgttagcaggaagcttattgttgtaccctaccaaggaagtgagatagtactaaaataaatcatgggattacctcttgaatgcattgaatggccatgtgttgtcatctggttctatgtttcttctagtggaaggtgctgctttacttatttattactgtttttaccaataagaatgaaaatgggattgtgcaagttcccttgatttcaactaaacatgccatagtgatcatattttaatttatttcaggatatctaaagtcttaactagatttaaacttactgtcaaatgcccgttgtcagttcagtactggtagaaccttgcgtctgttccttatgttcttgttgacagtgcttaaatgcatcattagtacattgtgtacctgaatcatagatgtagttggcattctatgaaaaatggttaaagaaactcaggttattttggttttgcagcagtgaaagagtagaatgttaaggtggtatctttggtaaccttggtaactgttttcaacagtgtttatctttttaagttaatagatatgtcaatttagaagttgttctctgtgacttgattatagaaattatctttgagacagctatctcatttttttcattctgaattatcttctataattataatgttgggtgttttcataattttggtaagattttagtctgtcattttttttttttttttggagacggagttttgcccttgtcacccaggctggagtgcagtggcgcgatctcggctcactgcaacctctgcctcctgggttcaaacgattcttctgcctcagcctccgaagtagctgggatcacaggtgcccaccaccatgcctggctaattttttgtatttttacaaaaacaggctttcaccatgttggccaggcttgtcttgaactcctggcctcaacagatccgcctgcttcagcctcccaaagtgctgggattacaggcgtgaaccactgtgcctggcagtctgttgtatttgaaggtgttattgcagatagcaccttgcagtgacagcacatgttctttgacatggtgactcactagagttgcctatacctggcaattccttttgcaaattatgtataaaattgtcctttctgtaacggctataaccctgagttgttttaaacaggtctgtttctgaatctataggttgttgaattgttgcttgtgctttgattgtggatgcacagaatggagagctgctggcatcctggccatcatgtgtgttcctgtcatgttatttgttacttgttactgctgagcctctcttatacagctgcactgtagaaaaccatatatttcgattcttctctgttctgctttctgttgtatatttcgattcttctctgttctgctttttgttaaggttgctgtgcaaatgtcacatttaaatatgtgagtgcttattgtgcatacaatgctttgttaggaaatggggagatgtgttgtgggggaagttgcgggttataatataagacaggacctgacccgtaaaggaaaaaatggtgtaagttccttggatgataattgttggagagtattaatcagaagatttcctcgagtgggtgcttatgacctaagcattctgtaggaaggtaaatagcaagtagacttccttggctgaagtggtgagtcaagtagtaacaagaagtgaatgtagtagaggagagtcaattggaagatttataaagaatagagaggctgaggagtttgaatttaatttgagaggcaattgagaattactgtaggtttttatcgacctgattttacttcatatgtatgtacgtgtctagatgttgtggctggtgggggtgggaggctctaggaggaaaggcaggaaactgatgcaatcttaggagaaatagttctacaggaaaatcttgctcatttctatctccttttattctcacgattttcccttgtatacagtgccctcctcctttgtctattaaaaccctactcatccttcaaggcccagcttaaacttctcttatgagctcatcatctagttctcttaaaattctttactactgagtgggcatttagtgtgtgccttgtcttttcacatagattgtaagccccttgatgataaggattctatatcttttccctatagttccaggcatgttattgaattgagtaacagtttgcctgaaatgtattaacctgggatggataaaatgggctagttttgagaaatataattgtcaaaaacattttgatttgacagatgaagcagaagtgatgtcttgggttttgaacttttgggagaatggtggtgcccgtgcgttttctagaaattagctgttcatgcacataggtttggatccccaaacaggagaattggatttcaccgttacatttaatatgatgttttagcttttcctaaaactgccttattgattatcttatagtaatcttgaagataatgtatttttaactatgagcattgtgttaacttgatatagtatactgtaatggatctagatgataacaaaatatagatatgctgtcaggacttaagtggcatccatccaagagttcatagaaactagagggtaataaaattacgcaacagctggctactatgtatggccattacagtcattgttggagaattattgcaagacttctgattattatgacttagaaaaggcataggaattggtaaaagtccaaacatgtataaccacaattatcaagtagtagaaggagcttgtatgcatggattggattatgcagtcatggtctgccaaaacaggggtaaccctttcagtttagaaaaaaacataaccatacaaagtagatagcaagattatataattcattacttctgagagtatagtgttaaaaagtgctcaggctaattagaggagaagtcaaataagattaatggtacctttgatgttttgaggattagtattagccttttgtgcttgaagtgatgggagacaaccttactctctagaacatcagtcattgcttgaaggacagtattgagtcagggagatgatggaactgacccagtatggctgaccgtaagattgttgtgtggcagcctgtactttgttggcagactttttggttcacctgatggatgatactatacaaccacaaaagctgtttatcagtagaattaagtgattttggaaaccataatatagttccagagcaaatcatatatatgatgatttttcggcacagttgacaaaatttcactttctaggacttaagtctctttcacccatggaacagtttggaataataagcatacttcctgttgtcattgtttctgcctgttgactggtagatgtgactgacaatggcaaaatagggcaaataaaaatttaagctcactgttgtgatgagtgtctcatccagatgaatggactgatgagtcagatgactagcagcacaattgagctgctaataaaaagcagagtcaactgcttttcattattcacccactcaactctaatggcacttaatactaatgagtaatctagtggcaggtgccaggattgaggctttggttggataattcttctgcccgatagtgaaatgaagtcagagtttctaaatatgcctgacagcctaagggtaggtttgctcataggtagtcatttgctaaatatgtttttttccactctggaaaattttcggtccttgatacagaagtgattcatcataaccttgaataacatagttggacaaatatttgagatgtgtgtgtgtgtgtgtgtgtgtgtgtgtgtgtatatatatatatatatatatatatatttccttttttttttgagacaagagtctctgtcgcccaggctggagtgcagtggcacgatctcggctaactgcagtcactgcctcctgggttcaaccgattctcctgcttaagcctcccaaatagctgggattacaggcacacgccaccatgcccagctaatttcatatttttagtagagatggggtttcgccatgttggccaggttgatctcgaactcctgacctcaggtgatcctcccacctcgccctcccaaagtgtggggattacaggcatgagccaccacgcccggcctgatatatatatttttaatgtgactgacatttggggaggagagaaagaagctctagtaaggtcccatagtattttatgtgaagctaatggggccaaatgcatttcaacattcagaatttttaggatattagaaagataataccatatataaaacacccagaaaagtctggagcagcaccttttagtaaaacacatttatatttctgcagcaaaagacagtattcatactaagtgagataattaaattctataaatagtttcatgtcacctcaagtcaggtttaaccctcaaatgagtttttggaactttttgggatttggaattgtggatgaggggttgtggtcctgcactgaagtttgtcaggcagtatctttagttgatagaataaaatggcagggagctagatgcttaaaagtgatttcaagatatttttaattgacaaagcagagtataattaatgacagcgtctctgggtttctaggatttgtactgtgttcgcagtgacctggggaacctgctcaaagccctgggtcgcttggaagaagccaaggtaggtgtttgatagaacacatttaaacatcagtattatgaaaacttgtactttttgccaagtcttcaactcttcattgagctatcttcacaaaacagtcctttgaaactgaggaaaactgacggcacgaatcgcctcagaatagagcagggccaggctttggcatatctgttctaaatctgggggtaaagcaagaacctgaacattttggagcctttctgctgagctagaccatctttataacactgggctccgtcatgatcttatgtgggaataaataacattccttcaaatctgaggcttgcctgctggtgacaagcagagcgcctgtgatttggctcaagactcctatatgatgcaggtgccattgaaaatgctgctcttctaagtcctttgtggcttgtaagtggagaagaatttcatccaaatgttaccctgtaatactggcatttaaaattcttatttaaccttcctcccttcatcttcctcaccctttttacagtggaagaaaggctgttaaaatgattacaaattaataattggaacatcctgtcccttgtccccactcccttcccaagttcctttttcctcttttccaatcctagttgtctaccttcttttcttcctcatttccttcttttattcctccccaccccaaccccttaaaaaaaaggtcagaaggacaaagctggtttgtttgggaaatggactgatcgaaagaaaacttgccaaagtggaaaggtggcttttagcattctgtgtttccaaataatgaatttgaacaccaggttgggttaattaaagcttttggtataatttaaaattaaatttataaatgcagttgtcttgttacaagccaccttacgcaaccgcgctgcaggggtgaggagtggggagaaaccagaatgcttctgaaactcccacctgttgctctgagccccacgcgcatgctaatgcgtggagtgtatgcgcagagtagctgtctgtttgactgcttcatccagggagggagaaggcttttcagcaccatctaatgttttaaaaggcactagttttaagtgcacagctcataaattctgctgacattttggattaaccttatgtaggttgccagctaatgaattgtaattgatttcaatcttagctgataaatctaattggtaatttatagaacaaatatttgataagctcctattaattgtcaccccaccaagcggacagctaacatgaattgcacttcactgcagctttagagatcggtttaggctgagacattgcgcctgccttaggttgctgacttctttatttcagagctctggagacacctagtttgaaaaatgttattctgtttttttgtgagaacttagtaaacaagaaaatactcttgagtgaaatgcaatgtatttcttttgtaatcagtgcatttgaaaattcaagccagcatattcctagtagatggaagcaaaattaagttgtctttgtagaaaatgaagagcctttcttccagcaaaaatccctgctgtatgcaatagccctgattaaccctctcccttctgcatgtttcccatattacagacttgagactgtcctcattcccatatgtaatagacatccaaagaatttcaattgctttgttgaacttttactaatgatcttgtttttattttctctcttgtttttggtttttcaccattgatattgtatttagaaggtttcaggtgggtgaaacctcctattccatgcgtaaggtgcctcgctgaagggagctcgaggcctggatctagggcagacacacaacctcctcctcctcttccagcaaggaacgcaccgaaaagtcacatgatgagaaatatggtaacgggtttgtaactgccacagcaaaacaatttgcctccatgcctgaatcttctgtcttgtggcttcagaaacagcttaaaataattttatttacaagcaagttatgtaagagaatgttttatactatagccacaattctgtcaaagataagtaaaagttaattgatattaaaaattattagagataatttacttagtaaaagcttctaactcttcttgttgttcattttttttccttttttcttctttgtttggattgcagcattctgctcttctgatgatgcgctgtgaccctgcagtagcgcaaaggctgcgcagcgttaatgcgcattgcgtgcgaatgaacccctgtgaacggttgactagatgagtaatctgattgactggctccctcagtcctattctgtagcctttttggataaaattgggttttaacatacctcgagtccaactaatctcattaaacaaatattctccatgggcctgtctagtagattaatggatctggttggccgtttgctgcgtctaggggtgttctatgtagcgcagcagttcgcagcgattgcgcagtgcgatgctgttaggttgcgcaagcgatgtttgcgctcgcattacagggacctcaacctaggtgcaatcctgtcatgtgaggtttcagcttcagtcctccttgggagacggggcattgtgagaatgtaacttaaagcctggctttatgatatcctacttggcagaaagacatttttctcctcagtagcatagttttgatgttagtgaggaacattgttgaagagcagcatttcccaaaatgtgtttcatagtattctaataaaatgcccaatgaaagaagagttccatggtcaactaagttcagggaaccctgttacactattaaaggcttagggaagtccagtaaagaaacctattttccgaatttatttgatcatgaactcctttttttttcagccatacctcttaacacctcatagaacacactttgggaaacagtgggggtaggaaaactcggcctcaagttgcgccctctaggtagcacttgaaaacatgacaagggcccgtagttgtttggataagagaactccagcatagagccttatagcaactgacttcccagttaagtcccagtgtaagggttggtctttggttggcagaactgaacatggtggtttgcacttgggttctggtggcgcaggcgcaggagcagccagctgtggcagcgcattagttttggcgcaagcgagcctatgctgcagggtcacttttggctggtcagagaaggaataatgatatcaccttcttccccccctccccccaatcttttttttttccctttacaaattttcccctttccctttacctcctttccctcccatcttctttcattaacccctcctaaggcatgttatttgaaagcaattgagacgcaaccgaactttgcagtagcttggagtaatcttggctgtgttttcaatgcacaaggggaaatttggcttgcaattcatcactttgaaaaggttagtcattaaattaataattggtatttttgaagtgcttacgcatgtagtgtttttactagaactaaataataggtcttagccagtgacattatatctttgtttctctggcggtataggcagtatgtgacttacagagaacaatgatttgacttaaatattttttcaacttgacaatggt

SEQ ID NO: 137798 - DNA, 1527 bp, Homo sapiens
catgcctcagcctctcgagtagctgggactacagttgcacatcaccatgcccaggtaatttttgtatttttagtagagatggggtttcaccatgttggccaggctggtcttgaactcctgacctcaagtggtccgacctcggcctcccaaagtactgggattacatgtgtgagccactgcacctggccggtgttttgattgaagtttgcatttaccatgctgtaggagtatctttcttgatcagtgtttctcttccttggttatacatgaggagcttataaaagatctgaatatcctgaccctatcttcagagggtctgatttaactggcctgtgatagagcctcggtaccttttctaggaggtaaattcttaatatattgccaaggttgagaatcactgctctagacaacatgacagctatttggatgacaccgtgtaatggttagtatttccttgaagtattgtatcttactgtgtatacagctctaattgcatgtcttaataaggtcttgctgagcatgtagtttgtatgcatacaactgaggtatatatttaccttttcagtaagagtttgctgcctcttttgccactatttttcagaagagttagactggttaattgtgaataaaatagggccaatcattagaagtgttcagtttaatgaaattggagcaggcccaatatttaatttttctcttcaggacccattttgctcatgagaacatgaggcatgagaagttattttgataatgttgaggtttgtaaaaataatgagaagacactaaataaataattggtttattaaaatgaaatgtaattgaaagtctgcaaggaccttggagtaaaaaaattgtaattgggaagttgatctggtgaaatcctaacttgctctgagtaactaactgtcttgaaatttttaggctgtcacccttgacccaaactttctggatgcttatatcaatttaggaaatgtcttgaaagaggcacgcatttttgacaggtgagagaatgttctgtttaataaattttcttgaatctttgttgtattgacacttgacagtttggaccgaaatgatgacaatagtccattgaagcatatttgccttttctagcacgttgttctctgcccatgtcctgtgttgccttttatttatagatgttgttcgttgcctgactttttgttgttggctttcctcaaagccgttatccttctcattgggagtttagttgaaatttttttattgttaaaatggttgaaatgattctttcttagactaaattattcctttgacctgattttagaaagcaaagtaaatccagacttttaaattttttgttgttgtcaaaggaaagcctattttttatgtgggagtagaaaacttcccagtgtaaagacacattttataaaggtgtgattttggtttgaggttaaaatataatacagcatgaattatgtaattaattacaattacttgatatattttgatatagtacagcttgaatgagttgtaacaaaccatccatta

SEQ ID NO: 137799 - DNA, 2672 bp, Homo sapiens
acttcgggaggccgagatcagaggattgcttgagcttagggtttcgagaccagcctaggcaacatgacgaaaccctgtctctacaagaaatacaaaaattagccgggcatggtggcacacacctgtagtcccagctccttgggaggccgaggtgggaggatcgattgagtcctgggaggttgaggctgcagtgggccatgattgtgccacagcactccagcctgggcaacagagcacgagactctgtctcaaaaaaatcacaaaaaccaaaaaacagcaaaaaaggaaagtcttttgtacaagtattgagatggtatattggtttactttagagttttggttgagggtaagaataccaaaaaatatcaattttctgtagcattaccagccattaggcttaattaaacaattattagaacagtatcagtggaggctttatgattctgtacagtttttgaagactttgttttgttttctaggttgctgaagcagaagattgttataatacagctctccgtctgtgtcccacccatgcagactctctgaataacctagccaatatcaaacgagaacagggaaacattgaagaggcagttcgcttgtatcgtaaagcattagaagtatgtgagggtggtgtagctgggcatttagcatgatagtagagggaaagcagttaagtttaccatcatccacctcttttgtaaaaatagtggttgaatcatttacaagaggattattcattgaagtaacaattgagtacctaaggtatgatgtgaggccctatgtgacattccagaaaatccctgcattcagagttcattattctgtggataagatctgtacaaaaaaattaaacattaacccacagttcaagagaagttacttataagtatataatcttagtgcctgatggctgtatggtagtggttagtagatgtggtaggagtttagcagagagagatttcagtggtgttggagtggtcaggataaactaagaggagaagaggtgtacctcattatgtttgaaacaagaagaggtataaaatagaggaagaggtagaatttgagaatgaatagacttggaaaaagtagagacaaatttaggggtttaaatgtacttgagcaaagttcttaaggttgtggtgaattattactgctgctttagcaatttttttaacctcagttctgatcttgactctttataggtcttcccagagtttgctgctgcccattcaaatttagcaagtgtactgcagcagcagggaaaactgcaggaagctctgatgcattataaggaggctattcggtaagagacactaacagccttatttttaaaattatttttaattttaaaatgtttgacattcggcacattgcagatgctaaaatggctttaaataacaacggaataagttagcattacagtgggttaaagatttttgtattggagaaataaaacctttggcttctcttttagaatcagtcctacctttgctgatgcctactctaatatgggaaacactctaaaggagatgcaggatgttcagggagccttgcagtgttatacgcgtgccatccaaattaatcctgcatttgcagatgcacatagcaatctggcttccattcataaggtactactgtttattataatatgtgcagtttaacacctaaaatttaacttttggaaattttttaccatcctgctttatttattttccaggattcagggaatattccagaagccatagcttcttaccgcacggctctgaaacttaagcctgattttcctgatgcttattgtaacttggctcattgcctgcaggtaaagaataacaggccagtaattggctctcagtgttgtaatagctttttaattgttgtatgccataagaatccaagcctgactggaaatagtatttttaataggctatctgacattactttaggccaaagacatatcaaatattaaatcctgggataggactttctggataataacttgtttttgctttctctagattgtctgtgattggacagactatgatgagcgaatgaagaagttggtcagtattgtggctgaccagttagagaagaataggttgccttctgtgcatcctcatcatagtatgctatatcctctttctcatggcttcaggaaggctattgctgagaggcacggcaacctgtgcttagataaggtgtgattcttttgttttaatctttttgttgtaaactaaaacacaaatacagaaaactgtaaaaatcaaatctgtggcttaatgaacgattataaagtgaacaccacccaagtcgagaaataaaacttttgtgggccacttcagaaccccttccattgtgtcctgagtataaccccctgcacttcataagacggaatccttaactccttcacttaaacactaatgatagactgatggtacttttctttaagttgaaagccataatttttttttcttttatcttttttttcttttttttttgagacggggtcttgctctgtcgcccaggctggagtgcagcggtgtgatcatggcttactgcagccttgacctccccgagcttaggtgatcctcccacctcagcctcctgagtagctgggactacaggcgcatgccaccacacctaattttgtgttttttgtagagatggggttt

SEQ ID NO: 137800 - DNA, 1610 bp, Homo sapiens
ccaccgcgcctggccagccatcatgtttaatggagtgcttggtattttgtattcacctttgagaattagagcagtacttgatcaaggattggatcaaaggttggataatagattggagtgctaggtgtactttttttttttttttgagacatagtgtctctgtcatccagactgcagtgcagtggtgccatctcagctcattgcaacctctgtctcccaggttaaagtgatgctcgtgccttagcttcccgaggagctaggattacaggcgtgtgccaccacgcctggctaatttttgtatttttagtagagatagggctttgccatgctaggctggtctcgaaatcctgacctcaggtgatccacctgcctcagcctcccaaagtgctgggattacaggcatgagccactgcccccagccataattttgtttttagaaaatgtttccctatagaattttctaaaatgcgggaggaaaccatgctctgtccatactgcttcatacctacaagtgttagatttgctcgtacttttttttttttttttttttttttttgagacagggtcttgctctgttgcccaggctggagtgcagtggcacaaccttggcttactgcaacctccacctcccaggtttgggcgattctcccacctcagcctcccaggtagctgggactacaagcatgtgccaccacgcccagctaattttttttttttttttttttttagtagagattggatttcactgtgttggccaggctggtctcgaactcctgacctcaagcgatccacctccttggcttcccagagcgctgggatttgctcatgctttatagatctcaggagcaggtcaaagtatgaagcatattacataaagtgctgaggttgcatctctctggcaatattaactaaatgctctgggcagacctttttcaacaggtgtgaggtataggtttggtgtgtttttcgtcagttttcctagatgaaaatttatgtagattttactaacaagcattggattctgttgatagattaatgttcttcataaaccaccatatgaacatccaaaagacttgaagctcagtgatggtcggctgcgtgtaggatatgtgagttccgactttgggaatcatcctacttctcaccttatgcagtctattccaggcatgcacaatcctgataaatttgaggtaagactagtgtttctctagaatcactatttgtttaaaaaagaaaaaacccacaatgttggcttgtcaccatgaggcatggaaacctagtgtcttttggaaagatttgagccagaaagatttgagccaatgttattaaatatgccatgtgctgcctttcaggtgttctgttatgccctgagcccagacgatggcacaaacttccgagtgaaggtgatggcagaagccaatcatttcattgatctttctcaggtagatgaaactctcatactttaactttttattttgagcaagtttaaataaaactattagcatatagtttatttttgatgataagtattaaatgctgtagtaccacatataggcaattgtgttgatcttatttccttgatcatttgtgttaatcagcatggctttttc

SEQ ID NO: 137801 - DNA, 4107 bp, Homo sapiens
cgaactcctgacctcaggtgatccacctgcctcggcctcccaaagggctgggattacagatgtgagccaccatgcccggcctactcaccattttctaaactccctcacactttactctagttcttcattcatactgttctctactgagattgtattctgttaaactccttcaaactcctattcgtctttgaagacctattttcaaataccaattctaggctgggtgctgtggctcacgtgtataatcctttgggaggctgaggtggaaggattgcttgagaccatcatgggcaacatagtgagaccccatccctaccaaaaaaaaaaaaaagattacaaatttcaaataccaatttctctgtgatatgttgttattcatacattcaatccagaagtgaactctccttcctttgtgttctgtttctttaatgctttgggcccattttaatgacagtcaaccatatttgtgcccgaattaatgtagttaatttgtgttcttacctcttttccatctgggaatctgaattatgttaaatgccattaaaactaaatgccattaaaactaaatgtcattaaaactaattgatctgagattatacatagtgagttcttattttgtattctgtagattccatgcaatggaaaagcagctgatcgcatccatcaggatggaattcatatccttgtaaatatgaatggctatactaagggcgctcgaaatgagctttttgctctcaggccagctcctattcaggtaaacaaattaacagtcatcacttataacatgtatttggctaagaatacagtgaggtgctgcttttcctccctctggttaactgatatttgaaactgtagggcagacatacttttaatttttttaagttgttgaaatgcacaggacaaaaagagtgtagagcacagtgcttataggtacatgtatatagagacatgcaattcatggttggctatgaacagttactctgtcttgcaaatttgaagaacattttagcattttgaaagttagtctgaaatacaggccgggtatggtggctcacgcctgtaatcccagcactttgggatgcttaggcaggaggatctcttgaaaccaggagtttgagtcctgcctgggcaacaaagcaaaacaccctatctctacaaaaaattaaaaaattagccagagtggtggtgtgcctctgtgatcccagctatttgggaggctaaggtggaaggattgcttaagcttaggagtttgaggctgcagtgaactatcactatgccactgcactccagcccaggtgacagagtaagagtctctcttatagaactgcttcattgctttcggctaaagaagtcagccttgctgtgcgtgtggcaagtgcctgtaatcctggctactctggaggctgaggcagaaggattgcttgagcccaggagtttgaggctgtagtgatctacgattgcaccactgtattccagcctagggaacagagtgagatcctgtctctaaaaaagagttagacctccttgtttatttacttatttaattttggcacctttaggttctttttttaaaaaccactttattgaggtacagttgacatacaaaaagttgtacatatttaatgtatgtgacttgatgaatttagaggtaagtgtactgataaaagttcttaatcagtttttgatctgatttttttaaggcaatgtggctgggataccctgggacgagtggtgcgcttttcatggattatattatcactgatcaggaaacttcgccagctgaagttgctgagcagtattccgagaaattggcttatatgccccacactttttttattggtgatcatgctaatatgttccctcacctgaaggtaggtatgaaacagtgctatggacgaatttcaaagaactgtagctttttatttccttgctattgtctatgtaaatcctaaaagacatgtctgaaactattttttccattagaaaaaagcagtcatcgattttaagtccaatgggcacatttatgacaatcggatagttctgaatggcatcgacctcaaagcatttcttgatagtctaccagatgtgaaaattgtcaaggtcagaacctagtcagtattgtcattgaaataaagttaactgcattcacgatcttttccctaatgatgcatttttttttcagatgaagtgtcctgatggaggagacaatgcagatagcagtaacacagctcttaatatgcctgttattcctatgaatactattgcagaagcagttattgaaatgattaaccgaggacagattcaaataacaattaatggattcagtattagcaatggactggcaactactcaggtgagaagataataatacaccattatatgtcccgccaagtatgcatttatttcccttaacctcatgataactctaggaggcaagtatcattatcaccatttttatggatgaggaaatgagtttagtggaaacgtgcatcttatataggtgtgtctgattttaaaagtctcctggattcagccagcagattattacttactgagaaactgctgtgttaatatcttgttattccctgcctgtggctttactctcttacatgatgaactatgtgtagattccatacagtttcttgcttctgtaaacccatcctttccctagctaaatcctactcaaacgttcagttcagacagctcttccaggaatccatttccgtacttaccgctaacgtctccatccctacttcattggtacctgtcttttatacctctgtaatgtttggaatatatcattacatacagcacaacagatgataattccctgtgtttgtatcctctactgaattgaattactgagcccatgtcttaatcacagtaatgtagtatgtactcaataaataatatattgcatgcttaaataagtagctctatcaagagagtgtaaggcaaagatctctgacctctagaggtcatagatgtccttgcacacctggaatagttatataacaatgtaaggcagtactcaaatgtgtgagaattacaagatgaaactaattatgtatgtagaagctcagaaacggtgaggatcaatgtgaagagagacactcttgggagaagagaccatttggaggagtaatttagccttgaagagtagatgtgatttagaaaaggacatttcattcatgaagaaaagagtgatcaaaagctgttggaacgttaataggattttgagaccttttttggttagagcaagaagtttcatagtgcagtctcccccaacttaagataatgctgcaacggtttgccttttcttaaacttcatatatcatgaatattttctcatggttcagtgacttttaatggttataccattttggatcttatggattgaaatattggactccttttgcctttaaatataaccatcatttttttcttgttctagatcaacaataaggctgcaactggagaggaggttccccgtaccattattgtaaccacccgttctcagtacgggttaccagaagatgccatcgtatactgtaactttaatcagttgtataaaattgacccttctactttgcagatgtgggcaaacgtgagtatgcaagtatgttagagactaataaagattttgtatctagagcttcttgctgaagatggtccttccactcccatttaggagctgttctgctcatttctttttaaaatttttttttggctgggtgcagtggctcacgcctgtaatcccagcactttgggaggctgatgcgggtggatcacctgaggtcaggagcttgagaccagcctgaccaacattgcaaaaccccgtctctattaaaaataccaaaaaattagccggacatggtggtaggcacctgtaatcccagctactcgggaggctgagacaggagaatcacttgaacccgggaggtggaggttgcagtgagccaagatcgtgccattgcactccagactgggcaacaagagcaaacctccatctcaaaaaaattttttttaaaaatactttttaaaaaatttattttatttatttacatgtgactcaactgggttatgccctttttttaaaaaacagaa

SEQ ID NO: 137802 - DNA, 1514 bp, Homo sapiens
ggccctttacagaaaagaccgatttatattaggcaaagaaagttaggcaagtgtgaggtaactttcttggttgtatcatagtgggggatttgaaatttggaatgcaaaattcctctctcagcaaaacccactgcctgtgtcaattcccgcaggaggtagctgcctcagattttgcctgtctttctttgaactcactttgaggacagctaagcagaagagggataattcaattgatctcattcatctctgtgaaggaaagacttaagtccacagcaggcttctatctggatggaaagaatagagtgtggtagaattattagagacctctgggagtctttgttgaaaaaggcagatctgctattaataattattcttattttccctattttagattctgaagcgtgttcccaatagtgtactctggctgttgcgttttccagcagtaggagaacctaatattcaacagtatgcacaaaacatgggcctgccccagaaccgtatcattttttcacctgttgctcctaaagaggaacacgtcaggagaggccagctggctgatgtctgcttggacactccactctgtaatgggcacaccacagggatggatgtcctctgggcagggacccccatggtgactatgccaggtaagttgctgataaatcactggaatcttccttgttcctttgaaaatctccgtttgggggagaaacttccaggtgaaattatatgtactaggagcaacattaaaggaaaggtgatagaaagtgagacttgttctcacttcattctcttcatctgcgttgtgtggaggcttaacataaataacattaactctgtgctgttttacgttctcagatgtgcagttgttatcttttgtattacaggagagactcttgcttctcgagttgcagcatcccagctcacttgcttaggttgtcttgagcttattgctaaaaacagacaagaatatgaagacatagctgtgaagctgggaactgatctagaatagtaagtaaacttttccttgaacaaattatttggtaaagtagagagaatatagctgttataaaatgaaaccataaaataagtgtaatataaaataggtgaactagttgtatgccctctggatgggagaagtacttctaaactcttagaaatgaagtgatcaataggttttactatgtaaaaagtaaatggctgaataaaaaatattcaagaaaattaaaaagcaaacgaggggaaaaaatcttttgtctcagataacaaagtattaattacctggcaatgtaaagactgcagaacatttaaattttataatcccctaataggaaagtaaaaatggaaatgaccagacacctcactgaagtggaaatacaaaaggttaacaagaaagtgtttcaggctctgtagtagaaatgccaattaaaatggaattgaggctgggtgtggtggcttatgcctgtaatctcagcactttgggaggcttaggcgggcggatcacttgagatcaggag

SEQ ID NO: 137803 - DNA, 3071 bp, Homo sapiens
ctttaacttttgtaaatgatgcttcaatgaatatctttgcatggtcctgtatgtttttgcatctgattatttctttttaatagattttaaagtgttactgttaggccagagggttatgaacatttaaggttaatacatacttgctaaattgcttaccaaaaaggtaagcaacagtacataggaatagtcatgtgccgttgtcaattcttgttattttaaaggtagaaacaagacgaaatggagaacgcgtggtatcccttggatatacttgtttaggaaagaactaagttttttcagagtatatggagttgagctcatttcagtgttagcattatgcaagatgtgacccttccctttttagcacgaagccaatcaagaaatgagatagcgtagagtttggtcatgcattttttgccacaaatgcgactaggtatttatagggtgtgtttctgagtttctgctctgatttgtaaactgggttcttgttttttattacccagcctgaagaaagttcgtggcaaagtctggaagcaaagaatatctagccctctgttcaacaccaaacaatacacaatggaactagagcggctctatctacagatgtgggagcattatgcagctggcaacaaacctgaccacatgattaagcctgttgaagtcactgagtcagcataaataaagactgcacaggagaattacccctatacctgagcctcaaccttctgggggaaagggaactagataacatacttcttacttgtctgtacagtaccttgttgcagatgggtgatatataatggtaatagaatagcacagccagacttgcttcctgcatggtagggagagacacaaaagatgggaaactgcttttccacaaggaatctccgtagaattttgcggcgaccagatggtgcataggtctggaaggtctgatctcccttggtcttccatgggatggttagtgtggaggggagatatagattgtccggccgctttgtgattccatggattgattcagtcttctggatttttttttctttatattttgggtactggagcttttaaaaatgtttggtttcaggtatttttattcatgtgaagtgtatatgattctcttgagataaggttttaagctaaaatgttactccctgttttagtttctgaactctgacagattgacagggactttgctggtgtagtctttttataggttttataaaccacttgagcctatatcagtcgttttagtgtctgacctaatatttggagctatcagtgctttgttgatttagatgatgactcaagattttttctggtccatttcccatttccttttcttccctgacccccataccctcacccttaaaattctcctgtaactcaactaacaaaatcaagcctgattcaaaacatcctagggtgttttaaacacaccatctggtgccaaatgaagatttttaggagtgattactaattatcaagggcacagttgtggtactgtcattgataataatatagtttttttttttttcctaattttgacctgtttcaccagtgttttacccttgactgccccttctatgctgcttccaaaagtgatagtgtgtgtaagatttttaccttcctttctaaagttttttttttttttttttaagtgagtcctgttcttcctatttctttcagcagaaatgaaatcccaggtaagtataagtattcaagtatttgatcagtaagtcacagttatctccagtgcattaaataaccttcatcaagaaataggttataggtaaaatctctgaaggatcatctatgtattcaagtaattattttttagataataactgtcttctggacttggtcttgaagtctgtacagattcagcctcagtagtagcgaactgcactgctgtttggtttggagtacaaattagacttatagtcctcctggaacttgagttattaaaatcataggaataaaattatgggatctcaacaaagggtcgagggtttgaggcttaaacaagccaacatatgaatatatgttttgtctcgctatactgcacttacgctatccagttgcaggtaattttttgtctgctagtagtgttctagattatgtctttccaaagcgctgaggctgtgcacctattctgtagttgcagctgatgcctgaatgtatcctagctgacaaattattgattaataagaacttgaatttctggaagattcttactgttaaccaaattttgagcaaggagtctcaaaggtaattctgaaccagaattacatgttaatgaacagtgtaccttttaacagtgtaaatcacggaatatccgtgaagggatttcttaatttattttttaccggttgattgaaatatcagttaaaggttgccagcatggttgcagataaactgatgtttgaaattcgctgaaatacttaatgtggaataggataatatacttccaatgccctcaaggctgtgaccttacagccattttacatagcacatcattcctcctatagggatgaactttttcctggcacgaaaagtagccgctctggttgaagctttgcttattgtaacaggcttttatttccaggtaatatgtcttggaagacttaattctgattagagatatagatattactggaaactaattgttttttttctattgtactctgctttatcaaagaagtaaaacatttaaatcgtactacagaaattaagatgttgtcttgcgatccttaataaatgaatgatttccctttaatacggctgatgtattttgtatcctgttatattgagtgttggactgaagaatagtgtcatccaatgatgaaacctatatttaaacacctccaaacagcatgaaaggaccaaatttccctactgtagctatgatattaggaattgttttctcagccaggtctggtagagggtggggttagtttatgatccattaagaaggcaaagtggccttgtgtggtggctcacgcctgtaaccccagcactttgggaggcggaggcaggtggatcacttgaggtcaggagttcaagaccagcctggc

SEQ ID NO: 137804 - DNA, 1002 bp, Homo sapiens
accttgaattcctgggctcaagcgatcctccccgctcagcctcccaagttggtgggattacaggcgtgagcctccatgcctggtgttgctttcatacctttaaatggaaataaattacttggcagaaaacaggcttttcactgatagctagcgataactcatctaacattcttcccgtgtttttgattcagcagtaaggactgagcagctcattgcttccaatttttgttcacttgtgctgttgtgatcctaatttcctaagggcttaaagcccttaaaaccttttttgcatttcaggaattctgattggttgttttcttcacttatttgggatttttgataattggttgcttatggcgtcgatagccctccttttataaagtatctcttttatttttgcagttacatccttaatgttcagtcaagcagtgatgacaccagtgggtcttgtaagtagagtccactcaaagcaggaacattttgaagtgtctttgtagagatgactcaactgtgatttgggatgtctggcctaagttggttctaagttcgtcacctctagggctctctttaggtcggtgaaatgaaatttccctactgtcaggagtggaggaggttctctgcttcttttccaacttactttcctcctttttttttggctctgggtttccttacttttatttcctttctatccttcatgggagatgtaaattttaagcagctctaatttatagactttggttttagggagttaaagacataggcaaccagattttttcatgcttcagatgttttctaatgccctctttctctgatttagctgtggccagaagagctccgaagagacaggcgaggtgagtaggagaattaatgaaactttactttttttttttttttaaattaaggggggaaaaaccccatgctctgtctaaggaaatttaagagtaaacttcacatttcctctgtggacactctgtggttctcagcaggatcatgatggctgtt

SEQ ID NO: 137805 - DNA, 1153 bp, Homo sapiens
tgggtggtgcaggtgcactgctgagtttgacacctaccagagcagtccgtcagttcaagagggtggtgctggtttggggttgcagagagtagcactgaagagaaactccctactctgaggctgcctctctccatctgtggccctctacccttctcagacaactggatctcaaacttgataaagaaagatgacaactccctgatcaattttaccactgtgccaaaactatctgaatacataaaatctgacagagcccatttcactctcagtatgtgacagactcctcgttttagaaggatgtgagacagatggaaagatgtaggaagatggaaaaagagaaaaagatagaaaatcaggtagaatggaaggattgagtagttccaaaggaggggaacagagttactgtgggaaacaaaaaattgacaagtggtcaagatcagaaaaggtgagaaatgccatgaaaaagaagactgttgcgttcatacttctctcttgtttttctcctgtttcatcactcagctccgtggtagtgattgactctgattctgatgaggaatgtcacacccatgaagagaagaaagctaagttattggaaataaacagcgacggcaagtatatattactttgttagataagtagctgagctccaaagcctcatcacacgtggtactttcaggatcagagtccgcagactttctattcagaatccctcagtagtgagtgccaccgtttctttcctcgtatgtgctggctgtggatatggccgggttccctataccccctggtcaatttcccagcagcagcaactgttgttgctgcctcagaccttgggggccccctcagtagagttcttacctgcctagagctatatcagtgaagcggggtaggggtggtgggtcaagagctgaggctaggaagtatggaggctgctctgtgactccctcttcctctcttccccgctctatgtgtgggaatgacgaggaagaggaaaggagtaagaggcctggctcattcttccttccagcttgaagggtggtggttatgggccagctggcagtgtcgtgttgagaaaactctttttccattgagctgctggtctttgctgtttgccggtccttctgtattttctacagattcttgtgtttctttagag

SEQ ID NO: 137806 - DNA, 1007 bp, Homo sapiens
aggctacaaatgaaggcttgggaaatgccctgatctaaggagctggatggaagagggagcaacatgttttcagggtctcttgacgagacgcttaggtgtgcattccttctctctctttagctacataaacctcagttgaatttatctttgcaggactcctaaatgcaaagtccctggatgtttcttgcaagaccttgaaaagtcaaagaaatactctggaaaaaatttaaagcgaaataaggatgaattggttcagagaatctacgacctgtttaacagatccgtctgtgataaaaaggtaggatcaatgaatgagcactgattgagcacctgctatacaccagtactcttggtgctgtgaggtgtgctaaccatgtatacttcctgcccttgagcagaggcagttaaggttgggagatgagccctggtacaggtgaaagcaatagagaatgtgtatgagttataatgtataggacagatggctgttaccacaggagatcagcagagggagaaatcactaagagcctcaacagccaggaagtaagattacctggaggaagtgagactctgcttcttaaaggatggtaagtggcaaacaggatgggggagagggagagttgaggctcgacaatcaggaagagaggattcttgtggaaggataatggaaaagagctgtgtgaccttgaacaagttacttgacttcagtttgcctcagtttcttcatctgtaaaatggggacaacacagtacgtattacctcataggattattgttacccttacataagttaatacacatacagtgcctagaacagggcctaggacatagtaagctcttattttttgatagtgtaggactggataccagagggccttgggaatcaggttggaggaggtgaaatttacatcagtaggcaccactgcacagggatggggtgcatcagggagtgaatgaaattaacctgctgaaagaaattaacctgacactaacctgtgggtatggactgga

SEQ ID NO: 137807 - DNA, 1053 bp, Homo sapiens
tggccctccgagggcctggctgtggctgccccactgctggtgtccaacccggagtcacaacgctagggggccacaggtgcagatgggctcatactggggaacagggaagacagtcacagagggagggttggagatgctgggcagagcaggggcaacatgttgccagcagagggtgatggtgcctcactttagaccctgctaggccttttccacctcactgggcggcttggaagctggattttgtgttctctttcaggtgactggcagccacctgtccatcccccaagaccggaaaggcagcaatagcccccgggagcccagggctgtcctcgggtaatgttttgtgtggctcctagaaatccaggtccacactagatggtgggatctgtgtctaggttaaactgatagctgcataccccccgacccccgccgcctccaccttctgcaccccagggagagagggtgcctcctttccattgaggattctgtgccaacccacctcgccactgggctgcaggctatgggggctactaagggttgggggagacagggaggacagggagagaggaggccagaattgactaaccatttatcttcctctggtgtctcctggactagtgcatccggctgcagagggaaattgaggaccttagagaccaactaggtatgagggagccctggctggggcagggatggacagcagtgtctttctgcaggtgccgggggcagggtggactgtaggtacaggcggcatcactgggactgactttcctttggggaagagaaccaagcaggcctggccctggagccttctgtgcctttccagctaggggtgtgcacagacagcaatgtgttgtctgaactccatgtacacttagtccacgagtcccagaactctcctcttacgacggttagagatacctcatgtgttttccctacaagcctggtagggcttgtatggtgtttgcttgctggctggcttatctgtctttgaaacacgttctgaaaggttctgggatgccccagcacctgagaaccactttcctgcttaga

SEQ ID NO: 137808 - DNA, 1043 bp, Homo sapiens
taccactatcagggaggagattttgttcaatgcactgagttgggataggatctgatggagggctttctagtggattgcaagagattcagcaggaacatatccaatgagattaaaaaaagagttaaaatgtctgggggggcacagggagaaaaaacaggaaattgagttttctctgtgaaattaactagcatttttgcctttctttctaatttatgaagctcttttacatttgttatctcatgtgattcccatgacaaccctgtgagttattacttctatttgagaaatgaaaaaaatagactcagagatattaaaactgacctgcccacagtggcaagtgggaagtgaaaaccaagaaaccatttgcactgttttaggtggtggagatacaggagtgaacaagagaggccaaaatatttgtcctcgtggaacttactaggtagataaactatgacttatttcttttcaattaccctctgtcaagtaatagatactggttttggttttcaaccttaactgtattttagaatcaccgggcacactttgaacaaaacattgatgtgtgtgtgtgcacacacactcaaattttaaacctgctctcgggggttttagtgtgcaatcaagctcaagaaccgttggtttagagcagtggttttcaaccttggctgttcattaaaatcaccttgagaatatacatatatatacatacaccaatgtctgggctttacctctgaggctaattaaattaaaatctctgtggttgtgtccagacatgtgtacttttaaaatgtgcctcctcaaatggtgctactaagttcagggtgtggggtttacatgaagcacttgagataaagaatagcttggtcccatttcacagactgtgcccctcacctcttgagcatatgaatcatcggtccttcattcttgcaacaaaatgtttattgagtacctgctgtatctctggtgagttccttctctttcctgggtcctgattcctccctttgtaaaatgagagactggggtgtctctgagacttattgcag

SEQ ID NO: 137809 - DNA, 1027 bp, Homo sapiens
ttgtggacatccactgctccttagtgcctaaagctggcaacctcatatgctggccgcaggactactgggctggagaggcagataccaacccatctgtgccctggcgacactccgctatttgcctttgcaagagaagttcacaccgaggagtgactgctggagacaattaccaccacagtggtgacctggcctttcagtttcttaccctgaactcctctgatttactctctccatcattcatacacccatttttatcaagatatcactctttaaatctctgttgggagcacaacctctctcctcccacagcttcccagcacacctgcagtatggtctcttggcttttgcccaaacatttgtattttagacactgcttctccacaccccacacttgtctctccgtctctctcttcctttcccctctctccccatcagtaaatgctttcaattgcttctctaaagagcctataccccgtgataccctcctttccttgaccttagacccttcttattatgacaattattatctccaggcccattccctgccccttcccctggctgttttctctcctcctcctgttggctctgagcttgctttctttatagtgatggtactttttttctctcccaaactagctccttcctcatcaccattcctcccagcatcctggtttgcagcagtcaggtgaaagagagaagcaggtcccggagggtcttggggcatgtccctctctgtctcagggagaaagctgctgctggccctaccactagtatcctgtgagaataacagcccagtgctgccagaacctataggtcttcaagagaagatagaaactccagattttaatgtaaactgtctcacttttaaatgttgaaaactattctttttttccccaagaacctggggaaagtagcaaaaccccccacatctctgggctagatttaactcccctatctcccacattaactcagttgcccagttctggaaagctgcctgctaaggacatatcctccatttcactggccc

SEQ ID NO: 137810 - DNA, 1512 bp, Homo sapiens
gttggttccaggagccacagcccttcctcacagccaggctgctggggctggaatgggctgctgagctagcaccacctgcccggtgtcgcttatcccagagggctgcagcactcacagtgagcggctgcgtaagtgtgtccgtgtgtgtgtgcgtgtgtgtgtgtgtgagagagagagagagagagagagagcgcatgtatttgctgtgggactcatggaaggagccctctcattggctgccaagggtcccagttccagtctgtgaatctctgggctgccagctctgccctcccctgggaaggcaaagcaggagagggaggggagagtggagtgaggcttcaggtgtgtctgacaaggaagcaggtacacctggtggccacactgggcattcttgtggcatctggctgtgctagctccaagtctgcagcctgacagctttgtgctctgcccaaattttcccagatttctgttgggactggagcccagagctcattggcagctgtcacttacagaactggatccatcccccagtggagcagggagctgtgtcacttagaattcctgggtagcacattccttcagtagaccctgtcacactcctggattaggctctgttattggccccgcgctcctgcaagcttctgcagacagagtgagcgagtgagcgagtgagtgagccagcgagcggcagcaggaatgacagcactgagagcagagacagccagggacggtgagggcgggcgagtcgggtcccggggggtgcctgtgctggccctttctgcagaggcagatgaagtgggggccactttcagggcttgctagggtttctcttggaacctgggctgctcgacccgagtggagcactgagcaagggggagggggaaagggagggggagagagagggaggaagagagagagagagagactgagagagactgagagaagctcctagcaggctctagtccaagtgagaggctcagatctgtacaattctgtgccaggggcacaagtgggatttggaagagccatgtgtgtgagaagcaaagctgaggtgatgtaagcacctggggaggagcacaggcagaggaggaggaggaggagtaggaggaggaggaggagaaagaggaggaggaggaggtggcagcggccgccgcggtggctgccagtccagagcagaatgatgggcaactctcaccacaagcaaccgaggagtaaaagccaaagcaggatgcattcagcaacaggtactcttttcccttccctccttttccggggctcctacagccagggcctcccagctgctgccatgcggggcccctgacccttggcgtgacttgcaggggctggcagggggcagggagagaacccgagggaaatgagggtgaacttccagctcccctgctcctgtgacaggctgaattgcataagtcagagcatcctgagctgggaggggccagccccttcgccggcaaccctgtgtagcctctggagggtggctggagtgtcagagaa

SEQ ID NO: 137811 - DNA, 1041 bp, Homo sapiens
catcactatacagcatacgcatagctgtgcatatatggaccagctgtttgaactagcatcccatagagaagagaaagagagttaatatccatcatgcacctattatatgccagcacttttcatccacaactttacttagctcagagaaaccaccaggcagggattattgatgccattttacagataagaaaactgagacactaagggagagctgccccatgatccaataacaaggaagttgtagagccaggatttgagcccaaatctgcctaattctcaagcctgtgcctattgcaccataccatgtgcttctcagcatctttgcatctgtgacaggcattagtaaccctggagactggatgtggtggaaggaggggtctgggcttgcttgtggtagggctagcaaatctctatggcaacaagggctgcaatgcccagccttgtagaagtcccaccacatatcgtttgatggcatatttgtattattggaataactgaactcattggggactccatgctgggtccagaagctagagccagggattcctgaggtaataagaaagtagaggattcttgaatttaagcctaaaccaggttaggctgagagaggcttcagatccagacgactggtatcatgctggtttccaacatccctctccccgcaagcaaccgaatcagcactgtaaatacggtggcctgtgcttcaggatgaaaatgagtccaccattctcttctctgtacctaaacaaaatgaggaaatcatctcattacatttgcaaggcatttttatagttgacctggctctttcatcttcacaagtttattgaattctcacatcctcgatttcagtatggtggaagctaaaatggcagagacttataagggagtccattgacccctatccccctgggagcttcttcctaaagacctattttctagtcagacttaatgagtccattggaaggtatggaagaagttaaaattctaggccaccgaacaaaatatttcctggtgccctcctcccatgactgagagatgtgt

SEQ ID NO: 137812 - DNA, 1088 bp, Homo sapiens
aggaaagtccctgggcacccactgaggagcctagggacagggtttgggacagtgtggagcccgtcggctccctgcccccagtgtgggctcagcacacacttttctcatgtggattcttggttatccacaccgctgggatggagagaactgactctgtcaccctcttctggatccggggaggtgagtcgttgggggaagaagggtgcatgctcagcagaggggaaaagggaaggaactggggctcatggaggaggaggagctttctgcactcacagctatgctgaggcagcctgggctgctttgggagggagtgggactgcgttctagaggtgtgcacagaggggcaggatggccacttaaccgagatcctctgaagggaattcataatcggatggctttggaagacagggtggatgtgatcacatcccaaccctgatattctgggatcctaaaggattaataaaagtgatggaggaattctgcacgtgtgtgtgtgtgtgtgtgtgtgtgtgtgtgtaagaattactgcacctcttacttcctctactcttgtcccagattctgaggccttgtcccttcggtggtagaaaattccatctcattcaatccatctcattcaatcttggggctttatttgcctcctggactcctgctaaaatgctgaatttatttttgcaataccaaggcatgtaggcaaggagaggcaggaaaggggttcctgtcactggtcttctgtacacacaggttgctaccaagggaccaagagctttctaattgcagttcaagccagacctcctggcagtaaggcagaagcaagtacagggccctgtgccacactaggacccctctctggcttctgtgaagaagactagccacgtggtggtgggggagggggcgcgtgatgccacagtgacatgcccttgaaaatgtctggaagctactgcttgtggaggtagctggcaggacagactgagtccatgctgtgtctctggagttttagttggccctttgcatcaggcgtatgctcaaaagcagtttatgagctaaagtggtgacgggaccaaaaccgaagtcccatgaggaccacg

SEQ ID NO: 137813 - DNA, 1046 bp, Homo sapiens
ctgcgtggggcctcaggaggcaaagctgaggtctgtagacaaggaggaactttccaacagaccctccatgggtgcagtggcctgccttgaaaaggagccaagggtcttggtaacttttgcaggttacttttttcacagagacacagagtgagccctagagaagaagggcatgtaggagcgagctttctgcttctgagggagagagaatgggaaggaggggccaccctcacctgggatgaaggcccaacacccccctgacctccaccttcacaacttctcacctggtttggcctccctcatctctctccctcctatggggctccctgcttccactctccagcccattctccactctgcagcatgagcgagcctttaaaaaacagacgcagctgctcaaaatcctgtgatggcctcccatggcccactggtgaaagtccggatttatttctcttctctattgcctcctttctactctctaaaaacagagctgagataagatcgtttctcactctaacacagctctgacatttcataaatctttgtcctagacaactggaaagggctatatttaaccttccgtcctgtagcttttaatggagggacttgcttcaggcactgccttctaatgccacaggagaccagagtttttctttgttctctaccagcagagccgcgacctcgacagacagaggccacagctggcctctccctccagtgagacgcacaagttgcttggccaggcatcggccctagagcatccaccttcccctgtctctaggtgaaggaggtccctgtcccaccctgtgaagtgtgacccttcaactttcttatctgcatatacttgaaagactcctcattaaccccatagctgagataagtgggccaggtgagcacaagaataggtcagacagggcctggaggtatgggcttgggagtctgggctaggggagggagccagagagaagaaaatgtatggtcaggaatctggttgcgcagggtgcaggggcgagggtggggaaggaagcaatgctaagtaatgtaccagg

SEQ ID NO: 137814 - DNA, 1370 bp, Homo sapiens
cctgttttccagaagctggagagcttttttcctttctccaaccgctatagttctcttttcaaaacacttaaaccctcttagtgatttttaactgcaggtggcaattaaattggtttcccaaacatggaccaaaccttctctccagtgcctcctgcatttaccctgcctccacccacccttgaaccaggaaagaaaaaaacacacagacacaatttactgagttattgtcctctcttctgtgtagccctctcttaacatgaatgtggcaaaattgctaggaagaaatggtaggatgtatttccactaggtaggtctctttctccacagcggccatctttgattattgtgtctggaatcgagcagtacccaaccaacatggtgcccttcctcaggctcttccttggcgggaagacagaggcagcagttgagcaaggggagccaacagaagtggaatggctcctcattcatagacccttgtgggttttgaaggagagaggaaagagaaggtttggaaagaataggacagaaagggaggaataagaaagaggaagttggccgggcgcggtggctcacgcctgtaatcccagcactttgggaagccgagacgggtggatcacgaggtcaggagaccgagaccatcctggctaacacggtgaaaccccgtctctactaaaaatacaaaaaaattagccgggcgtggtggcgggcgcctgtagtcccagctactcagctggctgaggcaggagaatggcgtgaacccgggagacggagcttgcagtgagcgaagattgcgccactgcaccccagcctgggtgacagagcaagactccgtctcaaaaaaaaaaaaaaaagaaagagagaagaagttgaaaggggtgtttacaagtggaggaatagaaataaagctatgaattgaataatagaaactctgatttttaaaattttattttatttattttttattttaatagttttatgttacgtaaaccattatatgttatttttaaatatatgaaaataaatatatttaatggtttgttattgtaaaatgacacgtttgttgttaaaatttcaaatagtactggagagtttcaagtgaaacatacatgtcaaaatcatctagaataacagttacttgtgtgtccttgcaaacttattccgtgcatatataagcatctgtgtgcttttgatacacaaatgagatcatacaatacatactggcccattccttgcccatttttttcaacttaccaataactctgcagttttctagtttctactcaaagagatatccttcattcttcttaatggctgcatatcatccccttgtgtagatgcaccatgatgtgtggaacccatcccttgttaat

SEQ ID NO: 137815 - DNA, 1032 bp, Homo sapiens
ggcagagccagggttcaaagccaggtctatgtgactctcaagcccagtggaggtcactctttagcacactactgagaggaggtgatgtccctcagagaaatggaagccatcaacagggtgctcgctgggaaggagcaactctgcaagttcctgctttgtctcccctgctttccctactgtccacacctccaaccttatctggggggctcctagctccacgtgcataccatcagtcctcagtcaggtctcagggggccagtcctctttccaaaggccattgccaatgcagccttcatctgcaaagaggacaagtccatgttctcccactgaaccacagtcttgcagtaacaaattcactttggagtcatggaccagcctctgctcccaagtagatctcaagcctcacaggccagtggggtcggggttagagggcctgaggggaactcagaagggcaggggcttgtctggggagtggaggcagtttcgcggaggaagtggtcttggaactgaggagaacattgccagttggagtgaggccaggaatgttcatgaatttttaagggaaagggaatggagtgtgcaaaggcccagaggcatgcaagggcctcgtatgtacagaaaagcaggaagtaattcaagatgtctgaaatttgggctaagtagaagaggaaagaaggatagcataggcagatgagatggcatagataattaatgagcagatagggaagaaaatgccaaaagcaggtctacaagtcttcccacgaggaaggagagccattgaggggttttgtagaggagcagcaaggccaggtgtgtgaattcaaaggcccacggcccccacccccaggcatgttgaaggtggacctattagaacaggtagagactagagcctgcttcagtagctcaggtgagagaggaggaagggctgaactgtgggtggagaggtcatcaatttggggacactctttctggcaagcctcacagccaacaggcctcatctgtatgatgcaagaggtgaaggagaccacagtc

SEQ ID NO: 137816 - DNA, 1040 bp, Homo sapiens
agtcaagtaaataaatcaaagccccaggtagttgtagaaaacacttcctcagactccacaggctcccctctgagattcaaataggttccactctcacccactgggtgggagtcactagtttagatcactcccagctccttcatttggagaaatgatatacagtgtttaaaacaagagaatgctcgggccacctgttataatgacaaagacatgacagaatagggacccacgctgatcttcaccactcactccaccttgggcaaatcattaagcttctgaacttcatattcctcctctgcaaaatggaggtattaaaaatctccaccctgctgccctcacagagttgctttcaccatcaaatgaaataacatatgagaatgtgctttgtcctatctactgtggtcaaagtcattccttttggttttttatgtctagggagttctgtggaaccaggcaccgaagaaaaaagtttaatcagtgataaaacagctgaatggattgcagaggatgatgatgacgtgtttgtggcttcacgcacaactgaagatttatttactgtgatacacaggtctgcaccaatttccttaattctaattgcaattgccttccctttttgtacttaaagaaaacctgctattccacattgaaatcctaattgtaaaagaaaaagaaaaaaattaaaaataagaaaaactgctacctttaagcagccattagaattgcacctggaggctaagttcagatacccacatatgtgagcgcagtccagggcctcgcatctcaaattcactgacatcgttgggtaaagtggaggaagggaggggagaggaggaccaggtgccgagtgagaggcccctcgtctcctagcaaccacttggcctattgtggctccatctgctctctcttagctctgtctatagtcagagacatttaacccttcacagaattccttgtatcaaaaaaatcccatcaagagttgaagtggggcaccaggcagcatatcaaaacaggaacttaggaaaagaggaaccagatgggga

SEQ ID NO: 137817 - DNA, 1103 bp, Homo sapiens
acaacagagcctacatttcttttatattaactcacactctggacagcaggagagaggctacttcatctagagctaaaatcatctggcacttaatcatcttcagacatttttatgttttcatacttataagcttgtcatgactgactaccgagtttcttcttattttcccccagtggtgtgcactaactaagaagaaattttcagatgtcagggcacatgtgccactttttcaattcagtgacccggctgctccatccctggctcctgtcactgaggagtgcagtgtgagagcagattggaggctgccaaacttggggggcatagggtgccattgcttattattcactttcctagggaggctctgatggccctgtgtgcaaacacagaaagactctgatgcctcctcaaccacagtttagctttcccctgcgctcacaagaggtttgcagggtgcacttatttcggcatgaggttgattggatggcttttgtggtgcaaaatatgactgtgactctgtcctgaaacttaatgcctttttcagtttgattgtctacatggagatcagggtgataagtttcaataaacatatagacgcccccccacccacccccattagctagaaaagaccaggactgggttgctttaaatgaaccaagcttgaccaacaaacaagacagccatttgttcactcagatctagccgaggtaactcacaagtgcaccttgagatcctccatgtgtctgtcaacagcgataggcaggatctgcgcccagctcatgctgcattctaagaactctcatttcatttgcatataaaattcattacaggaagtaattaactgaaggaacagcatcatcaaaggctcaaggataatggaaagtaagtgcatcttgccccccaccagtcaattcagatcgtggtttgtggttggtttggttttgtttaaaggaagtccgactctgttccaaaaaccaagaacatataaactaaaaggatctatccaaaatctaaaaggcagtcttgccagttgctatggcccataatgcacacacacacacacacacacacacacacacacacacacacaaaagggctactttttg

SEQ ID NO: 137818 - DNA, 1948 bp, Homo sapiens
aggccctttgttgttatagttctgaatctgagacttctggaaacaggccaggcccaccaactcccttgcaaccagcacttcgacacttaaaataataaaacagctaggctcagttgcttttgaaagtactagaactacttggtgtgaagttcttaaccaaattccaaattccagggattttgcccaaaataaaatcaattcatccctggcctcagtttatatatgaatgccacatttgtctgctccagacttagaattccaaaaaacagacattttcctctgtagtaaatgaaggagcgtttgtgcttttgcttagcaaaaatgaaaggacaccagggtctccttgggaaccattatgactggttgaacgttaaagctgagtatgggactcacatagtataggccttgttacttctgtggacttttctggaagtttcttgtttactacttctaatgggttttgcctctcccctcaccttgctacctctggaggttttcccaaaagattctgaacctgaattctcagacaccttgatgtttgtcagttacctttagtcttgttttcctctacaatactctatatgcctggaatttttagaatatcttctacatcatcactgtggcccacgcagtggtgttcccattagcacaagaggatttggggcagaaatcatatggtcagagagaacatttaagaccggaagtattcatttaattttttaaattaattttttgtaaagatgggggttttgctatgttgcccacgctggtcttgaactcctgagctcaagcgatcctctcgccttggcctcccaaagtgctgggattaaaggagtaagccactgcacctggcctcatttaatattttgcaacaggtagacgtcccaaataaacaaccaaactgtaaaatttctactaatcactaattaacagaacacaaagcatcttccccactcctaacactcaacctctctcctacctttgattatcataactccactctctctcccacccaggcacttaccacaatgtttgctgccttctgcacctacgctgctgagactggagaagagaggctgaaagcccctctcagaaaggcttgcagagaacccaccactactacaattactagtataaataataatgataataatttttgaaggtggaatagagaagagatttgagtgaaatgaagttggccctaggagctcagcttccatttcaagtcgtccctatcctcttttttcctccccattccagttagtagcaacagatggctctgctagcctgactttgatctagtcaccatccccaggagcggaggttaattgttaaccaaggatgctttgcatttggtgggtagtcagtacatgtttttgagggtagttattcttggtacaatagcaagctttgctggtgtctcctctccttatcctgtactacttggcctgcctcagctcctgactgggcctcccccaccagccccaacttattcctcagccccaacttatccctcagccccaaatcccatgaactgcatccctagcacaacaactcacccataaaggaagtgagacaacaggaagcaaaataattaatgttagcttaatgaccacaaactgaccagttgatctggataaattaccttgaacgtgcaaagacagaggagatcctaccaggctctcctaacaagcactgcacctgacatccagtgtaactatctggacaacacagacccgattgcagtctctctgtacctgtcagtctgagcagatctgtccacgcacctgccctcttcctcatcaatgaacaagttgggaaaaagatgagttcatgctcagtgctctgttcctcactcgttccaccttccattatcaagtctgtgacacaatggtgagctttcgctttaatatgatttgctagggccaggactagggtgaggtgagcg

SEQ ID NO: 137819 - DNA, 1037 bp, Homo sapiens
ggggcccagcctcaattccaggtctcctgcccttgggcccaatctggtttcatttaaagcactacaatttatagaagacccacagctggcttctacttttatgacacatgaatttcccaggtatttcaatgaactaatatatatgctttaagggaaaatgttcaagagttctttaattcattaatccaaagacaaattggattttcagtttataaacattagtttccctccaaattcaatatgtgcaccctacttagtacaatggatgttttccctaaaagttgtgtgaaaaatgagttttttagatatcaagtatcattttttagaggtaaacttcctatgtaagggaaccttctggtgacttctttttgaaaaaccgagattcctcttgtcattgtcccataatgtctctactttttttagtgcaaacttttgtatttggtgtttatttaaaagtagggtacaacccaaccaatattagctttcccagagtctactttagccttcccttcttaatctttatgagaaattttcagactgttaaatgctcatgagatatttagttgtgttctagaaatttcacctggcttgatattctgtcaatccctgggctcaaattccagctccatcttatcaaacaataacagaattccctaatcagtactaagctccgcatgcagtctcttttccagaacattctttgcctaatgttccttagtgtggctctctctttagttggggcctccttccttagtacatgcataccttactattctgtggaattgcaagccatgcatcttttagagccacactagtcaaattgattggcatttccatttattttccattgttcccttgtttctcctggacttcctctcgtttctcttttcgaggatgcttagaggcttctcaccagagattggtgaggtttcccccatcatctagatgggagattgacaaattctgtaaaggttaagacagtaactattttaggctttgtgggctacatgtggtctctgtagcacattcttctttgt

SEQ ID NO: 137820 - DNA, 1117 bp, Homo sapiens
gggttaaatttgtttttataaagccttttattttgagataattatagattcacatgcagttttaagaaataatacatctagctgggcatggtcgtgtgtgcctgtagtcccagctacttgggaggctgaggtaggaggattgtttgagcccaggagtttgaggcggcagtgagtcaggatcacgccactgcactccaacctgggcaacagaatgagaccttgtctctaaaaaagaaaaaaagaaaaaggaaaagaaataatacgtattcctttgtttctcccaatggtaacacctaacaaaactatagtacaatagcacaaacaggatattgacattgatgtagtcaagatacagacaatcctaccactacaaggatccctcctcttggccttttataactatacccgcttccctcctgccccacctctgccctcttaacccatggcagcaacttatctgttctccatttgtgtaactttataatgtcaagaatgttatatgaatggaataatacagtatgtaaccttttgggattggttttattcacccagtataattcgctggagatttcattcaggtggttttgtttatcaatagtttattcctctgtattgctaaatagtaccagttgagtatccctaatccaaaaatacaaaatacaaaatgctgtaagatctgaaactttttgagcgctgacatgacactcaaagtaaatgctcattatagcatttcagattttgaattttcagattagggatgctcaactggtaagtttaatgcaaatattcccaaatccgaaacactctggtcccaagcattttggataaatgatattcaacctgtatcccatgatgtggaagtgctgtagtatgtcgaaccattcacctgttgaaggacagctgggttgtttcaagtgttttttgaaggcaccagtcggtgagggaccctgggaccctctggccttttagggttcagctcctttcacattctgtcattctgcttcagaccccacccctgtgcccacaccctgcccttttgtcgctataagctctgcagattctgagacccatccactgaccacagcttccctccttccccttcccttcctgcctccgc

SEQ ID NO: 137821 - DNA, 2280 bp, Homo sapiens
tcactacataccaaatgttaatcaataactggcagcaactttcaagctttaggggccaagagtttgtgtgggactatgtcatcctcgatgaagcacataaaataaaaacctcatctactaagtcagcaatatgtgctcgtgctattcctgcaagtaatcgcctcctcctcacaggaaccccaatccagaataatttacaagaactatggtccctatttgattttgcttgtcaagggtccctgctgggaacattaaaaacttttaagatggagtatgaaaatcctattactagagcaagagagaaggatgctaccccaggagaaaaagccttgggatttaaaatatctgaaaacttaatggcaatcataaaaccctattttctcaggaggactaaagaagacgtacagaagaaaaagtcaagcaacccagaggccagacttaatgaaaagaatccagatgttgatgccatttgtgaaatgccttccctttccaggaaaaatgatttaattatttggatacgacttgtgcctttacaagaagaaatatacaggaaatttgtgtctttagatcatatcaaggagttgctaatggagacgcgctcacctttggctgagctaggtgtcttaaagaagctgtgtgatcatcctaggctgctgtctgcacgggcttgttgtttgctaaatcttgggacattctctgctcaagatggaaatgagggggaagattccccagatgtggaccatattgatcaagtaactgatgacacattgatggaagaatctggaaaaatgatattcctaatggacctacttaagaggctgcgagatgagggacatcaaactctggtgttttctcaatcgaggcaaattctaaacatcattgaacgcctcttaaagaataggcactttaagacattgcgaatcgatgggacagttactcatcttttggaacgagaaaaaagaattaacttattccagcaaaataaagattactctgtttttctgcttaccactcaagtaggtggtgtcggtttaacattaactgcagcaactagagtggtcatttttgaccctagctggaatcctgcaactgatgctcaagctgtggatagagtttaccgaattggacaaaaagagaatgttgtggtttataggctaatcacttgtgggactgtagaggaaaaaatatacagaagacaggttttcaaggactcattaataagacaaactactggtgaaaaaaagaaccctttccgatattttagtaaacaagaattaagagagctctttacaatcgaggatcttcagaactctgtaacccagctgcagcttcagtctttgcatgctgctcagaggaaatctgatataaaactagatgaacatattgcctacctgcagtctttggggatagctggaatctcagaccatgatttgatgtacacatgtgatctgtctgttaaagaagagcttgatgtggtagaagaatctcactatattcaacaaagggttcagaaagctcaattcctcgttgaattcgagtctcaaaataaagagttcctgatggaacaacaaagaactagaaatgagggggcctggctaagagaacctgtatttccttcttcaacaaagaagaaatgccctaaattgaataaaccacagcctcagccttcacctcttctaagtactcatcatactcaggaagaagatatcagttccaaaatggcaagtgtagtcattgatgatctgcccaaagagggtgagaaacaagatctctccagtataaaggtgaatgttaccaccttgcaagatggtaaaggtacaggtagtgctgactctatagctactttaccaaaggggtttggaagtgtagaagaactttgtactaactcttcattgggaatggaaaaaagctttgcaactaaaaatgaagctgtacaaaaagagacattacaagaggggcctaagcaagaggcactgcaagaggatcctctggaaagttttaattatgtacttagcaaatcaaccaaagctgatattgggccaaatttagatcaactaaaggatgatgagattttacgtcattgcaatccttggcccattatttccataacaaatgaaagtcaaaatgcagaatcaaatgtatccattattgaaatagctgatgacctttcagcatcccatagtgcactgcaggatgctcaagcaagtgaggccaagttggaagaggaaccttcagcatcttcaccacagtatgcatgtgatttcaatcttttcttggaag

SEQ ID NO: 137822 - DNA, 3634 bp, Homo sapiens
ggattacaggcgtagaatcatctgtacgtgagactggaagtaagctcactttgaactctccttgaggccagggatgttgtgtagctcatctttgtattcccagcacctagcacagaataaggcacacaagaggcgctcagcaaatatgggaggaggaagggcggaaaaaggggagggaggaaatcgcccttaggagacaccctctttccgcggcggttcctcaactcgggacttctgacctcccaccagcagatggcaagaaagagtcccggcgcgccagcaaagggctgagctgggcggagcagctgaaaatccggcgcgcgcagtctccagccccaatttctacgcgcaccggaagacggaggtcctctttccttgcctaacgcagccatggtaagccgtttagttagcgagctcttaggacgtatccgcctccatcctcccccggccggggctgcccgaggtttcgggattcctactggggatggccgggcagaggcgaagggatcacggcctccgtggtaggccgggacgggctccagggcgaagggcgaacgctggcctagggttggggaggcgcagatctggtgctgctgttgggaaggcctcggtttctgacccggccatacgtcctgatcccgggagaagctgcttttcctcccgggccggagccgcggctgggccaggagctcagactgcgagcccgaggttggtgggcgctgggggtgcccggcggagaaaggttttctttgtcattgcctttttggcacggcctgactttaccatacgtggccggtaagcatctggacacagcattaaaaaggcttccttactctttttaaagtaaaattggtgtcagcttttggctttagtgtacgaaggagcagcacatgtgtttgtgcggatgtcagaatcttgttccatacgtgtcaaaaacagacggtaataaattgtgaaaactttagaaacacaggtagactcctggctcatttctgttgctgtgcgtttcactagtatggtgttcttgaaagaccctaacctctaagcagatacagtttcaaacagtaacatggaaacactttagcaaggttctgaaagatagtaatcagtaaacgttctgaaacatagtaaccaagaatattctctgttacaataagaaggcttgttgcagcttatggatctcacggtgtttgttaaataactgtgtttgtttctgttttatcggaacactatactttaatattgtccacattttgctgaagatgaaactaaactaagagtttagtttcacactaggttttataagctgttctgaaacctgattaacagcattgcaatctaaaactttcaggctcgtggtcccaagaagcatctgaagcgggtggcagctccaaagcattggatgctggataaattgaccggtgtgtttgtaagtatcttatataaatatttccgtggccactgtttttaagtgtctcccaggactcatttggggaccaggctaggggaggaatatctattcttggcttcctctgcccttgaaggagctatactatctagctgtcctccacttccaatcgatttaatatttttgtgcctcatttattccacataccacatagtacatttacatggactcaggattcatgttcttaatgatcctggtcctctgacagggaagatgctataaaactttaaggtatgaaatagttttggatgctttttacacctcctgtgtaaaagtccaagttgggtgtaatatggacggtcttggtgttcagttagtggatctggtggactaggaggtaggtttgagtgctttagtgaatcccaacagtgattatcatttttaacgttacaggctcctcgtccatccaccggtccccacaagttgagagagtgtctccccctcatcattttcctgaggaacagacttaagtatgccctgacaggagatgaagtaaagaagatttgcatgcagcggttcattaaaatcgatggcaaggtccgaactgatataacctaccctgctggattcatgggtaagaagttttaaatactctggagacgcatattgatggcagccctatggtatccaaatactgtcttgatcatttttctaacctttgtaatctgtcaagtctcagaaacaaagcctgaccttccctctgttttttacttaaataaaaaacatgcaaataatcatgaaacgcttttcaaaactaaatttcgattcacttttaaattttacatgcagtcatggggttttgaaatattgaagatctggccgtgatctttaatcttcagaatccttgttggattagaactgggaggcacatgggggttctttttgtttcgtagagagctatggttgttgctcggcatgaggtagtggggatcactgtatgtagtaaccggttactgcttgatttcagatgtcatcagcattgacaagacgggagagaatttccgtctgatctatgacaccaagggtcgctttgctgtacatcgtattacacctgaggaggccaaggtgagtgtggcaagcaagctgggtctttactcagtatagttactttgttctaagggcctgcattgagtacgagtgctgcttgcaatgaggtgggtattgattagttaaaatctcatacctggaaatatctagctaacaattcgatgagattctgtcttacatgtaactttttgtcatgttattaaaagtctggctgatagctgtagggcattgatggatacctaaaattggcccccatttgaagttaacttcctcagcagattttctttttttgtggtagaaatgaattccagttgaaccgcgacttcctggtgtctcttaagagtcaaggagaatgatttctgggaacttgtttattgggtacctgacgtaggagccctttgccatgtctccatttgtgggagtagctttactttggggaggggaaggtgtcgatggaggaaacagacagtccttgaggcactagtttgaggtttaaaaaaagattacagtctttgattatttaatccagtttgttttgatggttttacacaaaagtttagggctgtttggattattggctgtaaatgaaggttaatttaattgactgatgtggctcctaatttccttttgcacagccttgttaacagcagactggagggcacgtccagtgggatctgtgattatttgatttacttcaaggatatcagggagtagagatccaaaattgaaatgctatgtgaagtatttgttgattggatgaactggtaatgtaattgctgtttgtgagacaaaactcagtcgtgatgtacagggagccattaagataaagttgagttgaagggaagaattcccagggccccataaggcttaaagagcctgggaaactggagtggcatttacattggaggagtggagggcaatggtggatgttaggaggacgagcctagagaagggctttatgcaacatacacttgagggtggaaagaacgatcagcgtcacaattaatctgcagcagttagggaacccatggttcctgtatagggttaaaaagtacatgtgagatggattgaatgtggctaacccttgtatttttctagtacaagttgtgcaaagtgaga

SEQ ID NO: 137823 - DNA, 1082 bp, Homo sapiens
tgacttgtttcttctttccttccttcctttcattcgtccattcattcagccatttactgagcacctactatgagtgaggcactgtgcaagactttggaaatcaaccaaaagtaagacagccaggccctgccctcagggagcattgtttctgtttcagagaagtggccagtagggtttggagcccagtgtttctacttggggaagtgtggcaaggcaaagactacggagggacaaagtgagcaacttttcattcctagagcccagtccggtaggatttcaaatgatcacttttccctcaaagactcttaggcctgagatcagaggaaagcccccaatccgtgtttcacaggtactcacaagagaaaatgctaggagggttgtgccttgctaagggaaggaagaaaagttgggggtggggagcatgagatttgatgcagttagtaaagaatgaactctgaaaagtgttacgagagagagagagagacttaaaacaaccatttgtttagctcatgactctatagattggcaattgagctgagttcagctgggtggctcttctggttctggctggatacacccagcatctgcagtcagctggctgtcaaaggcctcgatcacatgtccagtaattggctggtggttgcctgggtgacagggatctctgggccatttgtttctcatcatccagcaagctattctggtcttgttccttatggcgaggtcacagagttcccaagagcagcagagaataagccccaaaatataagtgctttttaaaaaatagctctattggggtataattcacatacattacctgactttgaattttgttttctcccctgtttgcagggaatctgaagcatgtggtctagttgacagaaagagatcaggtttccagagctgaggagtggtgcctataatgaagacagcgtgtttatgcaagcagtttgtggaatttgtgactgcagggaaaatttgaaagaaattacttcctgaaaatttccaaggggcatcaagtggcagctggcttcctggggtgaagaggcaggcaccccagagtcctcaactggacctaggggaag

SEQ ID NO: 137824 - DNA, 1404 bp, Homo sapiens
agcaatgcagctgaagtgcctagagacgggccataaaatggaaacatcaaagtgattaaatgtgcccgaagagcataattgagtgcatgaataagagaaaataaaacaaattgattttctccagtgccagaaaaacagaataattgaaaacaaaataatagactttgaagtaatcaaagtgaggaatgcaccatagtgacatagaaacagccagttgtgggagagatttattgtgtttctgttatcatttttacaactttaatttcattagctaataaatacaaatcaattgaaaaatcagtcaaccagagagacggcagtcccaagccaagatttttattcacatctctaaaacaggctgaggtggtgattcttaatctactttcataggtgcacatttctgccatgagctggaaaacaagttctgggaggtctgtctgctttggaggtggtgatgttctgttctgacagtcactttccacatatagacttacagattcaactttcaaaagggtcacttttataccccgccaaaatttctgacagagaactacccaagtacaagcatcttggtttacatagatgacattttcatggcactgaccagcaactgtggtcttacacaaggtcatcctggattcatttggtgatagtggtggtggtggcagctatggcagcaacaatagcaggagcacctgctgctctcacaatactgctgagcatctatggctcactgcttccaacccccaccctcatcccctgacacatacgtgcacactagtgacactgaaatctaatctaaaaccaggaaggccagtcaagagtataccactcttttggcttccagcctggtgaccatgatcctggggaagatcacaggaggggagctgggccagaggagacttctcatgttcactatggcaataaggaactggggacaccaagccatgctgggctcacatgctgaatgatcacagagcaatcatgagaccaccacagaaccatttttatggctcctccaagaaaagaatccctctaccccactcttcagctgttcacggctgggctcagtgacccttcacttcaggatccacagtgatagctaatgtgacttgaattgtgggttttcctttcacaggcccttgagctctctggcagctgttggcacttctagatgtttgtgacacaccctaccttcagggctccacagttagcgactgtttctttggctccagtaaaggtctttgggaccattgggactgtaaaccagggtgtgcagaaggagttggcagtgctgagactggcattacttgttggctcagtcaggatggcatagttaatagattgtgcctgccaggcaatttgtcctggagaatttatcttccaggaagcacctagaagctg

SEQ ID NO: 137825 - DNA, 1030 bp, Homo sapiens
tggggagtaaaagtctaggttccctactcagccaccattgacaccctggggagaagaagggcacctcagtattgctgggtggagtagaattcaggctctccaatagacctccactgataccactctggccaaaaatgggagcggcacctttttattgctccgcatttggcctctactgacatagcagtgggtgggcctccttgccattaagcaaagatggaaagtcctgactttctactctgccttctttgacaccaccctggtggaatggaagggaagcctaacagtaaccatttagtgttaatatgtgccaggcactattctgggcactggcaatacataattaaatagaatagataagccaggcacagtgatgtgggctgatagttccaaatacttaggaagctgaggaaggaggatcgcttgagcccaggagtttgagaccagcctggacaacatagtgagaccctgtctcttaaaataataaaggaaataggtcaaataaagtccttgcccatcatggagattacattctagtgtggaagatagacaataaacaactaaataaaaatttaatgttgtttactgataaattctgagggatgctattcagtaaagacctctcggaggaggtgacatttgggaacagagattaatgaaatgagggaaggagatttacaaaatttgagttcggccgggcatggtagctcacgcctgtaatcccagcattttgagaggccgagacaggcagatcacttgagcccaggagttggagaccagcctgggcaacatggcaaaaccctgtctctaccaaaaaaaatgtaaaactgagctgggtgtgatgacatatacctgtagtcccaactacttgggaggctgagatgtgaggatcaattgagcccaggaggtcaaggctgccgtgagccatgattgcactactgcactccagcttgggcaatagagtgagaccctgtcttaaaaaaaaaaaatggtagtgaagtacattctagatgaagagacaagcaatatc

SEQ ID NO: 137826 - DNA, 1079 bp, Homo sapiens
aatctgaagcttctagctccctttccctagtagagaaggaaaagaaatggacagaaggtaggagaagccagctcacccagctcctgctgcctgaaatgtgctgtagccaccagacccagtctgccatttgcagttccacagccccaatctgagaccctttgcacatctactggtaatattcttaggagaaccattgtgctgcgtataagcagcacttcctctggcagcctgacatccgggattggcatccttctaggggctagcaattggagctcaggtttgcgcatattcaaggcctgctggagccccaggcttgaagcagtgctcctgcatggtgggactctataccatggaaacttggcttccttccacactgtctctttcttcttgagaagccatgaggataagttgaaaggtagggttggtcccaaggataaactgaccatttgctttagggcttcttggaaggacttcagagtagggttttggaggatacctgagccaatttgcatgacttcaggtgaaaatctctgtgatgtccatcctttatctctctttcctgtcccctgctggctctttattcctcttcatctccctgtggtcctttccaggagcctactgccagcttgggcttcttcatcaagcaagttcctctctttcttgtttcactaaagagtataagagatggaaaggcttcttgtcatcgttgttattgctgttgttaaacagaaaaataagttacaaaaatgtcatgctgaaaattttaaaaattctgggccgggcgccatggctcgagcttgtaatccagcactttgggagactgaggcaggtggattgcttgagccgaggagttcaagaccagcctggacaacatggtgaaaccccatctctacaaaaaaaatacaaaaattagccggatgtggttgtatatacctgtagtaccagctacattggaagctgaggtgggaggattgcttaaccccagggaggttgaggctgcagtgagctgtgactgtgccactgcactccagcctaggtgacagagccagaccctatctacaaaaaaaaattttttttaa

SEQ ID NO: 137827 - DNA, 1124 bp, Homo sapiens
ctcagaactgatcctggaccggcttctcttacccttcttccttcaactctgccattttcccccatccaggctctaaatcctggtagagcacagacaaagcaatagaaacagggaaaccaagcaagccttgcagctactcgctcacacctccatatgtgcagatatgtgtatgcccttgcttccctgcacacatacccagggacatagctccagagagtggtggcatcttgctattgaggaaatggaaatgacaagtgagagaagacataaggaaggtaatgcaaagggaagagaacgaggaaaggtaagaaccctaaaagagcagaaaatcaaaaagagatttgagataaaaggctaggacgagggttggtgaaaaaaataacagatctcaaaggacatgaaaattacatggaagtcaagctttttaaagatcctaacaggttaaagcaatattctgattgtaacccaatgaaatcaaactggaggaaaacatatggaccagaaattgggtcctacaaaagcaactacatgcatgcaaactggggcaacatggcttagcagcattttgctaaaagagaattagggatttgagtcaactcggagctcagtatgagtcaccagggcaaggtggcctccagagatgctaatgcagtatcgacctcattttaaagggctctagacaaataggagcatgttcctggaggtcagtcaggctggggagaggactggagcccaggctccaaaaggtctggttggaggtgctggaaccttttggagaagacctcggggatgtggtctctacttcatatatctgtcacagtgcaaagggcatagacagggtctatgtggccacaaggcatagagctggacccatggatggatattttaaaaaggcagattttcattcaatagaaggaagacattttctaacaattagaactatccaaagtggaacagactgcctagaaaggcatgaggtctctgtcactggagatatacaaatagaagctagacaatccctaggctgtcatattgtagaagggccccttccttgggggagggtgattggactaaattgctgttaaggctccttccaaccctaagattctaggatgctgtatatt

SEQ ID NO: 137828 - DNA, 1028 bp, Homo sapiens
catttgcccccttttcagtaccatgttccccctcaaaagtgcataaactgaagcccagaaagcaaaagaagtgctgagggggaaaggggaaggggtggagagaggttagcacctccctctttccttcagtgagatcaaagccagcattttcccttgaaggtcagctggcctctttcatcccctgctccacctgtctgggaatgggattgctgcttgcccatttcctttcctcttcggggctggaggggcctcaagctatttctagttctagccaaatccctccactccaacatctcttttgccttacgtgatcatatttcctttccacctcgccagtaagtaacaagtggcaggaccatagggcagaaaactatgagagaagtcagtttctccacaggctagtcagtttctcctaggctaagctaatggcttaagcaagcggggagggacactgaggctgctgggcttggtctggcaggaagaacagactcatctttctacatctcggccctaagcgcttcacctgacatccttcagggtgtggatgaggcttggttaggcaagggcctcttgccccaggagaagggaattcacatttattgaagtcctagtatgtgctgggccctatgctaggcccttttatagatattatctcattggctcctaacagcccaaccaggtcagcatttgtcatcgtcaggtggaaatgatgaaacagagattaaaaagcttacctgatgacaggtacactaaaatctcagaattcaccactatataattcatccatgtaaccaaaaactacttgtacccccaaaagctattgacatttaaaaaattttttttaaatgaagcttacctgagacacacaagctaaatccaggcaccaaaatctagctcccccaactctaaagccagtgctctttccacttcatcatgctgcctcaagagtctagaaaaactgttaatgctatgaattgattctttgaattatttcacacaattagctatatggctagctaaacccttgg

SEQ ID NO: 137829 - DNA, 1037 bp, Homo sapiens
attattaattttgttgagtttgataatggtattgtgtttatgttaagaaaaggtccttatctgttagagatacatactaaaatatttatcagctatgaaatggtatgatacctgggatcagctttaaaattcttcagaaaaaaaatgggggatagaataaataggaatagtaatattggcaattgttgaagctgggtgatgggtacatgggggttcattatactcttctctctgctttatttatgtttgaaagttcccgtaatgaaaagttaaaaaagtaatataccctagattactctggaagtgagtcatacattagtgaaaattagtttgagcatgctaacaacatctagtagactcggacagctaccaggaatgagattttggatgggcagagccaggaaggagggcaggtgtatgttggaacatgagccacttttgggaactaggaagtcctggatgcggtggagaaatatttgtgagggatggggaattttgaatggtcagacaacagtctgaaagttctaggagagaaagcaggaagtgaaagaagagaggagacagagtgcaataggcactcatgttcatgtattaggtctctcgctaagcctataagttcctggaagttgggtcctgtatcttaatcatcactgtcttccctagagctctcaggacattagtttattgattttatttcattcattcatttatttaagaatacttattgagtgcctatgaatgcaggcaatccaaacatgtgtatgcagtagtcaaaggagatatagcagtgaacaaaacaaagtctctgccttcagggagctcacattttagtgggaggggacagatagtaaataaacaagcatgtacatgtcagatggtgataagtgctgcagaggaaaataaagtagggtaaggggttggggaatgctgggtaattagttgctcaggaccaaacttgaatggcacttgggcccttaggagctttttcaggtcccctctgccacctggcttttggtcatgttggactctgtgccgtt

SEQ ID NO: 137830 - DNA, 1040 bp, Homo sapiens
cagagtttttaagcagaggagtaatataatctaactgagatttttcaaagatgatgctgactgttgtgtggagaccatattgtactgggacaagagaccactatataggctaatccagtagtccagataggaacagatgtggccctggactagggtagtggcaaggaaggtggtgagagtgattcaagaaacatttttgcagtagaattgacagatctatgactcttttgaatgtggaacctctttgttttactgctgaggaaactaaggcacagagaggccaggttgataagaggtcatttttgtattataattgaatgctgatttcccaaccactgatttcatcttctttctctgcacctactctacttttcataatctttagaaattcccactacctttgtgtcttctcccatatgggatcatcagccacatccagcctggtccttttgtacagctccctaaatctgcctctgcttgccatgcccagtctgctctgggttattgtgactgctctctggctggcctcattgcctcctcccagctctcagaacaggtcatttttttatggcttcactttaacggtgtttccaatcacccttcagcaactctctactcactaaaatgaaaatccagacttggacagtggcttcatagcacttcctcagctagctccacccagaccttcctgtttgcccttgtctcccattgttcccattgtaacctagctcacaccttcaatctttagcctttgtagctcagtaaagtcagagctacccctcccatctctgaaagtttaagccagctcccttgtgcttaaaattctgtcttcttctgttctttctaattgactagcacagttagatatttgtcctgaatcattttagttattaattcattatttcaacaagtaaagattgaatacctcttttgggctaggcattgtactagccactggggatgaaaaacaatcagtaggacaaggtctctgccctcaaggagcttacagtctgatggaggagacagacctgtaaccaaat

SEQ ID NO: 137831 - DNA, 1006 bp, Homo sapiens
tagacaaccctctccatggtcattcctgaagacacactcacatattttcttttgtctacacagctcactttgcccatcatctaaagcatctgtctgtacagggttacctcaagacagtcatgttacaatttcccacatcatagtttatcttaacatttgtaacaatttagtgaggtcgtttcttgataccttaatatctccatttcccaatatataatgggtaccatggcaggcaggacccattgttctctatttcaaaatttgctcatccaacattgccaaaaataaatttatggctcatttcttaaactttttcacccattttccccatctcataaatacccaaagtacattctaagtgcactatcctaaaggccctacccaaagtgcctgtaggatattatcaaaacctagtctgttgctttagtgcagaagtgtgggtgctacctgaaggcagaaaggaatacctataagcttgtacccagtaccaattgtttgggaaccagaaatctaggctgctacatttcaaagggaagtgagaaaattggagcttatgaaagataaatgactcaataaaatggtatacatacagagcctggcacatagtagcccctcaataaccatttgtaataagaaataagcaaagtatccaaggtctcccaaatagtgagtgacagagtcaaaacttccaagtctagttgtttcccctctaacatgttacctcaaaaatcgtctttaaaaatattttgctttccgtcctactcttaagaagtatttaagaacagaagaaactgtctgtgctcttatttcattgtggactgaaatttgttgacttcagagccaaaataactttccttgaagccttccctaaacctcttcctctgaacacccagagccatttcttggagccatttgttagattaaattctgtcttttattatcatttgtacatccttatcccatatttctagtttcttgaataaaattcttaaagtataaatgtatt

SEQ ID NO: 137832 - DNA, 1116 bp, Homo sapiens
atgggccatttcatgggtcatcaaataaacctcatcaaatttaaaagacagaaatcatacagtgtgtattttctgaccaaaataaaatcaaacaggaaatcgataaaagaaagataacaggataattgccaaacacttagaaactaaagaatgcacttctaaataatacatggatcaaagaggaaatctcaaggaaaatttttaaaatacactaaacaattaaaatgaaaagacaacgtgtcaaaatatgtaggacacacctaaaacagtgctgagagggaaatttatgacactacattcttaattttaaaaagaggatagtctcagatcaataattaaactgcaaccctaataaaatagaaaaagaagggcaaaataaaaccaaagcaagtagaaggaaggttataataatgaacagaaacaaatgagattgaaaacagaataataataaattcaatgaaacaagaagttggttcttcaaaaacatgaaaaaaatttacaaatctctagtaagagtgaccaaaaaaaaaaaaaaaaaaaaaaaaaaaaaaaaaaaacagagaagacacaaatttccaatatcaggaatgaaatgggatcttaccacagcttccacaggtatcaaagcaatactagcaaaatacagcattctatatacataaacttgaccacttagattaaatggactcattcctcaaaagccacaaactaccacaactcaccaaatacgaaataatttgaatggccccgtagctattaaggaaattgaatttgtaatttaaaaactcctcaataaatgaactctccaagcctagatgatttcactgaagaattctaccaaacatttaaagaaaaattcacaacaattctacacaatctttcagaaaatagaagaggaggaaacacttcccaactcactttattaagctagtattatcctgagaccaaaaccagacaaagatagtaccaaaaaaagaaagaccgtatttctgctctcagctttgacatctgaaagacacagcaggcagcatctcagaagcataaaaaacagaacggaagaaataaaactgtccttatctgcaaataacatgattgtgtacatagaaaatctcaagg

SEQ ID NO: 137833 - DNA, 2202 bp, Homo sapiens
agcatcgctgcctagcccaatagcaaaagatagactcgggcactgggaatttaccggctgctttaggcctaatacctcgtcaagttgcaccatttgataaaatcagaggaattaattaaaaaccatattagaaaccttcatataattgctgatttcctgcttatgctctaagcacatgccaaggtagcaaaatgtacagattgaaactggatttcttgtccttttaccattaatgtaaaacatgtctatatttcctgctaggtcacccattggccttataaactttttttataaccaggaaagatactccaagggagaaagagtatccctgtaaggaaatagggtttcttccaaggcaaggaagaaaataatatttccttagaggagtacaacaggacaagggcacaggaaggtgaggagactctgcctcttcaaaggaaattagcagaatgcatggaaaagaagcaaaaaaaaaaaaagaaagaaagaaagaaaggaatcaaacatttattgagcacctactatttaccaggtactttactagttgctttcacaggacttatttcatttaatcctacaataaccttgtgaggaacttatctacgtccataggagagaaaattatgtctcaaagaggttaactggttggcctaaggtcccacagctaccaagtgagtaggataggagagcaagggaagagcagtgaagatgcttggacaagagaggagatctttgtcatttccattttgaaactagagaactggtttcctttaagactcattgtatcagcaggcagtgcttttctattcctggagtgaccttagactggaaggttaattgtcatttttaaaaaggggctagcattctttcctcaccttcagtactcctctcttacctctatgctcattctcttaaatcctccaagctaatctttcagaccactcacttcctcaattaattagaatacatcctctgttctttctactcccttgttggttcattagttcaaacaacaatcatgtattaaatgactactatgtgtcagcattctgccaggcaccaggaaagcaaaagtaaaaaccctattcctgctttggaaagattcataatcggcagggcgcggtggctcacacctgtaatcccagcactttgggaggccgaggcaggcggatcacgaggtcaggagttcgagaccggcctgaccaacgtggtgaaaccccgtctctactgaaaatacaaaaattagccaggtgtggtggcgcatgcctgtaatcccggctactcaggaggctgaggcaggagaatcgcgtgaacctgggaggcggaggttgcagtgagcggagattgcgccactgcactccagcctgggtgacagagcgagactccgtctcaaaaaaaaaagaaggattcataatctaaaggggggccagagacatggaatcattggtttaaatcctattgcaaagggcagtggcagatccaggatttgtaggcctgagcttatgcaattgtacaggcaaggacagggaactatttaagaaaaagaacataaaattttgaatataaaattaggtgcaagttgaaagatattacaaacctcacaaaattcaaaacaattttaacatgtcttattacttaaatgcatgacacatctatagtacttttttcctacatttttttggctgcatgtgctctaatcacctttcatttgaccatgattttgtaatgtcattttcttttttttttaattttattattattatactttaagttttagggtacatgtgcacaatgtgcaggttagttacatatgtatacatgtgccatgttggtgtgctgcacacattaactcgtcatttagcattaggtatatctcctaatgctatccctccccccccccaccccacaacaggccccagagtgtgatgttccccttcctgtgtccatgtgttctcactgttcggttcccacctatgagtgagaacatgcggtgtttggttttatgtccttgagatagtttgctgagaatgatggtttccagcttcatccatgtccctacaaaggacatgaattcatcattttttatggctgcatagtattccatggtgtatatgtgccacattttcttaatccagtctatcattgttggacatttgggttggttccaagtctttgctattgtgaatagtgctgcaataaaca

SEQ ID NO: 137834 - DNA, 1014 bp, Homo sapiens
acctgcaagtgcatgtgaagttggaaaccatggattttggcccatgatactcgtctgtccagtgatacagttttcttcagtagtgacagaacagagaaggcacgttgcgggaggtggtgttgacttggagtggtgatttttccaggtaggtggggcaaaaggtgatgaaggtgatggagaaagagggttcaagtgtgtaatcatgtggtctaggctggttgtgaggccaaaagacagcagacaaacagggagaaggcagggatcaggggattgggtgtctacacgaggtcagaagagcagagatagtggggtgaagagacttggtaggactagcacttggactcagtgtaagacaatagaggcagcgaagtagaaagggcacatgcttttgaaatcaaacacatttgaatttgaattacagctctaatattagttatgtgactttaggtaacttctttgaactctgcgaacttcggtttcttcatctgtaaagtaagtataatgacacctgagtcacagaaaaactaacacatggtcagcttcaatagctgttagtccccttctctcccactcaacatttattgggctcttaatatgaaacattctattttggggacactgagataaaggccaatttacttccttttagtgattcatggtttagcacaagggacacaaagaaataaatggcaatacaagataaacagataaactagtgttcaagttgctaagtacaataatagcagtatgtgctatgagaacccagaagaggtatgactaatagtgcctgagagagtgagggaggctttcctgtaaagctattgacaacccaatttttagtttctaacgctgaaagaaactagtgggaaatgagcagataacattttaaggggaacagcaaagaagcttttgcttttatttttctagacggcgtttcaaggagcaataggttcacaagaaggtgtttatttgttttaaggaaaatgacttgtgatggtttgttaactgaggaga

SEQ ID NO: 137835 - DNA, 1049 bp, Homo sapiens
gccaaaaataaagtttatatagcccctctgctttattgattggatgtttgacttatcaagtcattcagtcattcagtgactatttattgaatactaacaatgtgccagacactgccaagtgctggggctacaatggtgaacagtgtagatgtggtccccatgccatggaacttataatccagtaagaaaggtgcactaaaaaacacgcaaaacataagtcaaaagaattttaacctgtaataagtgccataaaggaagcatatggggagtggagatagaaactatcaaagggatttaaatcaggtctctaagaaaggcctttctgaaggtgtgacatttaaggccagaacttcaggggtaagaaagactcagccaggtgaaaaaaaaaaaaataactaaagggcaagtgttccaggcagagtaggcaaccatgtacaaagatgctgaggtaagaaagagctcagtgtattctgggtgctgaaaggaggccactgtgactaaggctaatgagtgaaggataagaggtaagagatggaatgggccgggaccagaccctcaggggcccctgtagaccacggtgaagagagtgggatcttattcttagagtcagaagccactgaaggcttttaacaggagaggtaccaggatgtgatgtgtgttttaaaactactctgagccaggcatagtggctcatgcctgtaatcccaacactttgggaggtcaaggcaagaggatttcttgagcccaggagtttgagattagcctgggtaacatagtgagaccctgtctccacaaaaaaaaaataaaaaattaattgggtgaggtggtacatgcctgtagtcctagctaatcaagaggatggggaaggagaatcacttgagcccaggagtttgaggctgcagtgagctatgatcatgccgctgcactccagcacaatgattaatatcatgaactcagacccaatctgtgtgtgtttatatcctccaggctctgccacttatcagccgtgtgacattgggcaaatgccttcacctctctaagcctcgatt

SEQ ID NO: 137836 - DNA, 1603 bp, Homo sapiens
ccaatgttctaatgcttgcatggcagagcacatctattcagcacaaaaatgtgctgattattagccagtataatatggccgttgggtgactgtgacaggacctgacgagatgggtcagagcatccatcaacggtcccttcctcatctcactctctttgatctctgccaccaggcctatgttttgtggcaaaaaggaatgctgacatcaaaagaaggaagtctgtttttgtcagcattttccttttctctttcctgggtttttagggctagatctgccaatagttttaaaaatacaaatcacattcagcagtcattttatagaattgttgcaaaattcatcacagaaatctttccattgggtagatcacctcaagagatctggattccagagatctgagtcttgctgatggctcttgatggaactgaggagtttggattcctcaggtacatatttttggggagatgggagcctatttaatctttgcagaccttggactgcccagttttacactgtgcatgatttgactggtccaccaaagtctgcctactaggtggtttaaaaatatcacaaaggggggattaggggaaattctgcaatttgaggttgtcttttcttaaaacatttttctctctttccttaccccccttccctctcctgctgttttatgactattctttcctaacttcacaattcttgatggagacaggaggctataaccttgccaacacggctcgatgctggacatacttgaccggggtcatcctagggaaaacactatcctctgagatcccagatcatgaggtaagtaaggctctgacaagtcctctcttctttaaggggaagagctgagtcattccacctaatcaaaatcacgtcctcaccactcaataccgttttgttgagagacacttcaataacaataacacactgtcttggcagaatagtggactcttgttccaaaatatccaagaccttctgcctttttgtttttttacaagagatctcaaaggccaaccaactttaatttctcaattaattacagagactgtgggaaggggtcacctgttcacacaaagaattctttggaatatgtgcatatttttatcccctagcctcaaaaaggaaggggctatttttaaaatgtgtaagctggattctcatcttttttttaagaagtttcataggtggtacgtggcacatgttctttggtggtagtcctgatctctcaattttctttgactaatgtaaaattcaagaaacccacaagcactacaaagaccattgctgatgtttttctagcaattagtggcacacagaggctggaataggaccatccaaaatgtgaaacgtcatttgagcccttgccattttctttagtcatacaagatgggctttatgttttccaaagcaaagatgtctgttctagttttcccaaaacaagttcatggaaagctgtctgggacctgtgagtgtgctgataatccctaatccaaaggcatacctttgttcctacctatcaccccagttcccctgcaagtaggaaccatgttatagatcaagatgtataactacggaccttagactagatgacttaaaataaca

SEQ ID NO: 137837 - DNA, 1028 bp, Homo sapiens
cactctaacataggcatgtttaacatacatcctgccctagaaaaataactgttaaaatatgatgagttggagttattctatgtgcagtacttaaaagtaataaaaatgcatttctttttaagtcccacaaaaaccatgcaatgtcaagttaatgatgaaaatcaatccccaaactctttcttgcacacctcattgtatgacggcattgcagagatttccaatcatctgggaaaggatattatattttgatgagctgcaccaggtgctaactatatggcagaatttcggctttgaatcttagggaggccctcaggggtaaagaagagtgagggaagggctaggagcatgtttattgttaacaaatcactattgttcacctaagcttgaaaagtgagcaattgaattggaaaagaagaggtatcagttatataaggaaggtagaaaatgtgattaggaaatgagaaacagagatataggcctttattcccacccgtatgtattaaactgtgctctaggtaaattgtgaattcttcaaggcttagagagtaaaaactaaggcagagagcataagcacaagcagtaaatatacacgtaaatgttctaactatagtttggaatgactccaacactcccctttcccccaagggcatcgctatccagggtctgcaaaggccaaatagctgtttggcttccaatctgattttttgcctaagaaatcagagaagtcggtttcaattttaataatatattctcccaacctctatataacagaaaggcacttgtgtttctgtcccttcttaaagcgaattttgtgtttggtgaaaggtaatagattgacagcactggaaaatgaattactgtattcccagaacaggtataaccgggcagtgacacgatgaaatttctctctgcctttggggaccattagaatactattcaggaagtcactgctctggtgtgctgtgctgaactcaccagtatcctagtgggctgaaagaattaacatagcactcaaagggcctgacttg

SEQ ID NO: 137838 - DNA, 1040 bp, Homo sapiens
agaatttatcttccacctgggactccaggttatcattcaattttagaagcaggtagggctgggcacaggtggctcacagctgtaatcccagcactttgggaggccaaggtgagcagattgattgaggctaggggttcaagaccagcctggccaacataataaaaccccgtctctactaaaagtacaaaaattagctaggtgtgggattataggtgcgcacctataatcccagctacttaggaggctgaggcaggagaatcacttgaacctgggagatagaggttgcagtgagctgaaattgtgccactgtactctagcttgtatgacagagtgagactctgtctcaacaacaaaaaaaaaaggaagcaggtagatcttcagtgaaagagagccgaaaaagtgtaatttactcctttaggcctggtgatgtggcaaaagcaatgcatacacacacatattcataaataactattttaagcgatacaaattttttaaaattctctttcatttgatgagaagggatgaaccctctagaaatttgcatgtgagaacaagtaattatttagccttccatcttcatccctgatatggtctagctttgtgtccccacccaaatctcatcttgaattgtaatccaaattgtaatccccacgttttgggggagggaatcatgggaggtgattagatcataggggcaattccctcatgctgttctcatgatagtgagttctcatgagatctgatagttttataaggggctttccccccttcactctgcccttcctcctgccgccatgtgaagaaggacatctttgcttccccttctgccatgattgtaagtttcctgaggcttccccagccctgcagaacctctataaattacctagtcttttttttttttactttaagttctaggatatatgtgcagaacgtgcaggtttgttacatagttatatatgtgccatggtggtttgctgcacctatcaacccatcatctaggttttaagccccatatgcattaggtatttgtcctaaggctc

SEQ ID NO: 137839 - DNA, 1941 bp, Homo sapiens
atctacagagacagaaagaagatgaggggttgcctgggtctagggatgacagcagggattaactataaatgggcatgagggatcttattggaatggtgaaaatattctaatacgagattatgatgatgaattgcacaactcagtaaattcactaaaaatcattgaattgtatacttaatatgagtgaactttatggtatctaaattatacctaaatcaagctgttaaaaattcatttgatctcacattttaaaattattttacattagttccttataactatgaatcatgtaaaaaatgtataatgagatctcatgttcatggatcagaaaacttaatattgttaagatggcaatactcccgaattgacctaaagattcaacacaatctctatcaaaattccagctggcttgttgtagaaattgacaggctgatcctaaaattcatatggaaatgcaagagaccccaaaacaactaaaataatcttgaaaaagaacaaatttgaaggactcacactgtaatcaagaccatgtggtcctggcatatggatagacacgcagaccagtggaatagaattgggagtccagaaataaaccctcacatttatgatcaactgactttcaacaaaagtactaagacaattcataagggaagaacagtcttttccacaaatggtactaggatctacatgcaaaagaatgaatttcaatccctacctcaagccatacataaaaatgaattccaaatggatcataggccaaaatgtaagagctaaaactgtgaaagtcttacaagaaagcataggagtaagtcttcatgaccttgggtgaggcaaagctttctcagatatgtcacagaaagtacaaaaaaaaagaaaatatagataaattgaccatcaaaactaaaagcttttgggcttcaaagaaagtgagaaaaacatcaagaaagtgaaaatacaaccaatagaatgggaaaaagcatttgcaaattatatttctgatcagagatgtgtccagaatatataaataattcttacaactcaatgatgaaaagacaaataacctaattcaaatataggcagaagatttgaatagatgtttatccaaaaaaaaatataaatggccaataagcacttgaaaagatgctcaacatcattagtcattagaaaaatgcaaattaaaaccacaatgagatgccacttcactaagatggctagaatcaaaaggtcagataataacaaatgtacatgaaggcatggagaaattagaatcctcatacattgctggtgggactgtagaatggtgtagccactttggaaagcagtttggcagttcctcaaaagcaaaccatataactgcaaatgcacgccattatccattagaagcttctgaggaacaacaagaaagccagtgtgcctggagcaaagtgagtaatttggacagtggcacaagaggacagagaagttgccataggccacatcatacaaggccttatggaccatggggctttggattttattctaaatgcgacggaattttaagcaaggagtctttgttcttagtaagtttataatgtccactgtaatgaatgagaaaaagacaattagaagaagtgctgaacatccttgaaggcccacctgtgatgggaaccataagtgtttaatgtgtgtctgcagttatagttttgtgggtttttttccaaaagcacttggctgtcctagctttgaaagcagagaaaatggcagaaaggggtcagatgctaagaggaaactaaacatgctaaactcgtaagtactcaggcaggttcttacagagaaagatggaattttcagaagcccttaagaaagggaatgctgtatttctactttttgccatcttttactgctttgctgtaaacaattagatgcaattaacttagtgaaaaaaaaaaacaagaatcagaa

SEQ ID NO: 137840 - DNA, 1051 bp, Homo sapiens
tggaaatttagaagagggctgaatccttaaggaccttgtgtaacatactaaagtgtttggactttatcctaaaggcagtgggaagctagaaaagatcattaagcagggaagtgacacaatcagatttttctttgacaaaaataaccctggcagcagtgtggaggatgaaatccagggggtgagactagaggcaggaagactggtacagtcagccaggggcgcgataatgaagccaatggcagaggaaataagaaggaggggccaaagggaggttttatgaagtagaattatccaagagaggaagacagaataaacaaaattgactctaaggttgccagtctgagaaatgatgttaagaatacaggaggaagagtgggtttcagggcgtgataatgatgtcatcattggtcatggtgtcttcgaggtacctgagaggtagaaagatgcctggtaagcatttgatcataagagtggagtgcagcagagtggtctgggcataaatgagaatggcatgtgcaagtaacaatccttaattcaacaaatatttattgagggcctagtatgtgctatacactggaggaagttctcaaggtcctggagttacaaaggtgaattagacagtttccacccactgagagcacaccctaaaaggaaaaccaagatacagaaacaaaccacgataaggcagtgtagaaatgcggcgagagaggtgtgcacagtatattattaagggagcatggacaagacacatctaacctaggggagaagaaggatggcttcccaggtgatgtgctgtcttagctgaatcttaaagaagaaataggagttaatcaagtaaaaaaaaaagagagggtagagcattccaggcaaaagggacagcaaaagcaaagttggggcaggagcagggagaaaaaacagtgtaggcatttcagtattgctagagcacaaaatacaagaaatgaaactaaagtacctaagggctgggtcacaggaagccttaaataccatgttcaggtagtttggactataaataatagggagctagtgaaga

SEQ ID NO: 137841 - DNA, 1512 bp, Homo sapiens
ccggatttacctgagttccttaaattaagttctccagtgaattcaagatttgatttacaaagaattatcacatgacttttcaggaatatattcctgaatcaaattttaccatagtattactatttataaaatgtaggtattttatgatagtattactatttatacaatataggtatttcacaatacacagtctatgcactaacataaagcaaagagcagatttcacagaactttgttttcctgtttttttttgtagcaccatatgagatgtgtagatttacatgtaaggtaaagcataaaaaccagattatgagtactgtctagagagaaggagagacacaagggcactaaaagactatgagaattcaatgggcaagagatacaaaaagagaaagaacactgaaaattttagccatttccaatttctgggaaagccatcatgatttctatctctggtatgcctctcacctcagaccaatcagttgaattttcctcccctgctgatctcctgtaaccatttctgcccttaaacatagaaattacttataatggtacaaatagcatcatttaatgaagcgacagtagaagcaccaataccacattcccagaacagcttaagaggtttgatcagctagtactgaaaataaggaaaacaacgtaccttgtttgaaagtaagaatgaaacttgctaagcccaaccctggatcataaaagctacaggcttgggtaggggtgctcttaaatgccaaagttacagctagaaaaatgacccttgtcctgacctgccaacaaccatggaaatttacagaagctccaacaactgcagctctgtagaaatggtggacagaattataaaaagatatttcagagcttctagctaattgcagttaaacacccaaaatgtatgaagtgaataaatttctaaagggcatcttcccacatcagaaaaagcatcagctgttttctccatctttccatgtaataatcagcatatatcaagtactggaactaccatccataattctactatgacgggccccttgaaaaggtacatttcaagaatcataacttctttccatttatttagatcatctttaatttctctcaacaatataattttcagtatacaagtcttgcacttcttttgctaaatttattgctaggggccggatgcaatggcttatgcctgtaatcccagcactttgggaggcccaagcagtaggatcacttgcggtcaggaattcaagaccagcctggccaacatggcaaaaccccatctctactaattgtacaaaaattagccgggcatggtgatgcgcgcctatagtcccagctattcgggaggctgaggcacaagaatcgcttgaacccaggagttggaggttgcagtgagccaaggtcacactactgtactccagcctaggcaacagaatgagactttctcaaaaaaaaaaaaatatatatatatatacacatatatatatagctacgtattttattcttttgatgcta

SEQ ID NO: 137842 - DNA, 1106 bp, Homo sapiens
ataatttgaataaaagaatgaaataatgaatatttagaatcaacagacttttcatcttgaaatttgttttgctaattaacagtggttagtatttccattaagaaaccattcttcagagttcataacctggctgataaagataacactcatgatccttagtcttaaagaatctttaggcaagaggaggaaaagagtcagacttggagtttgtgtgccttatttgtataaatgatagtgtcagacaagagtgtatgttgtaaagccagagctaggagtcactaaagccccagtcaggcctctgctcccatatcagctctttccttctcaggaggggtgggcagctgctgaaggatgcggttcctctgggcttgtttgaccccacgggaatcattagctctgcttttgtacatggggatttcactgcttgagaaacctgctgtccacaatgtgcttgagagctgtagggttgttcaggagaaagaaagttaaacagactttgcttattgtcttaatcatccattgttctcactgaaattctctgaagggattttgggtgtctggatttgcagctttctgacctgggttattgttgggggtgcggagctcttgtctagttatcatctgatggctgaagcctccaactgccctggatccaggcccatgagctgggccctcatattaggaatttttcattaatggaatcatttcaaatggtctgacaaaataaccctttttaaaattttgattaacattttttaagaatggttttagatttatagaaaaattgagcagataggccaggcacggtggctcatgcctgtaatcccagtactttgggaggccgaggcgggtggatcacgaggtcaagagatcgagaccatcctggccaacatggtgaaaccctgtctctactaaaaatacaaaaaaaaaaaaaaattagctgggcatggtggcgcatgcctgtagtcccagctactcgggagactgaggcaggagaatcacttgaacccgggaggcggaggttgcagtgagcggagatcgtgccactgcactccagcctggtgacagagtgagattccgtctcaaaataaatacataaataaata

SEQ ID NO: 137843 - DNA, 1173 bp, Homo sapiens
cagatgcacgtgtagaacgtaaagatcctggttcatcatggcgcagcccagaagtttctgttccatgtgccccattctaataggatctgcagtcacttgtgcccattagcaccactccaagaagcccacacaggtattcaaatatgcttgtaatctgatggagcgtgtttcataatgtagtctgcagaccacctgcatcttaatcctaaaatgatgattccggaatcagaccctttaggggtggagcccaagaatattcatttttaaccaatgcctacccaggtgattctgatacacagcacattttgataactcttcatctaagtggtctttcagttgtctcctgtctgacctaacctgtagtatgcctttatgatttctacagttgaagtagaaagaccaaggtatccttcaggctctcgggacattgggacattgtcccaatgaactctattgtagattcacatctagaacaccttcaaatcagtgattgatccctcttaccctcttggcccaattcacaccagctactggtgccttgttcatctaaaaggtcttccctttcacaagtcccacggccacctgctctccagccacagccatatgcattaaccacgtactggcggagaatgctactgctactctaacacataacacattggttctcctccccagactcctcagaatgcatttcttaactcactatacccctccatccaggcctcttcccttcaaggcatcaatcgtttctagcccactattgccctggctagttactgaaaccatcaacactccagagtctgccaatacctgggtcaaccaaaaccaagtatggactacacaaggacatagccagttagccttcagcatacaacatagcacaggggttaaaagcaggaactctgaagtcacactgcctgggtttgaatcccagcactatcactttctatgtcaacttgaacaacttaaaccctcttttcctcaagttcctgactataaaagggagatgataatactacctacctcaaaaaacagtgtgatatgatatgaactaatatgtgtaaagcacgtagaatagtgcctggcacatactgagcaccaaaaagtgtttgctcttaaattgtatatgaattacactaactgaatcattcaggtgtgagacatcagtgagat

SEQ ID NO: 137844 - DNA, 1047 bp, Homo sapiens
cttagaggtggcaggagagagtgaggtgaatgtcttttagagaagcatctcttgtgaagccagagcgaaagaagtcaagaatgagtgtggtaaaggagtgtgggggttgcctgctagcacactgatgaagtgcctgtccagtggcctctgcttctctatgttgtcctcttgccttgtgtcacttgttcacagacctctttgaatcctttgattctgccttctgtcatcagtgtcttaggaagtcatcttgttccatgtaaattcccttacatggaactaaccctatccatgacattattcatttcacccagcacggtgactcctaacctccagaatgtgtctagatcacatcttgcttggttactttgactggctagtcttcacccttccaccagccttttctagtgtcttattctgtttggttctgcatctcagttcccaatatcttccttcatcttactgataatccatttaagacccacatctctaacatgaccacatccttcttcccccaacaattctgtaatttaccctcttgtcccataacatttcagccttctgtccagcaacataggatctatgccagttaggtcccctctgtcctgcttccctgctaagagagggagaaattactctcccatggaatgctattggtttctgggacttccacctgggggcagtaaatggtagagccataaagctctatgctgtttgtcttggcaagctctacaggaagaatgtagaactagacctccagctcttagttaccacccacccagcagttagaatcaaagctactagagctgtataccaagagcttcaccctttttgcctcagagagagtaaatggtagtgaattacactacagttccagttccccaaagggctctgtgcacagtgtaacttgttaaccaagtagccaaacctcctcctctatccacaccaccccagctccagcctttataaacaaataaataactgcatgaaaatggagatctggattcagtatcagcaacattgcctcaacaccaagggaaacccctcctt

SEQ ID NO: 137845 - DNA, 1048 bp, Homo sapiens
ctaattgaagatgtctattagagagctgataatagggcccagaccaggacttctctacatttgatgtgtatatgaaacctctgggattcttgtttaaatgcggattctaattcagtaggtctgagatggaacctaggaatctgcatttctaacaagctcccaggtaatatatgctgccagtctgtggaacatacttgaaacagcaagagactggagctcaggagaatcaccttcactgaagatagagatttgaaagtcaacagcattatagattgtattaaaactaaggaaatcaataaaatcaccttggaagcatatatagaataataaggcggggggggaacaaacaaatactgagacttatgggactccagtgtttaaaacggggtggaaaaagaaaagcctccaaaggaatcctgaaaaggaatggtcaaaaagaaagagaatcagaaaagacatcatagaaaccaagggtgaacctcaggaagaccagtttgaatagcaatgtctgatactgtagcgcatgcatctgcaacagaagtgatattggccccaagggaacaaaaatttattcttggtagaaggaggtgaaaaaaacttatattttatgatggtttacagtcctccaatgtaccacagtacataaacagatgtacagtatatctgcagtattaaaatgttatgggggggtcaattaggaaaaggtatctaaaaaggctctttcagtagaggtgggacatgataatgaaaaaatgtttgacagcctgggcaacatagtgagactccatctctacaaagaattagaaaattagctgggcatggtggtgcatgcctgtagtcctagctactcaggaggctgaggtgggaggatcacttgagcccaggagtttgaggttgcaccactgcactccagcctgggtgacagagcaagatctggtctcagagagagagagagagagagagaagagaaatggttgagaaacagtgctatagagatgacgtaagatttatcagtaaggaggtgatgatgaagatgtcttcaaaggat

SEQ ID NO: 137846 - DNA, 1702 bp, Homo sapiens
tagtgaatttatttaaaagggggaccaaaattttagagtaatagtggaaggggtagggtttgattaggatgctagcttgaataactaaaagctattaaaatatacatattttgtctcatttaataaaattgagtgctagatataacaatgcactaattcttaaaacaaaaaatatataaaagattcatggcttttgttttgtgcctaatttttcaaacaaaattgcatgatatttcaagatggtgtgtttcacttcctgtgagatatttgtagcatgatctttaagagggctgattttgccaaaatattcaaggacttcattagtgttcccaaaggcttttctttaatcacttggtattcaaatcattctgttttgaaccacttttaaaatcattattcatatttatttttctcctcttcaattgtggactgttctaccagatcctcatcagttttgtgtgtgtgtgtgtgtgtgtgtgtgtgtgtgtgcgctgacttcaagatttccagcatctttttataagatttgtaattttactttctgacagatttgcattgaattgctaactgatatacctgacgatccatgagagacaaaatgactgaacagatggatggggttagattctggtatttaaaggagtgggttctttgagctgggactgctataagtggtcagttcattagcaaacacttgagggcagttggtactgcacaaaaggccattagtgaatttatttaaaagggggaccagaattttagagtaatagtggaaggggtagggttacgacagcttttgtatccttagaaaacctcaaagcctgggtactgctggggctaagataataaattctcagtaataagatctgcctatttcagcaaaggtctagtgcagtgtttttcaaaccagggactgcaacttgttgatggacattatatcaatttagtgggctacaatgagctttctttcatatcaaggtgggtttcgtgaaacttgttctggggtgtgtgtgtgtgtgtgtgcatgtatgtatgtgtttgtgtgtgtgtttgtatgtactaggtcacagtgtgaaatgtcaagccactgtagagtagaatgactgtgaacattaaagtaagacctggatgtaaattcaggctccaccacttactagttatgtgtgtaacctcaggattattccaggaacagcatgtgcagatgcttagaggtgtgaaagttggtggggtgggggggacttccaagtttgtcattaaagctggaaccataggttcctatagataaatggccagagataagtttggagaggtataaagagtccttgaatgccaagctaaacagcttggacttgatcctttaagtcagtggttcttaaccttctttggttgtggaccccactgaattttccacgaccaaaaaaggtttagaaccactgacctaaagaatgcatatacatcccctagaaaatctacatacacaaatttctccttgtagtttcagaaagtataaggatttcctgaagcccatgtatgggtcctagattaagaacttcagctttagacagtgagaagtcactgaaagaatttttagccaggaagaagtaacgttgtcagacatgcattttaggaatatgactctagcaatagttggccgttaaaccagagggacagtgactgtccatagagaaatctgtgaggacat

SEQ ID NO: 137847 - DNA, 1034 bp, Homo sapiens
atgtaaactcttatgcttattgtattgacatttacagagagacgtgtgtgtatgtggcactttacaaggcattctgaagaaatccaagtgaaatagaaaaaagattacctaatatagtggaaagcacactgctcaaagtcaggacacctgggctctacacctagtttttctaacttggctaactgacttggactgattaccctccctaggcctcagtttcttcatcaataaaatgaacaaaggatacaactagacagtctctaaattccttttcggctttctagaaattcccctgtcttcgagggacttacagtctagaaacattaacaaaattagaatagagaacaacattagttatggtaccaatggaatatatgtatgagctgaagagacttatcagtagaaagaaattaatcatggaagtcttggcagaagtgaattttagagctagttcttaaaagaagtggcaaacagatttttaaaaaggtggaaaattgacgctaataggtttaaaacaaaaggctgaagaatcaagaagagggctcatgctcctctaatgaaagtagcaacccagaggtagatgtctctcaaagacaaagggcttgtgaaaaggctcttcctaggtgcttcttggagttagaggagaagtcctttggagtgtttgtttgtttatttgtttgtttgtttttgagacagagtctcgccctgtcgttcaggctagagtgcagttgcgcgatctcagcttactgcaacctcctccttcccagttcaagtgattctcctgcctcagcctcctgagtagctggaattacaggcacccgccatcatgcccagctaatttttgtatttttgtagagacagggtttcaccacgttggccaggctggtcttaaactcctgacctcaggtgatctgcctgccttggcctcccaaagtgctgggattacaggggtgagccaccgcgcctggccaccttctagagttttatgttaacatgtcaaactgcagtagtctgtctgagaaggattgctgggc

SEQ ID NO: 137848 - DNA, 1014 bp, Homo sapiens
cacggcactccagcctgggcgacagagcaagactcctctgtctcaaaaaaaaaaaaaaaaaaaaaaagaatgcaaattccttgagagcagagatcacatcataatttacctttgaatcctcagctgtactgtacacttaatatcagataaatgtttgatgaatgaatgactgcagagcttttaactagttactatgggaagacataaattaaagaaacataagatcttacattctagttacagagcacatcaccaaaacacccccaagattttcagaataagtattgaagggatacaaaatggagggtgaacaaagttatatcataacacaaagtcatcctggacgaatcaagtttatataataaagggaatgttcaaaggcttcagtgtcaggctgacctaattttgaattcctacttatctgcttgttaagtatgtgattttgaatgttgtttctctaaactgcatctgtaaaatgggtgtattgcaacctcctttataggactgttgcaaggatgaaatgagataatatggccaatgtgcatgtcacaatcttcaataaatgtttaaagtctaaaaagcaagccagactttaaatatagtaaggatattaggttgtcccagtggtgttagtcagtcagtttaggttgccatgagaattaagatcctgagcactggccagcttgtatcagatcataggggcctccaggaacctccaaatgctgatggtaattctaaaaccgcctcagatagtcttaaactggaccctcacaccaaacctaaaatatttccctaatctatgtttagctgcagaaacaagaggaggtaggaggagaagagctgcagtttccaaacaccactgcttgcaaccttcctaccacatgaatgttcaaggagttacatttgacatcattgcttgatcggaatctaccaagcaatttccactgcaccagccagtctcttgggaaagtactatcagatttgccagagtaaattattgagattgttaactct

SEQ ID NO: 137849 - DNA, 1039 bp, Homo sapiens
cccggagcccaattccagagaggaagggaaagaagagacgatgcctggacaatgtcttatacatagggaacagagagggaatcagaggtggcttagttccctgaagacagccttatgcgcttaatccctgcctttgaaaaatgggccaatacacaacacagacaataatttgaagcgtctgtattcagcaaagataaatacagcagtccagtctataggtgctctacttagcattcttttcatgtgctcctggtctctgtctcactcacctactttctactacatccaactcaactccctgacaccctatccccccatctattcttaaactctttcatatatattttcacttcctaattctagtgtacatatccctgtatatcatggtatctgtgggcatatgtctgtttcttataaagacacatatttgtgtgtgtatgtgtgtgtgtgtgtgtgtgtgtgtataagcatacatgggaatttttctgaatgtaagcagttttgatgtgtctgtatatcaatctgtatctacatttgatggactgagtaagaatgttgcatgtgagagaagggatgtgactgtggactcagattgacacacacagattggtggaagaatagcttcagtcctcttccttcatcccatatgtaggtagccttgcttgacaaatgtttcttctaactctccttcttctgaattgtgcagagactctgttaacttccctttttgcacttagataacttcctacttcaaccccctcctttatcttggatttctaaagtttttccccaatattgggaatggtgagggtggggatgagagactctctgaacaattcttgcagaaccagtgacaatcttatgaatataatgaataagtaagcatatagtagggtgatagaatacagatagtagaaacaaagagaggacagcaaaccttttcagcacttctctcagagcaaatggaaacacacagtaagtagctttctgactacattattttctggtcacttttaaagaaagtttacaacctgttctg

SEQ ID NO: 137850 - DNA, 1093 bp, Homo sapiens
aattgatcataatggggaaaattctaaacaattaataatttttaaataatttacatgatttggggacctagtgaaaaatgcctgcatacaaactcatattcacccttttgtccataaacctatttcttcctggataaacagtctagggcccaactaattggtgttggggaggaggttctgaattatgctaatcaggactttacttagtaagattggtaatttttcctttcccctatgttcttctacccttaaaaaccaaacagaaaacccttggcgcagatgataccatgttggcaaaggatcccgcatctggcatctgtactcttctgtatgacagtgcacccagtggcaggtttggcaccatgacctacctctccaaggcagccgccacctacgtgcaggagttcctgccccacagcatctgtgccatgcaatgagggctttggttcctggcttctgggagccttttgacagctggtccctgcctcggttgattgtgcatggaactaaaatgttattgcctaatcactccaaccctgcccctttctgtcccatccttcccaagaagagagaactttttcgataaactaactactgtagaagaagtgaacacttacctggaggctcaccttgcagaaccagtgacaatcttatgagtataatgaacactcagccaggcctgtcatgattggctttatttctttcatcattcataaaagtttgcatgtgtttttattctctagatctgttaccaatatagttttctaactcctgtttggggagcaagtgttaataataacttattcctaaagcttggtttttcttttttgtgattttattgtgtatatgagtggtgggtactttgggacattatttcaaatgagtaaactctaaattgttaaatatttatgctgctataaattagaattacctattctacgtgccttttcttaggaaaagagagtactggatcatggttttcttccttacttacaggttgcttcacactgagtgataatttaaaattgtttctatgtagaatcattgtctctactgttgccctctctgtgtctgcacacataatgcctctctc

SEQ ID NO: 137851 - DNA, 1031 bp, Homo sapiens
aataaggatatatatgaaagttttttttaaatgtgatggggaagaaattgaaccttattatcctctctctttctctgtaatctctcatactacatagttcgtcccactgattcaaatgtcagtcctgctatttctatccacgagattggtgctgttggagcaaccaaaacagaacgaactgggatcatgcagttaaaaagtgagataaagcaggtaagatactacctgggagattagctgggatattgccatgtttcagaacattcttttggaatcagactttgttgggtcatttattttgtttcacattctgagtttaatttgagccatttatgtttcaggtggaatttcgtagactgtcaatctcagctgagagtcaggtgaaacaactagggatcatttaacatggtttaacttacctttagttctgtataacatgcatgagctcatggcctttttacaaataagataacaagtcatggagtagattgtttgaatcgcctttataacagtcattttgcagatagctttcctttttctggaccaaagtactttgttaattttagaaggaaagtaacttgcatctgataataagaaattgaagtttctcttattaggactgatgtaattttggaattaattttctttataaaacaagacttagacttcaagcaaagagtctttgcttggccagagtttaggtgggcttctcaaccttttcctaggcccatttgtgcacttccttgtaaaatccagctttagcaagagaaccctgctaagtcagtttagccagaaactcctatcctcgatatcttatcatccttgacatctgatcaggctcctcatcttctaccacccccaggtgatgtccaatcaccctggcctgtcttcagcaaaaatcctgttaagatggtttagccagaatcctccctacctctgatgtttccctcttagtaattttccaccacttggctataaattcccacttgattatgttgtattcagaggggagcccaatctctctcccttac

SEQ ID NO: 137852 - DNA, 1045 bp, Homo sapiens
taggcattgtgagacctaggccattatttttgtctatatctactctgtgtgcaggaaataatggtatatctagccatgtatatgcgaacccagcctggcctctttgctgaaatgtttcgacttcgaattggtctgatcatacaagttatggcaacagaactggcccactcccttcgatgctcaggtacttaattcagtaactattttaggtggaattcacttttgatgtaagtttatagagtttggaataaggaaagaaagaaagctaaaacatttttatccatagctcagaagctggatatggcaaccttgttcccctgttggtcactatttatgcaagtcaaggagctgatatgatgacacatttgtgtatcagttcgcagcttcagaatgccatctcctgtgggctcttcactccaaatccctcttgacttatcactcgttgctaacttcatttctctaactctggagagtatttgagtgtgacagacagagttgggttaagatttaggcagtggagcgtctgtacaccaagaatgagtcactacatcagtggatcatggtgtcagtattctgtctagtcaccatcatgactgaataaaggaagatgacattttcattaacatctatctgacaagactctctttgaaattaactataggtgtatttggcaagataaaagttttagttagaagaatagttggagcctgtgaaagctgtagggcaaaatggtataaagtgtgaaggggaacaatggacccctatgacatgactccttattccattagtatttgtttgatttcaacaagaattgcaaaataatacagatagggatggcatagaaaaataaaatcaaagttgtaaaactcaattttagccattctttctgttaaatttcccccaaaagacttttaatcaagctgttaacaagtagctaaatttatcaatttgagtcaaacctaactcaaacacatgagataatttatatttaagtaaccctttgacagaagagagctaacaattgttttatacctaccatatgcca

SEQ ID NO: 137853 - DNA, 1003 bp, Homo sapiens
catgttggagttctttatatataagggaaattatcctatgaattgcaaacattttttcctagttggtaatttgtcatatgactttccttacagtgatttttgaaataattcatttgttaaatctttgtctttaatttcaactatattgaagcccatgaatagggtaaaagaatgcattttgtcaaaagcacagctaaaactaagacttattcttgtgtaggtactggctttcagagctgactgttaatcatagttttataaggattcttagtaaattacattgatttcctagtgagagagacctatcaaaaacaggcatgttcattataacactgaaagaaaagatgattgccagaagctttacttaaaactgatgtagtcctgtcgttaaaattctagaggacctgactggaacactgaattgtataatgaacggagtgctacagtgagagagcttcttaccgagctgtatggcaaagtgggagaaattcgtcactggggcctgatccgatacatttctgggatcttaaggaagaaagtggaagcacttgatgaggtactataaattcttgaatttataccaaatctaaataagcgtgctttttaaaaattggtttctataattgttttttaaaacaaccatagcctctaaccatttgagatgtcttttccacataaaatttgatattcagttcttttagtttgtgaatgacaagtaagaattgtagatttataaaatgttataaaccataacatctttataatgatattaagaattctatatcttaagaatgaatttacactaggttcctacctcctagaaagggaaacatccatacaccattagtgggaatggaacttagtatagctacttatgtaaaacactatggaggttcatcaaaaaactaaaagtagaactaccatgggatccagcagtccaactgctgggtatatatcaaaaagaaaggaaatcagtatatgggagagatatctacaactccca

SEQ ID NO: 137854 - DNA, 1050 bp, Homo sapiens
aaaaaattaaattcccaagaaaaatgtgttctagtcaaaaaaataaaaaagtagtagtcctgtcagtactgacatgaaagcatatttaatacgtgttttgggtaaaacagtttcagaacaatataaacagtgttatcctatgatataaaagaaaaatgtgtgtgtgaataaactattttctcatcgtaagaggtattgattttataactcccttttggaagacgaaaagaaattcaactacatttaacatagatctcaattataggttggattccaatttcagaatgctaaactgtaaaaagaagacaatttaaattcaaggaaatacagtggatgtgtgtgtgtgtctatatgtatatacatacattgtgtatgtgtgtgtatatatatatatgtaaaaatgtttgctgatttgatttgtgctctagaaatatttttaccatttctcaattctgtatcaggatgcaacaatagaatgaaactcagtggacgaccctacagacacatgggagtgcttggaacttcaaaactctatgacattcggaaaactatctttactttcactccacaggtgggtgaaataaactggaatgtgcattgagatgaatggaaataaaagaaaatcattggagaaataaagcatttactggagttgggataagtgtcaaagagttccaccaggccttgcacataacttactcagttaatatttatagagttgaactgaattgaacttccagcacagagtttcactaagtgattgtaactgccaaaagtaaccctgggtattgcagaaactaaggattttacaaatgctagagtacttataaaagtaatccttacttttaaaagttaaaaataaaactgtatgtgtcctttataaacaaaatacaaccttttttattcagctactaaattatgttttctttgtttggaggaagggccctttttacattcatagaaatcttcagtatcctcttctaaacaaaaatgtcggtactgttttagctgttattaaacacgttgttagcctgatgtttattagctaca

SEQ ID NO: 137855 - DNA, 1110 bp, Homo sapiens
agattccattcttgagcagtttgctcatttcatttagtgctatttcacaaagctcatctgtaacttgtacttcatatgtcacctctaggaaaatgattcccaaaccctcatctctagttgcccttctaaacatttctacttgtatgtcctattattacaaaaaacttaacaaatataaaaccaaactgaactttattgcaaaccaatcttatttcttcatacaccctcttgtgatatcattgctatcccaattccgctagttagaagtcgcatcatagagtacttgctaagggaagggagtatgtacatgctctgcttcctgaacaccttctctaaaacaatcagtaatgaaaacccgtattataatacctctgagctaaagatatacatctaacctctgagtgatgacagactttattgtgtttttactaggatcccaatcgtctgtactatgaaccagctgagctgaagctatttgaaaacattgagtgtgaatggccattgttctggacatactttattcttgatggggtcttcagtggcaatgcagaacaggtaataagctggggaaagagttttcagcagaatgtttttgttatatcttcttacagctaatagtataccaaccctgtgtccagttggaagtcttcctaataggggagagacagttgttccctacaggctactagttgagggcactaagagtaaaaagacctggattatttttttcttctttttaaaaaaattttggtttcggccgcgtgtggtggctcacgcctgtaatcccagcactttgggaggccgaggcgggcggatcacgaggtcaggagatcaagaccatcctggctaacagtgaaaccccgtctctactaaaaatacaaaaaattagctgggcgtggtggcaggcgcctgtagtcccagctactcgggaggctgaggcaggagaatggcgtgaacctgggaggcggagcctgcagtgagccaagatcgcgccactgcactccagcctgggcgacagagcgagactccgtctcaaaaaaaaaaaaaatttttggtttcactcctgaccattgagtgcccaactattatcattgacttcttcagtttctc

SEQ ID NO: 137856 - DNA, 1331 bp, Homo sapiens
attttcagttttgtttaggattactctccatattgaaagattaaggtttttctcattggcatgaggaattttctcctttccttcaaaccctgattagataccatagggtcctattgaatataaactcatctccaattttaaaaacacaaaatttcccagaggaaaaaagtgggtcagaagtagaggagctgagccttccctatcctgcttcttagcagctgtgttttctcttgactttattcttaagtagttgctaatggagcaacaggactgtgggtggtataataatgttagaatattccttatctgtgagtaactggttaagaatcaggatagggaagtattgagagcagaattaagacaagggatgattttcagaaattgctggttttctaagttctaactattgaataatgtctagattttcttgtgaatggtcctcttctacataaatcttttgaaactaaagctattagttttacaatgctaaggtatttactaacctacttaaaatagataaagaatgttcttttctattttgtcaaacatattcaaaagtgatatcatgtgtgttgataagatattggggtaaagggagaagaaatacatccttttatataaacttaacttcttttctcttagtctatcctaaattcactactgccccgtgcttcaacatcaaaagaggttgatgctagtctactctcagtggtttccttccctgcctttgcagtagaggatagccagttggtggagctcacaaaacaggaaatcatcaccaagcttcaggtatgtccctatgtacctttgttttctttaaggctgtgactttaaggataaattgtgcctttgggggccttaagtatgacctgtgtctgtgatttcaagaaacctttaagttttctgagttgtctttatagtttcttttaaaagtgttaaagcttctacagccgttcctggtagcaatgcagggtggtacacccactttagaaaacagtttggcagtttcttataaatttaatcatacacctgccttataacccaactatgtcatcctagaaatctaccctacagaaatgaaaacttatgctcacaaaaaaatctgcacacaaatgtttacagcagctttattcataattgccaaaaactggaaaaaaccttcaacagaggaagggataaacaaattacactatattcatgcagtagaatactgctcaacaataaaaagatacaaggtaccaacttgatcagatttaatcatggtgtataatctttttgatgtgctgttggatttgttttgacagtattttgttgaggatttttgcatctat

SEQ ID NO: 137857 - DNA, 1051 bp, Homo sapiens
tcaatttattaattttggatgctttacctgagaaagggaaatgtaagaaacaacttaatttccttttatttttcctaaattgggggagggcaatgtatccgattatacctagtttataaaagtaatgggacctttgccagagcttcctaaactaatgtacttctcaaaataccatatttttgacattttaatttcttcatcttccaacccggttattgagatccttggtactaagggcatccagggtgggaattccctcaaaatactcttcttctccttttttaatagaaataaatatttgatgataaacctttcctttatttcctctaaaacacacagctcagaagctgaatagccttttcttaaaagtatgaactggctacccagatatgtcctcctgttgtaggggaggtttcttcctgaataaatgtatttttaggtttaatttatttaaatagaatgacaactataactctatttctaataatactttaataccaattctggagttatgtctacaaagcaacaatgtctgaatatctcttgtagtttttcattttgagtccagaatgcaagcagaaatgtatcaaagaggcttataggagacatagccattcattcaacaaatgtttattgattcctgacttaacatttgattttcagctcaatcagcagagtttgataggtacttggaataaggtagatattatttgatcaggcctttgaggaataagtagaaatttacaaatcagagaagggaagggaatagcatgaatataacatggaaatttgaaaggtactgcccatcaaggtaaggctggatatcttctatggttagagtataacatgcatctggaaaaatgacaaactgtgaaactagaaggttgggactagctattcgagggcctgtgtaccatgccatatagtttgcagtttaggccatcatcagtagcgagtcattcaaggtaaataatcaaggaagtttcagatgattcacttcagtagcaggaagatagattggataggaaagaaggttaagatggcagactag

SEQ ID NO: 137858 - DNA, 1037 bp, Homo sapiens
tctggaagtggagctcagtagcatcaatatttttaaaaaactacccgggtgattttaatgtatagccagtgtgaagaatgactagttatggcaaaatatgaacatagattaaatccaataaattcatagattaaattcccacctactgcaactttctattactgtgtggattttcccaaaacattgattgttaattatttctacccttccttccaattcttaccttggtttctttctgagaaataatgtcagagaattgaagagaattctggaagaaaagaggacaagggtttaggcaactactgcatcctagattgagagtagaattatgcacatgtatgtttttacaaatgtctttctctaaggtatatagatacagtctcatacccatagaaatataggcacacaaatagggatatctctttgcattcatggtaccatcaaatttcagcttcatctctgggcctcactccagttctttgtgctaagttttgttctttttgtgtggtcattcattttttctcatgactttaactattacctttatgagaatgacttctgagtcttcatctctgacctcacttcaattttaaacctaggttttcatttgtcacctcatcagtttcatctgcatatactgtggctcctcaaactcaatgtgtctgaaaccccacctttccaactaaaaacaaactacaaaacaatggaaactcatcaacaatctctttttctgttattactgtctccattctaccaaccacccaggcaatattacttggagtatttcccatagtatgttctgtggaatactaggccaactaagtttgggactatgttaaagagcatgtgtctttactccataatttctcagagcctttgatgtactaatgtgcatattttgtctaagatgggagtgaattttatagcctttccagaatctcttagactagcactctataaaacagtgcttgaagtgtgctacttaaccttagaatgatttttgacttctccctcttaccttttgatgcatgcacacc

SEQ ID NO: 137859 - DNA, 2076 bp, Homo sapiens
agaggctggtaatcagataatggtggaagggctcggggaacatctggagcgcggtgaagatgccgctgctgggcttggagacgatgggaagtgcggtgaagaagctgccgctgggcttggggaagaaggggaaaacggtgaagatactgctgctgggtccggggaagatgggaaaaaaggtggcgatactgatgaggactcagaggcagaccgtccaaaaggacttatcggttatgttttagatacagactttgttgaaagtctacctgtgaaagttaagtaccgtgtgttagcccttaaaaagcttcaaactagagcggccaatttagaatccaaattcctgagggaatttcatgacattgaaagaaagtttgctgaaatgtaccaacccttactggaaaaaagacgtcagatcatcaatgcaatctatgaacctacagaagaggaatgtgaatataaatcagactctgaggactgtgatgatgaggaaatgtgtcatgaagagatgtatggtaatgaggagggtatggtacatgaatatgtggatgaggacgatggttatgaggactattattatgattatgctgtggaagaggaggaggaggaggaggaggaggacgacattgaggctactggagaagagaataaagaagaggaggatcctaagggaattcctgatttttggctaactgttttaaaaaacgttgatacactcactcctttgattaagaaatatgatgagcctattctgaagctcctgacagatattaaagttaagctttcagatcctggcgagcccctcagtttcacactagaatttcacttcaaacccaatgaatatttcaaaaatgagttgttgacaaagacctatgtgctgaagtcaaagctagcatattatgatccccatccctataggggaactgcgattgagtattccacaggctgtgagatagattggaatgaaggaaagaatgtcactttgaaaaccatcaagaagaaacagaaacatcggatctggggaacaatccgaactgtaactgaagattttcccaaggattcatttttcaattttttctctcctcatggaatcacctcaaatggaagggatggaaatgatgattttttacttggtcacaatttacgtacttacataattccaagatcagtattatttttctcaggtgatgcactggaatctcagcaggagggggtagttagagaagttaatgatgcaatttatgacaaaattatttatgataattggatggctgcaattgaggaagttaaagcttgttgcaaaaaccttgaggcattagtagaagacattgatcgttagagcagagtatacatggccctgaaattaactgccctagatatagttactcaaggtataagaagccttgtgttctgtatttttcttgtagtgttagttaaaacatatgtttcaaaaatataagaaaagttcaaaaactaattaatttgaccttgagttttagtagtagaatgttttcaagaaatgtacactgtggtaaatgatttaaaacactagtatagtgttgtgtagcttaatccttctgaagtctttttgtcatgtagctattaatctgtggctatgaaatgatcagaaatgctaagtgagatcaatatttgtttggaaaaaaaatcttgggaaacaacccaagggttttcgctgttgttgtttttctttttctatttttgtttacttagtcctttagctagtggatttaattttgttgtgcctgcttcattttgcaataacaatgcagtagaatttaaaacttggatgcttaagaggcctgcatatagataagaatttcaggcaaaactacatttattgttaataacagcttgttcataggctcttgtattttatgtaactgtgataaataatgaaacttagttatattgaggttattgtttgtcggtgaagtgttagtcacagtattttcaaaagtttgcacatattgttctgtgtaattgtgtaagccataattacagtgtttaattctcttttcctattacatcattcattgaaagtgatcactttaccatttt

SEQ ID NO: 137860 - DNA, 1042 bp, Homo sapiens
gaggaagatctaccaagcaaatggaaagcaaaaaaaagcaggggtggcaatcctagtctctgataaaacagactttaaaccaacaaagatcaaaagagacaaagaaggccattacacaatggtaaagggatcaattcaacaagaagagctaactaggttcctggcccacgccatcgggtctgagctgcgccaactgctctgagggttcgtggcccaccgctccttcatggttcctgctgccactgtccacgcttagcgctgtagagaagatggtgggtcggaacagtgccatcgccgccggtgcatgcgggaccctttttattgcgtactgcatctactttgaccacaaaagatgaagtgaccccaacttcaagaacaggcttcgagaatgaagaaagaaacagaagcttgccaaggagagagctgggctttccaagttacctgaccttaaagatgctgaagctgttcagaagttcttctttgaagaaatacagcttggtgaagagttactagctcaaggtgaatatgagaagggtgtagaccatctgacaaatgcaattgctgtgtgtggacagccacagcagttactgcaggtcttacagcaaactcttccaccaccagtgttccagatgcttctgactaagatcccaacaattagtcagagaattgtaagtactcacagcttggctgaagatgatgtggaatgagaaacaaatgtcaacataataaaatctcagttaaaaatattttaaaaattcttggtagttgagcagctctgggggaataagggcaaatatgcttgttatgaactacactgaaatctaccaaagttaatgtttactttgtgtagatccatttgtccattttatttatttttcccagtgaaaagtgtaatttgatagagaacttttcattctataaatacactatgggttactaaaaaatcatggattttgtttattcctgaatcatagttaaacagtacatatgacatggctcatgttaaaaatacccagtgctcggttttgaaagataggcaaaa

SEQ ID NO: 137861 - DNA, 1263 bp, Homo sapiens
tttacattccacatatgagtaagatccttgagtacttgtatttctgtgcctggcttatttcacctatataatgtcctgtaggttcatctatgttgttgcaaataacagaaattcctttttttatggctgaccagtatttcactgtgtatatataccatagtttttaatccattcatccaccgatgaacacttagtttgattccctatcttggctatcatgaataatgtggcagcaaagatgagaatgaagatatctctttgacatactggttttatttcctttgaaaatatacctagtagtgggattgctggatcacttggtacttctatttttattttttttgaggaattaccatactgtttcccataatgtctgtacataatgactatgcattattcccaccaacagcgtactagggttctcttttccctaagttttcaccaacatttgttattttgtctttttgatactagctattctaatgggagtgaagtgatagctcattatggttttgatttgcatttccctgatgattagtgatgttgagcattttttcacatacctgttagtcatttgtatgtcttcctttgagaaatgtctattcaggtcctttttctattttaaaattgggttatttgttttctttctgagttgttgagttctttgtgtaatatagatataaactccttatcagatgtatactcggtaaatattttgtgtcattctgcaggctgtttcttcattctgtttattgtttcctttgctatacaagtctttgattttttaaaaaaattgtaaaacaatcttcttaaactcctgaatctaccaccatcggtttagtgagttctttcttatttatttctcaagttatttattgtctctctttggaagtataacttaatctttacaattataactgtacttttggacactaaatgaaacttagaaaagtgactattcaccaccaagcagaacttttctctcttttttacaaatcaaagataagacaacagtttggatgattaaaatgtatttttaaaacttcacatatctaaaaaagtatcattgccagacaggctacagttcgatactagtgttctgatttacattcttgatcttttaatttaaaatttttttctatagaatttctttatgttattggtcatcatatcatttttattatgatgatggaatagcttaaaatacaggactcagctacattacaagtgtgactgttaggtagatgatggcttcatcgttgt

SEQ ID NO: 137862 - DNA, 2168 bp, Homo sapiens
gggggagtgcatgtgtgatgctactggcaactagtgggttgaggcctgggttctactaaacaccatacaatacacaggacagacctccacgataaaaaagttaccccgtgcaaaatgtcaacagtggtcagaaaccctggtttagagagatgtagtgtgatggcaaggaaaagaggacaatgagtttctgaagagagtgtctatcgtggggtgaggagatgggagttgtagaaaggagatggtgcatatgcaaatgataaaccactaacattcatctaacccaggatttcagagctgaaaggtattaagctcatgttttctagcaccctagtaaaagggaacaaatgccaaatagtggaactatcttacccaactaaattaatagcaggagcaagaccagaatctacatcttactgattctcagactgtcctgccttctcctcatattgtctttcttttccatagcatacatctaaccttgctgtgagacctatctggaggtagggaattggccaaataaactctgaaacatcatgtggattttaagattcacggatctcatgaagggatagaaagggaatgaaagtatccaaacttggatagacattctgttgttgctgaaggcattggctcagtcctatatttaacagtaatgcaatagcccaaacccacgtgatgaaatccaagcttccatcatttttgtagaaatacttacatgtaaaattacagaagttctcgtgttgatgtttcacatcattgcacattcctgcttctcctggaatgggaactttctttcctggtggccaagaaaagcctctataccatatggattttctgtggaatctgctttctgaagtagtgtaccactctagactgatgaactaaatgtggcaggctgagtagaaataaaatttctcttttaacttgtttcccttcttccagagagaaactgtcctaactggcacatgtgcatatatttaaggaaatgagctggatttccacctgctgctgaatttatgagctgtggatattgtccagacacgtttatacttcttcaagggataggatttaaattcaattatttcaggtgtgaatgttctcttcttagggatttactcaggtttacaaagagaggttcagtttgaaggtaggaaaacattcccttaacatttagctataccttccataaactcaattgaacttcttttcacgtgcttatcattcatcgatcagaaaaccagaacaagctggggtttgtgtagaaagctattagtagactgaaacagatccaaaggagatcttcaagtaaaaccgtttatatgatcttgaaagtttcctcagtgtctcaatgaggcactcaatcacttttacaaaattccctttctggcctcacctgctcacgcatcttatgcatgagtccctgaccctagttccctaaacatttttttactcattttaaactcccattagttacatgctgctatttctatctggaatgtattcttttcactttgtttgtcaaaatctaacctattcagtaaacaccctggcacccaatagctacttaataagtaattatggagtgaaagagttctaatatagtctcaaggatcaaaatgtctccttcagtttcttattcttcagtacaacccatttagtcattatgattgtttatatctatggttttactttatgaagtcatttctttattgccaaaataatataaatattgccaaacattgagaaaatttgaaagggttctactatagtaaatcggataaatgaggatacattcaaacttttttaactggaaaaggttgagctgcttcaagctaaaagaagcataacttttctgcattgatatctccagtaaacgcttacaaacatcatttgaatttttattttagagaatgtcattgcctttccttgcttattggatgcaatataaatgttcccttggaattcactaggtgggtaataaaagtgactcactccactttggctattggatttttcatgcattatttcttccttgaagctaggataatcttcattatccttagtacatagatcctcctgctctttgatgactcagctgaggtatacagcataaggttttgatttatgtgtacattttgagatgattaccacaatcaggctaattaaca

SEQ ID NO: 137863 - DNA, 1434 bp, Homo sapiens
cattgggccctcctactactgggagggagatgaggaatgcagagtttaagttcttttttgtttatatggtaactgaagctgagagtagggcagggtcttacccaaggcagacactattaggtgatctgtggaactgtgacctaaacccaagcgtggctgactgtagacctctgcaaggcactccacctctctcagcctcagtttccaacacacaacaaatggggcagacaatagagaccattctatagggacgttgggagaattaagtgcactagtagtgtgctcagtaaatagccattattattgtcatctggagagtggctgggacttcacagcgtgtgggcctactgtgcctcttctggttcacatccatgcatggaaaatgcttagcaattggaatgaaggcccagagaaatttaacatgctgcttgttgcctctccattcaagctttacactctgggctctgaacatagcccccattcactcactcactcctatctccctcctcaatccctttggaactttagcaacatcagtgcttgggtttctggaaggagggaagactcaagccctttccgtccaccttcttgatcactgtgatgggcttttgcacttccaggactagatactctggaaaatgagcaacactaggctctgggcctgccctaaagtgtcaccgttgaggcaggacctaggtatgttttggagaaaaattaagattcttttgtgggaacatgagtagtaagggcaagtaccaactggagtggtggaggaccggggctctatacccaccctgtcatcggatctagctgcctggttctggattagggtaaaaagaatgagaaaggcccagggctctgagatgaagaccaaaggacaaagccgtgaagaaacaggcttctttggcatccaaggatggctcaactctgggaaagaggtgtatatgaggaggcaggtagggctcaatgactaatgccgagaacccagacttgaaagggatgtgtaggggagggattttgcagaagagagagagaaaagaaagataggccaatgaagaatgggggaaccgtgcaaactcaacactctagccatggtaggagagtctcaaactaacagtctgagaggatgaaggaggccaattctctctctaaaataaaaagataagtacaagtcctggctgtctgcttggagaaagaaaaccagaagtctagttcacagagcaggcactttaggctagagcctgtgctgggtccttgcttgtgcaaactcccatcaggctaactataatcaaagggagtagataggatcagccttattttacagaggtgaagaatacagaactaaacccagtaatgggatcagttgtaatgtcatttttgtcatttcttattgtcttactttgatctccctgttttctttgttaaaatatttaa

SEQ ID NO: 137864 - DNA, 1037 bp, Homo sapiens
aataataatagaatgttcattcacccacgtattcatccatccattcttcctatcgaatccttccttatatatcactcgattagaggttcaggatgagaggcagctatggaaagtagaaaaagaaatggattgagtcagggctcttagacgctggtcccggttttgcttcttactggccctgtgaccttggtcaggttgctttttctcatttctgcgccttgatttcttcatctctaaaatgaagggtttggagtagatggtttctaaagcttttcagttctgagataatttacctccaagggattttgtatgcccaagtatgaaatatacaggcattaaatatatatggaaattaatactttgggagctgagcataatttctttaaaatttatccagggtggttttttaaaaaattgaaatcttgaggaaaaattgaatatttcagaaaataaaatggggagggacttcataacagctacaaggcaaaaatgttgatgattctccgggatttaaagagtgcttcctcatttttatttgcttggaccataactatttggaagtttgagtactgtgtcatgttcatcctctgaactatgctatcttttactgcattttcaaaataggttgccttttgttgttatgtcatgctgcctctggttttgataatggctcacctagtccctttgactttcaattgagttcatgttacattaaatcatatatatgctacctcccttatattagcttcaatttttaacatgttgagtttttttttttttttttttttttgagacagagtctcactcttttgcccaggctggagtgcagtggcgcaatcttggctcactgcagcctctgcctcccaggttcaagcaattctcctgcctcagcctcctgagtagctgggactacaggcgtgatatgttgagtattttaattgtaatatactttcgtaatctttgcatcaaatatattaacaaatattttgaaattggggaagtgttgggggagggttttagagctgctttttgattag

SEQ ID NO: 137865 - DNA, 1035 bp, Homo sapiens
gccttaaactatataccctatctgaatgaaatatttaatattctctaccagccctgatttttttccattctttgtgcagccttctgttgtatagagcattttgtttcttctcaaagtttaaaatttgagagccctcacctcaaactcagtatattttaagctcaacatcctctccacattgcccgtgcttttcatttgtttcatttctttccttgatgccaccattctgatctcccagggtaacattcaaaacctttgagtcattttgactcttccttctccttgaattgccctgtgtcagtctgccccagaattatatcatcatagtttctgaaatatctcttagatttttcattttctcattcctatttggcaccactctagtttgggttgccatcatctcctgcttgacttattgccacagtctgctgcctctccctactccagtccatcctgtgtgcttgtgccaaactaattttcttaaaacacagtttaatcatgtcactttcctgctgaaaacctgcattggatattaattagctctgagtttctgtgccatcttccttcaatctcagagttcaaggagaccctccatttgtccaatgctcacctgtccatttgtgccttccatacctttctcttccagcctcctcccagatcttgctcaaccaggcctcccatctctccagtattacctctctcagcctgtacccatattcagtctctaatttttaaaaaacaaaataagacaaaagccttcctatgcccatgttccctttagctactatccaatctctctttcttatccttcaaatttctaaaaaagtagctacatttaccttatctgttttctctttacccctctctgatctggattctgctaccaaaaccacagaggagctatccttaattaatatcactgtgaccctcttgttgctaaattactggacatctttcattccctatccttcaggttctctctgctgcatttgacacttatgatgatttcttctttttcagaagcttctactccag

SEQ ID NO: 137866 - DNA, 1058 bp, Homo sapiens
agagagttttcaagtctgggatctgttttctcaaaattggtcgagcacagacgtgaaagccattcataaggattaaactttgagtatctgaatagcaactggtcacaagtagtcaaactctgtagttccaaaggctgtattagttgtggaggggtagtttttattaggaacatttgcatacatacacaaaagtggaaagaatagtataatgaaatcccacatagtacccataatccagctccaacagttatcaactaaagtaggttttaacggaaacatctcagttaaaaatggacacttccagctcaatatgtgtttctctaacttattattttttaatcctacatcatgagttgagttagaatcccactttaatgtttgctttttgttaagctttttaaaaaatatgttagtttggattaataatcaaagatttattttctataaatgtcatataaaaatttttcagggcacatttttaaattaaaaggccaaaagaaaaatgcatgggtttataacttttttttaaaaaaaagggaagatttaagtatgctgggtagaacatattttgttctgtgtttgttttgaaggtttggcttgagcaacaagtttgatactgaatttccctccgttctaacagggaaggtaagtgagaatttgctttgaacttttcagttctaaagcattgttttatggcttactcattgttatgacaaatgctttgaatcattgttaatgaagtcaagtaataggaggcctcagtagttggaagctgtgtttatagtgtttgaaagctgttgccatggctaccagcctctgaccagttattttgttcattgtccattaatgccagccattatttatttgtccgttcagctttttcacttttgcattttttttctcagcataggtagctataattgtttttatttgggtcattaatttccagtgcttttagagttaaagttatttttttaactgtatcactctattaatttttaaagtaccatatggtatgatttgttatacatgaaaataattaaatttttgattagatg

SEQ ID NO: 137867 - DNA, 1348 bp, Homo sapiens
ctggctttcaatttttcattgcttttgcaaattttcttcatctaattctaagagaatacattattattctctggcctcaccactaatttgttctgttgactgttgaccttttctgtctctcctgaggtataatatcaaatcatttcacagaatactaaacaggtgatcatagttcctggctaagttagccttagagaatatgtggccatttaacattttaggacacaaagaaccctttggtgtgagattttggctcactctttagtacgttctaccttcctatcctgatcaattggagtaatttaccaattgaagcggcagcctatacttagatttgttttatatgaattaatcataaatgttttttcaaatgaataaagtagctatggaaatatatcttgaataatagtgtatttttgtagaaagatggcaaattcattattaaaattaaagagaatgtgaattataagaacttcagtaaaaaacttattcttcatgtttcctttgatgctgctgcatgtgttgtaggtgtagttatatccaactttaccattggctttgaaatacaggtccaagaaattctagaaatgaataatcaaaaaaatatgtcagtgtataaaattcccaggcatacaaattatccattttcaaaattggccaattttatatgctcaaggaatcttcagaatatcttttcacaccttctcatttctttacaagccttctgaaactaaaaattccagtggccccaaaggtagtagactgttttaaactagaggagtaagaataataagctgcttttggtatgcactcacacaacctaaattatctggatatgagctgctcataaatatatccattcttttcaagtgattgtttttgtagcacattgtcataatgacttgagtatttaagtgtacattatgtatagtgtacaaaatctatcatgtgttggataaggcataaattataactgtgatatttttcttagcatgtgtttggtgatgggaaaaacactaaaaggaattctgaagatctgatttaaaagtcacatggtggtaacattagctttattcattttctcattaatgagataatttttctccgacaggcactttcatttgtttaggttcctttgcattatcaaaatgcttctcagataactggagagaaaaggcaaacataattaatgtatatctgaggaaaaaaataaaagaaaaaaggtctaaattccagacttaacagctcttacattaaaatattttaaaatgaataactgtgatagctaaagtagaaaaaaaatctaccttttatgaaatcagtcttccaatatgaatgtgattctaaa

SEQ ID NO: 137868 - DNA, 1017 bp, Homo sapiens
agatcagtcctgctgcggtttgcttagagtttcttctgtttacagagtctcttgcatcctgttataaaatattatgaccctttaccccacctttatggtgtggttttcttttttcattccaagaaagccaaaagaaatgaaatgtttctttacaacctactgttcagctagaaagtaagggtcttctgctgtctaaccttcattgctagagacactcaattatatgaaagtaaatgagtaaaatgttaactctgattctacacagttaactaaacatttctttcacgttgtttaaaattgagtttactaattctcacttcttatgtctttagctctgttttatgacttttactgttgctcagatacagatttctttcaaagacaatcctggtctccttttaaagtcaaaatgcagattttagtttattgtttgaaactctagtaaaagcttttcttttcaatatatttgtcttatgacctcaaaaaaaatttgaattctcatttttagtaacttgaatattttagtttttaattcgtctatggtaagaaaatagaaattgagaccattatatgttaaaaagaagaaagtgttggcaggaaagaaggaaaatgaccacatttttaggtaatgtttttgttttcaattccagaagcatataataaaaggcaaattttataacaaattttatatacctcaacatacaatttattttattcacagtgtttgaaataaaaagctattttctcttccctcttttattctctagcttttgtctccctcagtcttctaacactatttcatccctggtagaagtggagctttcttttctaaggctccttataaacaattttttttttcttttggactgactcatttctgcaccttttggttttattttttttccatctgtgtttgtacttactttttaaataaaaatgtaaattccaattataagcatttaaatttgtaaatggacagatttaataattttatgatttgcatgagtttatatcaaa

SEQ ID NO: 137869 - DNA, 1025 bp, Homo sapiens
ggtataaatctaattattccagtcatgtgcatgcctttgaactgactttgtccttgtttacagagaagcacaagcagccacttccaagaatggaggtagtaactagaaatattaaacttgtgtatttaaagacctttcaactttaaaagtttaccgcagttatgaatccattttatactgaatattaacaggctgttttgaatgcaatcactaggcattgtcttttgttagtgtaactaacagtggctaatgttaaaattgttatattgcaaatttgccagggaataagggtttgagagttgccttttttcaaagtaatccaggagtattgccaaggtctaattttaattgcattttctctagtagtatttgggttttttattgttgtgttatgcttctagtcttacccagcttttactcagaatgactagagactatcaattatactgccttgataatgagaatatttggtaagaaaaaggcttgaaagttatccttttccgtcaattttattgcagtcattttattggtggtcatttcagaagattgattttcaacatcaggctaagttctatgaacttgaaattatattgttgtgcttttcaacgtcatcctagagtgcgtgaacatatttatggggaatatatctatttagatatttgtgattccttaaattatttgtaataaatgtttttcttagatttagagataaacagtgaaaagctgcccacaaactgttaaagattgtaccctcttgtaggtggccccagaagaatttaaaaccagcattggccgtgtgaatgcatgtttgaaaaaggctctcccggtcaatgtgaaatggctgctgtgtggttgtctctgctgctgttgcacactgggttgcagcctatggcctgttatttgtctcaacaaaagagtgagtaactgttttattgtataataataataataactaacatttatggaaaacttactatgtgctatgaactcttttcaagtactttacacaatttagttaattcttg

SEQ ID NO: 137870 - DNA, 1065 bp, Homo sapiens
tataggtcagagtgccttgagttccccctaatctctcttgactctggtgcgatttcgcagctacatgatacattaagtgaggcttttcatttacttgttcttctatctaccactgaaccaactgtgatatcatagtcaatttcagccccagtcatgctatgactcaaaatttgaaattacttttatcctttccttttttgctttgatactcattaaattgagagagatggtcagaggaaaggactactttctgactcatgacataaatatgatgttttaggagatagaggttataattcactgtcctgtttgattctgtgtttttgtagctaattataaaaagaaggaaaagcatatgatagaaacaaatgccccatccatacattatgccatttggaaaagaaaatcagtctttgcaatgagagacaaatagttctgccaagaattaagcaaattacgtgtaatctatgtataatttaggcctttcataaaatacgttttgtgctcttgggcaaagacaacatgcataaagtgagtgcatagagtattataacttggtcatagactgccttttccttactgtctttgaaccttttaatttatgtgtcaaccttgagtcatttgagccatatataagaaaatgatgtttatggcatgttaatactaaaagctgataagtttgcttccttttttgttagctttactggctaattgtattgaatgtaggattgtatctgctctgcagaagtacagtgattggtattaagctaactttgatacttttctggtcagcttgagagtcagccatctggtttaaaaaataatttattgggaaataatttacagaacataaagttaactcatattaagagaacaattcattgaatattattgtacttacagagttgtgtaactatcaccataatctaattttagaacatttccatcatcctaagagtaaaccttgtgatcactttttgtcactcccaatttccctccaatcctcccagccctatacaaccactgatctactttctctcttatgtttgcatttttgaacatttt

SEQ ID NO: 137871 - DNA, 1032 bp, Homo sapiens
gggggaggacgtaggtgctggcagtgtctgcagtgggccagtgggtgggtccattagttctcaggtagggcacactggtgttggcaatgtccatgatgggctaggtaggtttcatcttttattttaatgttttgaaaagcttttttaacattatgtactccttacaaaatatacagattctaaatgaagaaactcagtctctgtccccctctttgctacattactgcttctctgatttatatttttctaagtataagtttttccactggctgtttttaacatgttcttttcagtggaaattctgatatatgttggctttctttattcagcctatagaccttgactgaatgctatatgacaggtattgtgccaggagctgtggtaggaaaactttccatgagaaattagattagcttggcattagatgattatttaaagtaatcctaagacagttatgtgaaaatctagattaaattcataaatggactactaaaatctcaacttagtatatagtttaggttttcacagtagtccagtggatggcctcacaacacaaagaaattcatacatatttcattttagaaagcatatataaaaatctgattgattgattgataggtagataatcttattataatagtcatccaaatcttactcctttttagcattttctgccactgatattgcttatttctcatttctaatagaaaaacaaggagatagtaatgggatgttacaagtaggcagaaaaatatagatgcacatagtttacaaagctcttcaggtcatcttgtaacaaagtcttgatcatttttcttagaccagaagatcaattcagaagttaatagaatgggaaaataacagattatatcacaaggtaagaaattttaagcacataagtgccccattcatatatttgcagcattaaattgaaaaataaatacaaaatgggaatttttaggccacaaaggaatggattagagaattaatactcaatttttaatatatattctttacaaggtatttttaagt

SEQ ID NO: 137872 - DNA, 5580 bp, Homo sapiens
ttgtatcctgtacttttcctggattgttttcagtgatttattcaaatgtataggttgtaattagtttaagttaatataaaaattcttaacaagactatactttcttagcttgctttgcactggaagttgactaagaggaaatgtgaaactagcaatatgatggagtatgtaagtatgaggttgtttttaattatttttttattcattctaaatgtaccattttcctgtgtttatcatttgtcaactattccttcttttttctcctcagccagaacttttgtccattgaaatatagaggttttcttctatcttctttagatttgtagccaacctaaaatatcttgaaagctaacaatcatttggatcttagaaaagtttcagttagtatgctaaaatgaaaacattgtacaaccttaatcatttaacataggcacaaaccatagcatgtggtggtggggaaagctgctgttgaacaaatatttctaaatgtaatcttgtcaaaacttgcataaaataggagttgatatctgcattctggattcctattactggcttttttttttttttttggctgacatttaacttttagtgaagaaactgtaggttctaatttttgttttaactgaaagctatacaatcttagtcataagacataaattcacatatagccaatgtgatcaatttagcataattaacattgaaaatattacatttatccaaacttccaatatgtagtacatatttaataataaacattccatgtgtgtttcataagtaaggattattatggtatctctctacactttgaataattttggggaaaatatgcatatgaccacaagtctaaaattcattatagataaaacattcaaaaatatccgagttttttaaaattatgttttcaaaccttttgtaattaatatgttttactcaatccatttgggcacattaatttttcacaacttgtgaacgatagtaatctccaactaatatcagtttctttaattgaaaaatatataaatctaatataaaggcattttttaatctgtatagcatttttttaatctctactttgctaacaaagagataggggtgtgggggaaaaacataatataatttaatggagtttgctcctgttaacctagacaaatagttattgtaaatcagatagtaaaatctgttagctacaataagtagttttgtttgccagcttaatttttaaattgccaatctaataacaacttgtggtttaagttctttacatatttttttcatgtatttcacttactttatatggttcaggattgaaatattgtcctatgaaaaatgattatagactttctgggttatttataagttatattaaatgaaaaatattttgtaaatatattcttgtttttattttgcaggtaatactaatagaattcttaccaaaatatcccatattccgacctgactgaggagttttatccagtcacttctgtgttacctgtcatttcctacccttagtgccttgtagatttggaatgaagatggtctcctttgctgtgttcaacttattctttataatggtagaatattcttctcgctcttttgtgttggtttatgaagaaaatttgcacatcttttttgtctttcaatgaggcttgtgttttgcactctcaattttaaatacacacacatgcgtgtgtgcatatacatatatagatagttgccattaaagataaatcatcagtgttggtgtttaaaaaacaaaaacttgttctgagcatgctgccttataattttcatactcattgtttctaaactcgcatcatttttctaggctacttgatgctctgtaatcccttactggacaaacttaaataagcttttggtagcttttagaaatggttttactctgcttttaaaggacatgcttttaaaggacatgcaattaatggcactggttttgtcctgcactttgctttatcacttatgttagtggataaaatatttaaactcctaaagacttgtaaatattgcctctttgcataatgtaaaatgtggtatgccatggtttacataatgtaacattactcttattgtattgccaacaattttacatagattttaatatgaatgaagtttgcaagcatccctttgaatgtagaaactgctaacatgctgttttatggcaaggccataatgagtatgttaagaatttcaggtgtagggcaaggttgccctttgtaacaagtggactaaaattgaaattattatctcagatattctgtattgcacctgaaaccatgacctttatttttccatttcgtttaataatttccattttgttgtctactccttcccacaaaaaaactatttgacatctgacacatttcacagtctcactatcctgcatttattagccttttcttcctttgaaaatacacacaattatgacttttaaggagtattttgagatttcagacatcttcagaaggtatctagaccctcttgaaagccactaacacctttctgcagttctgatattctagtttgagaaagagagagaactatttgagaagctgtagctaaagagtatatagcagctgattcataattgaaaaaaaattctcaattctgtttttgatgatcctttataaaacattaatgaggaaagacaagtgtttagacaaaagtattttagtttataaattcagcacatatgtaacatttatttggtccatatttctctatttttcttcacaattaaaatgattgctagcaccacacaactagaatttgaaaattcagtataatgaaagctttatatcacattaattcaactgcaaatgtatgcctgtttgtaggcattatttgtaattcatagtgctaaaaataaaagtgtctagggctcagtaatattttgtcatcttactcttactgcttttagtaaaccttttaggcaagattcatctcagtgaagtgaacaatcatttcttcatagaaggtcaagcctttttaagccactcttaaaatttatgcctaatttgaaatccacagtccttgaccagtttaaaaaagagaggaaaaagaagacactattttatatgtgattataattgtttgcacaaacacttttccaccttcctctgtgccccattacctctgtgccactcagtcaccccaaatctctaacctttagtaatgtgtatgcctgcaaatattatgtgtttgcctgctgcaaaattgaaggtgtatttttatagacaaggtagaagcctctgaaaatgtataccaaatgtcttgttttgtagctaaggtcgggaaaaattgtatctgaggtttatgttccagctaatgttatcaaatttatgcttcaaactgtgatattttaataccaaaatcgattttcagcataatacaaaatatctcattttcactgatagaaaattgcttttaagtgttgatccttagaaatcttatttttttctataaccttagaatttgatcatatgatggtcataggaactttttctgccatgtataaatcacacttggttttgctcaaagaacagcatgaagtggtgaattgtttccatgaaacaattattgagaatgggaatacagtatatctggaaatgacacagtataatacaagttacagtagcatttgtcacaaaaaccacttgtcagcatgtgtaaacttaattttaaagcctattctaatcactcgagtttattattttattgttcgctatgctggttgactcatcttagtttcttcaactacccaaaaaaataccaatttttttcctctcttgtatgactactttttcaaactgttttcctttgcagggggctgattagcaattgagtattttgtaatgtttgggcggggttgctttgttttcagtgaaattggttgcagtgaatgctaaaatgacacagcacactggtgattaattcctcccccatggagccttttttctgttatgcttaggatagaacatacttgtaattttccattaggttagtaacatacttttgtgaaagttgtttttagactgaagaaagtaattttgaatttctttgttacataatattcctttatgaaacttgtgatagtttccagagcaaaacatgtatttgccaaagtatataaatctcacaaggctttaagattacaagctaaaattgttttttaaaattaatgttccaatgtttctcatttggcccaagattctggcttcataaatttgtccaactggctatttttaagcttgtcctaaaagccaataacatgtttattcctaataactaatatgggcaagtgttatttacagatttattaactccatcccagatatgtctccactctttgttccctcctaatgctaatttaggaaagagaccactgtagtaaaactttagaagaagatggagaagtgccttgtctttttagaacaaagataacacattacgtgtaaggaagcataataaatgaattggtagatgattagattagaaatcatccttttcaactaggtctaagaatactttactagtgtattatcttttatttattatgtaaagcttctttccttccttttccccaatcatgatatattagtgacaaaatattacagaaccggactatcagtcacttaaaaaaacagtataattctaatgctagtaaacatgtaatttaatttagttctggaaggacagttgtctttgattaaagccccaccaaaacccatttaagtatttaatgtacatactattcatattattatggcctgtaaacactaatatctgagcaatcaaactgttttatctaccatttttgatgaaatttgaataaagtttaaaaacgtgtaagcctttgaacaaatgtatgaaagctttaaaagatcattagcacttttattttgtttacaaataagctgccatttaaaaaaataaaacctcactacttgaacataaagctcccaaacaatattgtattaaaatgtactatattgacctaggaggatatagaaattatattcacctgattaactggagcagtttcacatagtagaaatactttttgctaatttgattataagtgctcaaatttattgaaattagattctcatgcctataaaagtatactttaaaaatattttgcaacaactgtcaaattatttgggttcctttaaatagcaaacaattgggaaattttccataaaaatgaataggttttattaatacctgttcatgtagtatgtggactaaaacaattgatatatatctgtatgtaaaaatgaatgatcttatcttgccccaaatttttcttacctgattctgagccagcctttttgttttgatggcaccctgtgagtatgttccattttctgtgaactttgtcaaattcatactatatgaggaaatgatctaatattgtgggctccaggcaggtcatcttaattgcatgtctgtctcttctgtaaaatgatgaggtggaacctagagctggacaaaaaattagagatcacttaacattctgtgattcaaggaattcttaggacatttttactctatagaatctca

SEQ ID NO: 137873 - DNA, 2156 bp, Homo sapiens
tattctcagatctactgtccttggtggaaactctcacagtgccttgcatgcagtaaaagtttgatttgccgactggctgacgtgttaattatcacacagactccaagaacctgatgcttgctagaccttagttccttggtgatgctaagagtaaatgtagttttcctaggaactgagcactgaggtctgtgtcctttgcctgtgtagaatctgtctatgcagttggtattcaggcaagaattttagctgtaacaacaatggaaatattggaggacccactttggcatttatgtaaagatttcatatcctatccaacatttactttagtgtctaatcaaattccataccctcaaaaagatctgttggaacaaattgataaaattaggtggaaaggaaagtggtatgggactcaaatacaagtcacttctggtttaattattggctctgctgcttaattcctctgtacctcacgtcctcattgtcgaagtggggacaataatctggacctacctcacaggggaattgaggatattttcatatattagtgtgctttgaagttgactgaaagatatactggatatcataattatataatttctaaatagatttctttaaatccatgctatgttttctttttcagtcaggtcctacagaatgactattgcacttggtctattgttttaatagtaaattttgttattaatctcctatgtgttaaacgtgggtaattgtattatgttaatacatacttagggaggaaaagcaggtggatgtaaatcagtgattcccaacttcagcagatgatagcagtggagggtatccttgagctttttgtaatatttcaaaaagtatattagaaattatacatttacccataatattcctgcttcacaagtcaattaagacattgaatttccattcattttgcctatattctctcaaaagctgtgaatggcagtatgtttttgattaataataaaataagaaatcctattatgtgcaacttattaaatacttgggaacatgggaaaagaataatgaagggattcttatggtgaaaatgttgggaaccacttttataaaggaactaagattatttgaccccctccacagattgcttacctagtctctaaataatgaaatgtgtgtgtttgtgtgttttggctatattaggctatataacttcaggttagaatttgccttcagttttttttctgttttagaatatcactggcctaatttatttaggtgtgtacatgttgctcatacatacacacacatataggattacaaatgtggaaaatgttataatgtcatattctagcattggactaaatatcaatttctgactcttaaagtagttctgtgtataaattcaacatgatgaatcaaggcaataatttctcaaatgttcttttatttctttgtttttatctcgactttttattttccattttttctagtacgcaaatagtgtaaaattgttttaatgcctggactttgaaacaagtaacaagtgtttgaaagtatataatctacgagcgaatttgccctccttggactaaccacatacaaatatgaatctggctgcaagaacaggatatccaggtaactagagagtgggcattgataaaaatatctggtggagaagcctaggatttcaactttttgtcagaggattcctgttgggacagctttaccagaaaagaataatagcggatatgttcatccaaactaagaactttcatgcatcttgcattgttacatagcctgtggaatgaattcattttttctcccttgagtccaggaatgacttccctggaaaaactcaatctatatacagctgtgccaaaatgaaggatacctgcctctccgaaactttcactgctgcttctgtcattgttcacttgtcagataaaattttattatctcaggatgcaaatttaaaataaagtgtaaatctatgttaatgaattgaattctgtgttttttttatgcatcttcctttcttcccttccctatatgtccatcattataaggcaattaatttaggcttccttttaaaaattgcattttatatctggcctttttccacatatactagtgttaacgttcaatcctgtaagtattttatgctataaacacatgcctcagag

SEQ ID NO: 137874 - DNA, 1029 bp, Homo sapiens
ggagactggcataaagtttactgttatttggttgaaacatttcattctcgtgtgttatacaaatatagtcaactctcagcattcatggtagttatgctctataaagccactgcaaacattgatttagcaaatactgaaccatttcttctagaggaagtacagggttaagttcttgtgagcctctggtcacaaaacgtttttcaaccagtcaatatataaccttgttttatgtgtgtttccgtttaaagccacgttatttgaatatattgttgtttcattaactttgagattaggggcaaaaccactataattcatgcctgaaccaagcttatctaacacgtgtattttatcctcacggcctatcccattcttgcccttaggacccctagacaacacttcagcactatgcttgccagcaatttaaaatagtaaaaccaccaacaaaagaaacaaaaatgtgaaagacatgataggaaatagacaatacaaaagatatttgtttatagtatgagagatgaaacaaaaagacagagtatcactttgttcaacctcagctggaaatgtgcacttcagatgactcacaatttttaccactctgagcatgtttacaaataactgaaaaagtgatgtaagtattaatttggggattacaactaaattttagaaaggaagtgaattttcaaatacagaaaatgtaaatattagggatcagctatgtaataatcttctcaaatagcttcaatatacctaccttgaagctgagggtaatagcactggagagttgggcatgatgagacttcaatgatgtaatcttttataagatttttaaagaaatgaaataaatgtcaacaataacagaagaaaattgaagattatagtaagcaactgagacaactaaagtattctagaaccaactgttgaatctccccaggttatctggtgctattaaattgcataacctagtatcataagaacgttgtactcaaggtccattttccaaaggttattaaagtacttcttgatgtgggg

SEQ ID NO: 137875 - DNA, 1927 bp, Homo sapiens
tattctatattattcatatagaattcacagataatccaagtgcttttttaatacattgataccaaatctctcctgctctcaaaaaaaaaagcccaaggcaaaaatttttgattagcctgtatccgcaaattcatagtgcatggcatgatgggtactctacatccctcctcctattgcactcactgtgcccagatgaacctaaagtcaccagtaatagtgctaatgtagtaatgggcccaagcttcaaaagaaggaaaattagtattcagtatttaaatgtgggaaagaggaagaatatggaaattatcaattttataatacctatacatattcttacctgcattaatgtgaatagacatcaatgataaacagaataatgccccataaagatgtctacactgtaatctccaaaacttataactatactatatcacatggcaagagggaattaaggttactaatcagctgaccttgagatgggagattctcctggtttgtatgggtgggcccaatgtaatcacagggtccttataaatggaaaaggcagacaggagattcagtgtcagactgatacaatgagggaaagactaccagcagttgatggctttgaagatagaagaagggggccatgagccaagaaatgtgagtagcctctagaagctgaaaaaggcaagaaaacggattcttccctagaatctccagaaatgcagccctgccaacatggtgattttaactcaatgagatgcattttagacttctgacatctagaattgtgttattttcagccctcaagtttgtggtaatttgttacagcagcattaagaaaatgtacaatgaccatgtgcagtgcctcatgcttgtaatcccagcactttgggaggccaaggtgggtggatcgcttgagtccaagagttcgagaccagcctgggaaacatggtgaaaccttgtctctacaaaaacacaaaaattagcctggtgtggttgtgtggacctgtagtcccagctactctggaggctgaggtgggaggatggcttaaacccataaggtggagattacaatgagccaagatcatgccactgcactccagcctggacagtagagccagaacttctctcaaaaaaataaaaaagaaagaaactatacaatgctcctgtgattctagtgctatgtacatatatcctttatagggaattaaggaggttatagacacaaccagaagaggaggcatggaatagactaatgtataatggataggaaagtgtatcttttacaacttctctgtaaaaacaccttcacctactttatgagtttgcctcagctgccataacaaaatatcagaccaagtggcttaaataacaatttattttctcacagttctggaggctagaagtctaagatgaaagtgccagcaagtttgatttctggtgaagtctctcttccttgcttgccaatggccgctttctcactgtgtcttcaaatgtccttcctctgagtatgtgaggagagagaggtttgatgcctcttcaccttcttataaggacaccagtcctactggattagggctccacccttatgacctcatttaaccttaattacctccttaaaggttctatctccaaatacagtcacatttggagtcagacctacaacatatgaattttgagaggacacaattcagtctataacacctagatggaaggcaatttcatataaagatgatatgcagtctatgacagcaaagtagctagtggaaatcacaacccctaattctatttttatgtcattccctaagtccaggtcccatgtggatatagcattgttcagggctatctctttgctgttctttttttttttttagactcacacaagcaatgtggagaaggaacatgaaaacatctttgagatagagcttaatacagatgtcaa

SEQ ID NO: 137876 - DNA, 1333 bp, Homo sapiens
ctctatcgaacatctactttaaaacagcaaacatgagagcctacaattgacatctcactgtttaaaaaaaacaatttcacatatatattcacaaacatactaaagtggtcaatattcaaagtaaagactcagatattcctcactttgcaccatggtttagttaaataatacaagtaccccaacaacacagtttaaatttcagttaccatggtatattgactgtgatattaaataaagtacaaatttcactgctaggttttcagtatgtaaattactatataactaacagatgtgcatcatgatcaattatgaatcacatcacttctttcacagtctttggtgactggtcacttatcagctattcagtacatgtgcagagaacaaaccatgtgtttgtgttgcctctttgtctgccagtgataaacccaagtgacatttaacaaaaacatataatgaaagagggaattggccaataaaaatgaaagctcaagaaagaaactaaagtcacaatgctggaaatgaaattcaaatcaaaggtaaatgaagttatagaggaaacagctgactgtgggaatgttgacactttcactggttggaaaggctatatagatatgaagccaaaggaacttagttaaagcagacattgacataaatgaggaatttggttgtgacaagcaatgcctattttagaccaatggcttgtatcctcattagggactgtcagtataccaaaagaatgggtgttaagtctaggaaaattataatcatcattaagttgacttttagttcccaagatttcctataattactgttttcagtatttagatattactgctaatggtaaaatggcctatgagtagaaaatatgaaatttacatttctctttatccaaatttcctagtggaaccctgcccctaacaatgtttaccacttcttactgtccattttcacagatatgggggacatgattacatgccctcaacccatatgttttctaggtaactctaccacagaataaagcggtactcaaattactctcagcttgcttaatatccactttaggacactgaaaaacaaacacaaagggactaaacaagatgaacagtacgtatcccatttcttttaagtccactatcttgatatcatgaggccccctcactggttttatgtagatgggctactggaatgcataagctagtgccaattcttattttccaaagatgttaaaagattaacataggatgggaggagagtgaggatcaaaaaatctacctatcaggtactatgctcactaccagtgtaatgaaatcatttgtacatcaaagcccatgac

SEQ ID NO: 137877 - DNA, 3796 bp, Homo sapiens
aaaaaaaaaaaaagttcatatactgaataaccatctgggcccataacagcttaagactttctggagaaaaaaaaaaaaaccagtttccagtttaatttccaacaaagcagtaggaactcttgcctatagaatactgtgctgggggctgggcacggcgacttatgcccgtaatcccagcactttgggaggccgaggcgggtggatcatttgaggtcaggagttaagagactagcctggccaaaatggtgaaaccctctctctactaaattaaatacaaaaattagcctgctgtcgtactacacgcctttaatcccagctattcgggaggctgaggcacaattgcttgaacctgggtggcagaggttgcagtgagccgatcacaccaccgcactccagcctggagacagagcgagactctgtctcaaaaaaaaaaaaaatactgtgctggttcatttgcctataaagtcaccaatctaatgtttgggtatttgatcattcagaattctagaaacactgaagatcccttcacctactcagggtctgggcctctttcatgaatgcttaattcccacagccttacagtttatacccttctcctctcccacttttgatcctcaagttttttgcttctcacattttttactgggtttgtgcttctcagtatccttgaccaaagcaactgatgctgtaagaaatgagacttcaaaccatttacccacactgggtgattaaggtagtttaaaaaaagaaatgaggccaggcacggtggctcccgcctgtaatcccagaactttgggaggccgaggcaggtgtttcactttaagtcaggagttcgtgaccagcctggccaacatggcaaaaccccgtctctactaaaaatacaaccattagccaggcatggtggctcatgactgtaatcccagctactggtgaggctgaggcaggagaatcgcttgaacccaggaggcagaggttacagtgagccaagatggcaccactgcactccagcctgggcaacaaagcgagactccatctccaaaaaataaattaatttattaatttaaaaagaaaaagaaaaaagaaatgaagaacttacggtaattagtgtggttagggacagtgagttagaaattgtcacatcaaaatacaaagttttcaaaacagtatattttattttacaatagcaaccaactccccagtttgtttcaattgtgacatctagatggcttaagattactttctggtggtcacccatgctgaacaatatttttcaatcttccaaacagcaaagactcaaaagagattctgcatttcacatcagttcacaagttcaagagtcttccatttatcttagcttttggaataaattatctttgaggtagaaggacaatgacgaagccacttaattccttgtgtctgcataaaagcagatttattcatcacaacttcatttatgtgaataaagcagatgatgataaaatgttctcttattcttgtttaatcagtagtggtagtgatgccagaaactgtgaaaggaaggcttttagttactttcttctttccattttccaataatccattccccatccccagctgaagaaaggggtgttactgagtccagctgataccacacattgaaaggtaaacattaatatttcaaatctgatgtctaactaaaaatgtacagaatgaaaactagaaaatttcaaccccagattatcttcaaccttgctccctccaccaatcatactttgacatttatctatttccttctccacttatggatgtaattggcttgctatagaaactacagttcagatgctttgaatgtatgaactacaatgaacaataaagtcctcttcttttgaagcatattttggcttcagctttaagataatcttatgacaagaagggtcacactgattcacttaataaattccattcttacctaacacaaggtttagttgataagcacttggacaaaaataatacttttcaaaaatgtaaagcaaactagtgaggacaaaggattttgtcctcatctcaacaatgatcagctattggaactgcatgaaactgaacaatttaaacctggagctggtaatgttcttaagaccaattcagaacaaaggcaggttgcccttaaaacaggtttgaccttttccttcactcttcctcctgtcccaccctctgtgagtgatttaaaaacggaaaaggtcaaagcccagccaggcctacatttagagaaattttaaaaaaatttttcctttcaattttggccaattatttccaatttttattttattcttaaaacttaagcatggtaaaatgttaagctgttttcatccactgatattattctactataaaaagcccttcttgagcagatttgatgataaaaaggagaacatttctaaggtataattagagaagctgttgcatgagaaatcatgtctccatctccattttgctatgcgttatctgaggattgtttctgaaagagatctatttaggcagtgtatgtatgtgtcagcatgtaaaaagtaaagaactgaaaatagacaaaccttgtaaatgcacttcaaaaccaattgtggctcaagtgtaggtggttccccaaggctggtaccaatgagactggggtttgggaattagttggtcatcatccctcctgctgcccagcagtggtcagtcatttttcatgagggatggactaggaaaatgaagtgtctattataaggagagttcctgtaacttaaggagcaagctcactacaaaacccagctacctgcttatcgtagtggccagagtggtagaagagatacggagtaggaattaaaccacacaatgttatttagggactaagccatgcccctaacaagaaaacaagccaaaaggaaagtattaggcattctctgggaaggcatgcatttttttcccatgtctctggggccaaaaaccttataccaagtacctattggcacccgaatatatttgtagaatgaatgaatacatgaaaaaaaataaacagtaacctttctcctatattctactttccaagccaattaataagcaagtgtcttttcgtcatgattttttttgttttctgtttaggatttaacaaaatggttgagataacagtcacttctgtttgatgaagagtatcacttcattccatttttgtgtttttgttgcatctccaagtcagaataaatgccttttggagcagatatatttcatttagcatttagtatcatcttcatcaatactcgtatgaacgaaaaaataaaaagccctctcttattcccactctacaacgcatgtcaaaggtgatctgtttagtttttccttagtatcgaacatatcacagctactcaatgaagtttcttctcaactaaagaaacacagtctcttagagaatttgttcctgtgtttccaccataagataaatgagataaagtgcactttggtttacgtctttcaagcacttaagaacagcactttattcagttttaataaatttttactaaattggtaaatgcaaaagaatcttttttttattgctcatatgtcttcctgtctctaagccagaccaatgagcaaatacctttaaaactagttgttacatcttgaaccatttaactgtaataaaagcagaatgtttagttaatgaattaaagaacaaaccctgagcccttttatcagtctcctggctttaaactaagccaatgaggaagtgatttgggggattcctgaaactaggaaaaatgtctctttattttgaaagaaacttgca

SEQ ID NO: 137878 - DNA, 1811 bp, Homo sapiens
tgactgaccactgctgggcagcaggagggatgatgaccaactaattcccaaaccccagtctcattggtaccagccttggggaaccacctacacttgagccacaattggttttgaagtgcatttacaaggtttgtctattttcagttctttactttttacatgctgacacatacatacactgcctaaatagatctctttcagaaacaatcctcagataacgcatagcaaaatggagatggagacatgatttctcatgcaacagcttctctaattataccttagaaatgttctcctttttatcatcaaatctgctcaagaagggctttttatagtagaataatatcagtggatgaaaacagcttaacattttaccatgcttaagttttaagaataaaataaaaattggaaataattggccaaaattgaaaggaaaaatttttttaaaatttctctaaatgtaggcctggctgggctttgaccttttccgtttttaaatcactcacagagggtgggacaggaggaagagtgaaggaaaaggtcaaacctgttttaagggcaacctgcctttgttctgaattggtcttaagaacattaccagctccaggtttaaattgttcagtttcatgcagttccaatagctgatcattgttgagatgaggacaaaatcctttgtcctcactagtttgctttacatttttgaaaagtattatttttgtccaagtgcttatcaactaaaccttgtgttaggtaagaatggaatttattaagtgaatcagtgtgacccttcttgtcataagattatcttaaagctgaagccaaaatatgcttcaaaagaagaggactttattgttcattgtagttcatacattcaaagcatctgaactgtagtttctatagcaagccaattacatccataagtggagaaggaaatagataaatgtcaaagtatgattggtggagggagcaaggttgaagataatctggggttgaaattttctagttttcattctgtacatttttagttagacatcagatttgaaatattaatgtttacctttcaatgtgtggtatcagctggactcagtaacacccctttcttcagctggggatggggaatggattattggaaaatggaaagaagaaagtaactaaaagccttcctttcacagtttctggcatcactaccactactgattaaacaagaataagagaacattttatcatcatctgctttattcacataaatgaagttgtgatgaataaatctgcttttatgcagacacaaggaattaagtggcttcgtcattgtccttctacctcaaagataatttattccaaaagctaagataaatggaagactcttgaacttgtgaactgatgtgaaatgcagaatctcttttgagtctttgctgtttggaagattgaaaaatattgttcagcatgggtgaccaccagaaagtaatcttaagccatctagatgtcacaattgaaacaaactggggagttggttgctattgtaaaataaaatatactgttttgaaaactttgtattttgatgtgacaatttctaactcactgtccctaaccacactaattaccgtaagttcttcatttcttttttctttttctttttaaattaataaattaatttattttttggagatggagtctcgctttgttgcccaggctggagtgcagtggtgccatcttggctcactgtaacctctgcctcctgggttcaagcgattctcctgcctcagcctcaccagtagctgggattacagtcatgagccaccatgcctggctaatgg

SEQ ID NO: 137879 - DNA, 6011 bp, Homo sapiens
ttttttttttaatctcaaaggcaattgagtgggtcttctgggccagacctatttaatttacgaaacatagtaccttgcagagaataggcattgaaatattatttaaacaatcaaaccaaagatgttcttctatcttcagctgtcagtgatctaatgccctcatctctcttatcctcaggacccagaatggtatattccacataaaagatgctttgtttatcaaatgaatcaaaaagcacgcctgaggcatttatttttactcctttacttctgtaggccaggtcaaggtgggtctaattcacttttatcatcagcacttaagaaactggatggaagaccacaacaccttgttttttgcaaaaattttccatctcctcaatcaggccaggaagcatgtatcttctggacaggactttatctctctactcagcttagtacactgccttatattagtccatttgtcccatgttttcatcactgaataaacttgttaaatgacttttggtctggatctcacacctatattacttcatttccttctgtgagcactctataatgataacatcatttttatatcctagggcatgtagttccgagccccacagaaagtaatcaccattcagtaagccaatagttcattcctatctgtatagaactgtaggctttgtaaatctacacatagatctctgttgtaggttcaataatgataataaatgtttgtgcccccagttgttatctctaaggataagagtaatcaatgatcattcagcagatatagcttatatatgggtggcagtttacaaattataaattgattttacacatattttcttctgctacccaagacacaataaagatggtttatctttgcatccccaatgcctagcaatgagattggcacacaatagataactactatagtggcattcttcagacaaccaatcccttgcgtatgcgtattcaaaagataatcattgttattcaaattttcctactttatttgcacaatataataactatcatacaattttataaacctagtacccagcaccaagtgagaaaatcaacagttacatttatatggtgccttagagttcacaaaatgctaacataggtattgccttatttttggctgtggctaaatgaaatatgataaattttcagtgcctttaacagtgagttcacatagtaggcaatcaaaattgatctatttaacaggtatttaaacccttggtttgtataactacttatagaacccttctcactgtggtttaactatacaatgagaattttgtagagacaatacctagcttacagaaagttttattcatacagaaagcatcaaatttttcatttacaagtgctttataatttagaaagcacattcgcaagctgaattaagtgactttcggtctggatctcacatctattacttcatttcctcatactagctctttcctggttacctggaaaaatgtatcagtaataatttaacttaacctcaccagtaaagtcttgattgtttaaaattaagcaatatatcattccttacatctgaatagtatagaggataaactttcctcttattacataggagaattaatcttgtattttacagtacccaaaatagctggtatgtaagaggcacttaatattcattcatccattcattcattcataaatatgtagcccattgacatttgtatcatgctttagtttacaaagcactttaatatgcacctttctgaaattttttgttctatgagaatacttttccccctttggtagctctagcacccagcatggtatctggcacattataggtgaccacaacaagcttagtcccttatgttttcagtatattttaaagtttaaaagcagtttccatgtgttttcgtttctgatacctggaatactgcatttttactcaaaattaccagagcagcaaacacaaattggcctcaaatatacatataatttattcatttatcaaacaattccttgtgtctgcatagtactatatccttttgaaagagcacttttttatgcttgctcctttctttgtatccacaacgcttatcacagtagaatacaagtgctttacagtttacaaagcacattcactattttttttcaggtcacctagatatcaataatcattgcatttttagtgcctagcacagggacaggcacagaaaaggaaactagtagtattcagaaattttctctgaataacaaataatacatcagggggtggtaagctatgaacagcaggccaaatccaattggctcaaaaactaagaatgattttgaccttataaaaacgttgtttaaaaaacaaatatgtaacagaaaccatatggcccacagtctaaagtatttatgatttgaccccttacagaaaaactgtggacccctgatttacataatgcttcacaatttacactgcactttcaaatgttaactgcatgattgccaatacactaattggtttttctcttatgttttacagtgctttcatacacattatcagtcatttaaatcaacttcccacataaacaggaagaaaaaaatcaaggaaagtattaaacatgctcaacagtcccaggttctctcatctttaagcctagagatgggtattaaacccaggagtagcgttggcacagtccaccaaattatttggccactactatgagcagggagttcaggctgtccccttgggacctcgctttgtcccaggcacagtcaccctttccataaccatcactagaaatcccaaaccccagaatcctgctcacctaagctcaaagaaggaagctgttgctggcaggtgcttctcagaagtctggcacatctgtgtatttcttgtctaattcttctcattggcctggagcatctcttcacatttttctctagagagcctggcacttttttttccccaacaacctgaccattttatcttctcagtctagggcttctggggtcaaaagaaaggactgaaatacagtatcacctatatgaatgtctgctcctgagggaagttaacaaaagccagattagatactgactggattttggtgtctctctcaagtggagaagatgtgaatagaaacagaagtttacaaaacactatagcctaacaaataggtaaaagctgtgatttaaagctggctcaagactggcccaggcataatactgtcaatctaaaggtaaccggcaacatcaaaaagtacatctcaaaagaatcaggcttaaagataaacaggagaactggaaatatctaagagtaagaagtgtaaacaatagaaaagaggtagggtttagggttctcatcttgggatttccccaggtcttcaagcttctatccttcctgggttctgggtcatgggcctccagattccggccgttagtcttgagatacctttttcgcttgggtcctctatccatctaggtaggctttgtgacaggggccttccatccttgggttgtaggtcttccagctacaaccctgggctaatcttaggtcgttggccttgtgtcacaagtctcagttcttaggccttccatgtgtcctgtcccaggtcttaagacttctaactcaagccttgagacttccatccaactcaggccttcggtccaattcaggccaccctctgttttcttggctcttgaggcttttgttggtttcaggcctgaggcttctatctatcttggaacatgggctttccatcttagtcctcgggtctcaagtctcaaaccatctgtcttatactttgggccttctatccatatgagccttccaccttctgccctacttgagttctgggttttactgcagtctagggccttgttttggtcttggatcatctcacatggcagcctggcataaggaaccgctccacaatgcttgctctgatagccgacgttctgcacctatcaggcaggggttaggaagcccctctgccacacatgacacacacacacgtacacttgcccacatatgcaaagaaatatttaaggagagattacatgaaatcaaagagagggagatagattcatgaagaggctgaaatactcaaaggtgagtagaaagggaagaagcagagaacaaatacaagccaacagagattaatactgaaatagaaaatcacaaacagcaagagatgctgaggcacgcaggggaggagagagagaatagcccaagagaggcagaaaggaaatgcagaaatgagaaatgtgagataaaaagtagaaacagcagaaaggaggccagactcagaaaaaaggtgaaatttaaaacgaacgagaaggggaaggggtaacaaataatcacagttcacaaagagaaaagagaggtaggcagagaaaggagaggtagacagaacaagaaaaggacaaaaagcacacagcatgtgacccaaaaaggagacatgaaataaagcgtgaaagaagagccacatctaggagagcaaagagaaatagcaacaaaatgaaaaatgagagatatgtctaagacaagacacagaccactcttgtgaacaaaaagagaaaatgaggcaaaggcacacacgaaagaaattagcaagagaaacatggaaatgggtaagacacactttagatagagaacaaagagcaaagacaagaaagaaagagacaaagaaatacacacttgagtgcaagagataagcaaaggcagacattcagaggaagtaagtagtagaagaggcaagatacagtgaggggcacaagaggcatgaaaagcatcacagaaagataaaaaaaatcaaaaagtgtcattagtaattataataaactattgttactacgaatactacttatagtactacaataataacaaccaccaataccaacacagatgctcttctatttataaacttttaccttagggatttcttacatagaaccaaagcatgccaactctgcctgctacctgatagtgctagtggtcacttatattgtgggaaatgaacttatgagtcttcttgggttaccttttacttgacatgtgccaggcactgcaataggtgagcactttacatacatgatttcatttaaccctcacaaacagagaagtctagagactttaagttgtcaaaggtcatatacctaatgagtagcagaggatttaaaacacacaatgtatgcctcttaacatcctgttacaactatttactaggatttctggaagagccaaatgggatgtcacagatgactaagtattttcataaaaggctctttgataggacttgctcaatcccctcctttagcatcacctttccccaactctttagaaaactgacttcattctcacacttttataatggctacttcagagtttagttttctttttacactaatcttaactgacgacagagtctctcacaaacggagatgagaaagggttaccctttcagcagaaagcagaaatggtgttttaagcttctcaacgtttaaggctctaagaatgacagagggcctatacagtgaagacatagaacacacaagcaaaggctaaattcttctgtgatacaactggtaagaagaccataatgtctttgagttgcttcagtgaacccagtcagtaatatggaagactggtcatctttccatctcacatttagccccacttcacattagaccaacacaccccatccaacaccagctcccaaaaaacagctgttataacagttctgaagtgatcctcacaggactgcaacatcaacaacttacttcattcagctatcctcaagtgctagagtgccaggcatgttgatcttcaggtgggaaggctgacttccttcagtgtgttcaaatttcttggacctgctgaagactcagctctctgcactgcttgtaggaagtataatgatttggcagataggaacaatgaagagctataaaaaaacatgagataaaccatgtaaatgccataaatattgagtactgtgctagagttacataagattcaaattaataagcaatagaaaatg

SEQ ID NO: 137880 - DNA, 4835 bp, Homo sapiens
ttttatgaaaatacttagtcatctgtgacatcccatttggctcttccagaaatcctagtaaatagttgtaacaggatgttaagaggcatacattgtgtgttttaaatcctctgctactcattaggtatatgacctttgacaacttaaagtctctagacttctctgtttgtgagggttaaatgaaatcatgtatgtaaagtgctcacctattgcagtgcctggcacatgtcaagtaaaaggtaacccaagaagactcataagttcatttcccacaatataagtgaccactagcactatcaggtagcaggcagagttggcatgctttggttctatgtaagaaatccctaaggtaaaagtttataaatagaagagcatctgtgttggtattggtggttgttattattgtagtactataagtagtattcgtagtaacaatagtttattataattactaatgacactttttgattttttttatctttctgtgatgcttttcatgcctcttgtgcccctcactgtatcttgcctcttctactacttacttcctctgaatgtctgcctttgcttatctcttgcactcaagtgtgtatttctttgtctctttctttcttgtctttgctctttgttctctatctaaagtgtgtcttacccatttccatgtttctcttgctaatttctttcgtgtgtgcctttgcctcattttctctttttgttcacaagagtggtctgtgtcttgtcttagacatatctctcatttttcattttgttgctatttctctttgctctcctagatgtggctcttctttcacgctttatttcatgtctcctttttgggtcacatgctgtgtgctttttgtccttttcttgttctgtctacctctcctttctctgcctacctctcttttctctttgtgaactgtgattatttgttaccccttccccttctcgttcgttttaaatttcaccttttttctgagtctggcctcctttctgctgtttctactttttatctcacatttctcatttctgcatttcctttctgcctctcttgggctattctctctctcctcccctgcgtgcctcagcatctcttgctgtttgtgattttctatttcagtattaatctctgttggcttgtatttgttctctgcttcttccctttctactcacctttgagtatttcagcctcttcatgaatctatctccctctctttgatttcatgtaatctctccttaaatatttctttgcatatgtgggcaagtgtacgtgtgtgtgtgtcatgtgtggcagaggggcttcctaacccctgcctgataggtgcagaacgtcggctatcagagcaagcattgtggagcggttccttatgccaggctgccatgtgagatgatccaagaccaaaacaaggccctagactgcagtaaaacccagaactcaagtagggcagaaggtggaaggctcatatggatagaaggcccaaagtataagacagatggtttgagacttgagacccgaggactaagatggaaagcccatgttccaagatagatagaagcctcaggcctgaaaccaacaaaagcctcaagagccaagaaaacagagggtggcctgaattggaccgaaggcctgagttggatggaagtctcaaggcttgagttagaagtcttaagacctgggacaggacacatggaaggcctaagaactgagacttgtgacacaaggccaacgacctaagattagcccagggttgtagctggaagacctacaacccaaggatggaaggcccctgtcacaaagcctacctagatggatagaggacccaagcgaaaaaggtatctcaagactaacggccggaatctggaggcccatgacccagaacccaggaaggatagaagcttgaagacctggggaaatcccaagatgagaaccctaaaccctacctcttttctattgtttacacttcttactcttagatatttccagttctcctgtttatctttaagcctgattcttttgagatgtactttttgatgttgccggttacctttagattgacagtattatgcctgggccagtcttgagccagctttaaatcacagcttttacctatttgttaggctatagtgttttgtaaacttctgtttctattcacatcttctccacttgagagagacaccaaaatccagtcagtatctaatctggcttttgttaacttccctcaggagcagacattcatataggtgatactgtatttcagtcctttcttttgaccccagaagccctagactgagaagataaaatggtcaggttgttggggaaaaaaaagtgccaggctctctagagaaaaatgtgaagagatgctccaggccaatgagaagaattagacaagaaatacacagatgtgccagacttctgagaagcacctgccagcaacagcttccttctttgagcttaggtgagcaggattctggggtttgggatttctagtgatggttatggaaagggtgactgtgcctgggacaaagcgaggtcccaaggggacagcctgaactccctgctcatagtagtggccaaataatttggtggactgtgccaacgctactcctgggtttaatacccatctctaggcttaaagatgagagaacctgggactgttgagcatgtttaatactttccttgatttttttcttcctgtttatgtgggaagttgatttaaatgactgataatgtgtatgaaagcactgtaaaacataagagaaaaaccaattagtgtattggcaatcatgcagttaacatttgaaagtgcagtgtaaattgtgaagcattatgtaaatcaggggtccacagtttttctgtaaggggtcaaatcataaatactttagactgtgggccatatggtttctgttacatatttgttttttaaacaacgtttttataaggtcaaaatcattcttagtttttgagccaattggatttggcctgctgttcatagcttaccaccccctgatgtattatttgttattcagagaaaatttctgaatactactagtttccttttctgtgcctgtccctgtgctaggcactaaaaatgcaatgattattgatatctaggtgacctgaaaaaaaatagtgaatgtgctttgtaaactgtaaagcacttgtattctactgtgataagcgttgtggatacaaagaaaggagcaagcataaaaaagtgctctttcaaaaggatatagtactatgcagacacaaggaattgtttgataaatgaataaattatatgtatatttgaggccaatttgtgtttgctgctctggtaattttgagtaaaaatgcagtattccaggtatcagaaacgaaaacacatggaaactgcttttaaactttaaaatatactgaaaacataagggactaagcttgttgtggtcacctataatgtgccagataccatgctgggtgctagagctaccaaagggggaaaagtattctcatagaacaaaaaatttcagaaaggtgcatattaaagtgctttgtaaactaaagcatgatacaaatgtcaatgggctacatatttatgaatgaatgaatggatgaatgaatattaagtgcctcttacataccagctattttgggtactgtaaaatacaagattaattctcctatgtaataagaggaaagtttatcctctatactattcagatgtaaggaatgatatattgcttaattttaaacaatcaagactttactggtgaggttaagttaaattattactgatacatttttccaggtaaccaggaaagagctagtatgaggaaatgaagtaatagatgtgagatccagaccgaaagtcacttaattcagcttgcgaatgtgctttctaaattataaagcacttgtaaatgaaaaatttgatgctttctgtatgaataaaactttctgtaagctaggtattgtctctacaaaattctcattgtatagttaaaccacagtgagaagggttctataagtagttatacaaaccaagggtttaaatacctgttaaatagatcaattttgattgcctactatgtgaactcactgttaaaggcactgaaaatttatcatatttcatttagccacagccaaaaataaggcaatacctatgttagcattttgtgaactctaaggcaccatataaatgtaactgttgattttctcacttggtgctgggtactaggtttataaaattgtatgatagttattatattgtgcaaataaagtaggaaaatttgaataacaatgattatcttttgaatacgcatacgcaagggattggttgtctgaagaatgccactatagtagttatctattgtgtgccaatctcattgctaggcattggggatgcaaagataaaccatctttattgtgtcttgggtagcagaagaaaatatgtgtaaaatcaatttataatttgtaaactgccacccatatataagctatatctgctgaatgatcattgattactcttatccttagagataacaactgggggcacaaacatttattatcattattgaacctacaacagagatctatgtgtagatttacaaagcctacagttctatacagataggaatgaactattggcttactgaatggtgattactttctgtggggctcggaactacatgccctaggatataaaaatgatgttatcattatagagtgctcacagaaggaaatgaagtaatataggtgtgagatccagaccaaaagtcatttaacaagtttattcagtgatgaaaacatgggacaaatggactaatataaggcagtgtactaagctgagtagagagat

SEQ ID NO: 137881 - DNA, 1880 bp, Homo sapiens
tgttgtattatacaccatggcatcccaagccatcctgaagtatgtaaatgattggcaaagttcttctgtaaggctttaagagagactttggggaccacatggaacagaatgatttgcccatgtgatcaatgtcactgatgtgacagttgtccatgttctcctaaaagaacaacttagctgtaagcctctgccacgtgctatagtcccactccaaacacccgaacacatgcaacccgctaccctctttacatcatcactttaaccagttaatctcacacccagttgcttcccaggttagttaggaagctgtttttaccaaatcatatgcagaataatgatgaatacgacctcagtgaaacactaagtgcaatgtatactggaaaacaaaatcaaaattaagactacttattatgcttttagggacagcttacgcaccttgacgtgtggtggttgtttttgagactttatcttcctatctgggaccaggaaagtatcttgacagaacctcctgacctagggttgttgcccagtggtagtgagcttttcccctggaggatcctcatgccccatctccacctagggatcgtcaaagggaatggatcactaacactgtaaaacaacaagcctattcttctgaggaagatctgaaaagagataaaagaaaaagtattgaaatgcagtacactgggaaagtctgttctaatgggcaactagtggttgagttcaaccatatttttacccttttcttcatgtggattgaagagtggacatttacagttgtgcggagctgttatattctggctaccaacttagcaaaaaaaaaaaaaattatcctattcattccagctctattctgtatgctttccctcatttccaagagaaatttagaactgagtaattgccaatattcccatgctgcattttattctccagtctttattactgagcgatcctctacaatgtgggttgttaatacccttgtgttctcagcacaaaatatagtaggggggtcaagaaatcaagaggttgaaactaatggaaggagaaactaatgctttctcaaccaagagagccatgaagccacacagaaaaggtcggatgtggtctaaccctatgagttatgtaagaattctcctccacaatgcctctggcttcctttataaagagctattttaagaactgagaaatccacctctatcaaagtgcctgtcagctagttctgtagcatccccctcttttaatttgtactttaagtagtgccatgccataatattgccaagataaagagaattgtttcctactcaatccacatggtaacatttcttcaacaacctgtataatagggcgccaccaaagttctaggatattcggagaaaccaagaatggtcacaagcacatagaactccagttataacaacagctggccaggcgtggtggctcacgcctgtaatcccagcagtttgggaggtcgaggcgggtgaatcacctgaggtcaggagtttgagaccagcctgaccaacatggagaaaccccgtctctactaaaaatacaaaattagcctggcgtggtcgcgcatgcctgtaatctcagctactcgagaggctgaggcaggagaataacttgaacccaggagacagaggttgcagtgagctgagattgcgccattgcactccagcctgggcaacaagagcgaaactgcgaaaaaaaaaaaatacacgccacaaaaacagttaagcaaatctatgcagaaggaaaaacaaggtacagaaaaccagggattcagtaaattccttatacaggcccccggggctctcctattccactttttaacaatttcaattgtttttcaagctaagaaattttgatttcttaaaacaagg

SEQ ID NO: 137882 - DNA, 1090 bp, Homo sapiens
gcccttacagacctcactggagcccagctctgagggataaatgaaacaggccgaactcattatgtaaagttaaaatgtatgtgtacatgcaaaagaaaaagtataggaattgatgaaaactggctcacgttctgcttttctttctttttaagagactgggtcccgctctgccacctaggctggagtgcagtggctaatgatggctcactgcagccttgaactcctgggctcaagcaatcctgctgcctcagcctccagagtaggtaggactacaggcacgtaccaccatgcccaactaattttattttattgtagagacatgggtcttcaactcctggcctcaagtgatccccccacctcaacctcccaaagccctggaattacaagcaggagccaccatgcccagctgtgttctgctttaaaaaggagagttgtgggaagttcaatccaaagacagaagcactacaacaataaattccccaaactacctttttctccagatagctggcaacccatccaagtagattagctggagcttggccagattctcaaagggaaagatatgattaatttggagcctcttatagctgtttgcagtcctcaggtctcacatgctcagaatgtccttaagaagaaagacagggttcagtaggctaccaaagcaccggtaggataccaaaagagttacaaaaaccccaatgaaaaaaacctaggaagtataaactgaagcattagacataggtatctcctgtctctactttctagcctgcttggtctccctaaagtcctctaatgacaagccctggcagtacacgggaagattagacaagtgaagaaaaagaactacatgaaaatatgggtcaaaccaataccgaccttaagggctgacactaaatttgtggctaatggtcatcctgttgctgaaaatacttcaagattcaaggtggtgtggcaactgctactactgcttagaggtgcaattgtcttgactgtttttaataattggctatctacctttactatagcataggagctcactaaaggggatctaagccaaatttgcagtcttgaaagcactttgcatggtact

SEQ ID NO: 137883 - DNA, 2783 bp, Homo sapiens
aaagaggatatgagaaaatggtcagaaaacttcctccaatcctacatgttaaggttttataaagggaaaagtcagaaaagaaatgacaataatcatttaaagaaatgccaaaaaagtttccttcattagacttttgaaaattttccaaatcacaaaatgtcattttcagggatttaggtatttgatataagcccctatcttatttcactagcagtctcgagatggtcagattgatggtgatctgaaccaaactcagagccaggactaaagtctaagcatttctgcccaaaaccataatgatttccttctgcatcctccataagaaagcaaattccttgatataaatcctgtctttggttttgctatttattccagcacctggtacaataatatttgttgaactaacacaagaattatctctattttgaagatgcccacatttccagagcatccctttttacaattgctagagatttttcttaagggtggaaattatttcaagcaatgaatttaaatacagcttcaagattcacctttggatgctatctagtataatcaatccacctaaaatcaagccatccttcctcttgacttaaggtacagaatcacctccaaattcattcatttaaaacaaattccaataataattataattgtatgttgacaatgaatgacaatttaattaccaatagaagatttcataagcatagaccagggtttctcaaattggggtgataaccctggggatttgtgaatatattctaatggatccccaagttctacataagttatataaaacacatctttgacaaagacaacgtgaaattggaaaacatatttacatttcaaatatctttgttaagtcagtgttcctcaaaacacatttttttaggatctcagaaaattttgttcctttagaaggtgtttcatcatgaagcattacttgggtttgagaaacaatggcacagaccatgtttccaagaaggttcaagaccatgatgtatataaccctcagtcagccagacaatgttgttaagcatatggagtggggctgggaggcatggaaacaagccctgaggaaatatggatatgaattaaaacgggctataagtgaagccagttcacttatatggttcttgttgctcctgctgtgatgcatgaatgtgcaccagaaaaaaagtttcgaatgttatgttaaacaatattttgtcagctggaaaacattaaggaggctaagcttcttttagctttacgaaaggtgggaggaaagaaggtatataaactacagcataaagtaggcaaggaaggtcaaggttttgacttcacttctccactaccctcttggcaaaaaggttccaaacttaaaaagtatctacgatatgcattatccatggtcatctgttcttgggcagaaatgtagtaaaattgtggaaggagccgaagtattagatttatgccctcaatctctgaactttaaaatactcaagcttatgagatttagcaatcactaatttgccaaccttcgcaaatagccaaacacaatggctatgctctatccctttcatctctttccatggctccaaaagaggtaaaaaacaaatgaaattaaaataaaccaactggactatccagatggctgcaatattaatcctatcttggcttaaagagaaaaagcaaacccacttccttaagtttattctatcaacttcaaatccttgtgggttcccttcctaaaactactacttatgattcacacaaaacagcacttattattttctaaagttatttcaaatgtgctcacattagctcctcaacgataaaatcatctcaggaatgaaattatataggatgatatcattcctacccaggttatcagtgtaacctagcatagagctgggtccacaatattaattctacagttctgctggttaactcacatatgtgtatttatgcatgtatgtatgtatctatttctctctctatatatatatattgcagatgaggtgggaagaaggaaagaaacttactggaccctctgacttttctataggtggcatctaagagaaagaaaatagaataggaaaaagattacttaatagctacgaagtagtacttacagtattctaaagagccagagactcttctttacagctgtccgaggagctagtagggcaaactgctccctgagctgggccgatcttttgacatccttctccgagaaacaatattctttttcagttattacaaagaactgctgttgtgatgactagttatttgcttgagcagttccatattacataatcctgtgccacaaaacaccctgtacactagtggctgggatattattcatttccactaggcagctatctcactgttgaaatttatatccaaaagaatatttaattttggcttatttttcttataaaatagggaactcgtcttatcatttttaagtcctcacctcagtgtggtacttcaaactacttcaaattattactataattaaatgcttcattttatataataattaataaaaaaggtggcatatgctttttaaaagcacctctgcatatgttccctcatttaatcgttttactgcaatcttcttgaaataagtaggggcaggtgctccagatgaagaaattaaaggattataaaatttaggtagtttttctaaaagtgaatgctggtaaagcccacacaaagatactggtcttaagagttccactctagaatatctttgatattaaaatagcaagagtcagtgttctatccacagaccc

SEQ ID NO: 137884 - DNA, 3575 bp, Homo sapiens
ataactgcacatggcttatcctatttgaataaagtcctactctcagaccccctttgcagtatagctggggtgctgatcactgaggcctctttgcttggcttgtctatattcttgtgtactagataagggcaccttctcatggactccctttgcttttcaacaaggagtacccactactttttaagattcttatatttgtccaaagtacatggttttaattgaccacaacaatgtcccttggacattaatgtatgtaatcaccacatggttcatcctaattaaacaaagttctaccttctcaccctccatttgcagtataccagggttgctgaccccctaagtccccttttcttggcttgttgacatgcataattgcatttatgttggttcttgtgccctagacaaggatgccccacctcttttcaatagtgggtgcccactccttatgatctttacatttgaacagttaatgtgaataattgcagttgtccacaaccctatcacttctaggaccattatacctcttttgcattactgtggggtatactgtttccctccaaggccccttctggtggactatcaacatataattgaaattttcttttgtctttgtcagtagattaaggtcataccccatcacctttcctttgtagtacaacagggtgtcctgatcaaccaaagtcctgttgttttggactgttaatatgtgcaattacatttgctcctgatctgtgcactagataaggatcctacctactttcttagtgtttttagcaggtagtgcccactactcaagactgtcacttggaatgttcatgtgcacaaactcaattctctaagcatgttcctgtaccacctttgctttagagcagggggatgatattcactaagtgccccttcttttggacttaatatgcattaatgcaattgtccacctcttcttttagactaagagttgatctccacatattccccttgcatcaggggcatgttaattatgaatgaacccttttcttttaatattaatgtcataattgtatttgtggacctgtgtaggagaaaaagaccctatgttcctcccattaccctttggattgctgctgagaagtgttaactactcataatctcagctcttggacaattaatagcattaataacaattatcaagggcactgatcattagataagactcctgcttcctcgttgcttacatcgggggtactgacccactaaggccccttgtactgttaatgtgaatatttgcaattatatatgtctccttctggtagagtgggatattatgccctagtatcccctttgcattactgcaggggctgctgactactcaaaacttctcctgggactgttaataggcacaatggcagttatcaatggttttctccctccctgaccttgttaagcaagcgccccaccccacccttagtttcccatggcataataaagtataagcattggagtattccatgcacttgtctatcaaacagtggtccatactcccaacccttttgcattgcgccagtgtgtaaaatcacaggtagccatggtgtcatgctttatatacgaagtcttccctctctctgccccttgtgtgcccttggcccctttttacagactattgctcacaatctcaggtgtccatatttgcagctattaggtaagattgtgctgtctccctcttcccttccctctgccctgccccttttgcctctttgctgggtaatgttgaccagacaaggccctttctcttggacttaaacaattctcagttgcactttccttggtcccacccattatacatgaacccctctacttcctttcgcattgcttctgagtatgctgactacccaaagccccttctgtgttattaataaacacagtactgattgtcccatttttcagcccatcagtccaagatctccctaccactttggtgtgttggtgcagtgttgactatgaaaagcaggcctgaactaggtggataagccttcactcattttctttcatttattaatgatcctagtttcaattattgtcagattctggggacaagaaccattcttgcccacctgtgttactgctttactgtgcaaaatactgaaggcaagtcagacccagggagctggattgccatcctttattttgtgtttccagtgtacactataaaattgtctccccaggaaggaaggttggcactttctctgcattcttctttccagagcagattgcctggttaagaatctcttgttgtcccctttgtatattgttattgtaaagtgccaaatgccaggatacagccagaaaaattgcttattattattaaaaaaatttttttaagaaagacatctggattgtagggtggactcgataacctggtcattatttttttgaagccaaaatatccatttatactatgtacctggtgaccagtgtctctcattttaactgagggtggtgggtctgtggatagaacactgactcttgctattttaatatcaaagatattctagagtggaactcttaagaccagtatctttgtgtgggctttaccagcattcacttttagaaaaactacctaaattttataatcctttaatttcttcatctggagcacctgcccctacttatttcaagaagattgcagtaaaacgattaaatgagggaacatatgcagaggtgcttttaaaaagcatatgccaccttttttattaattattatataaaatgaagcatttaattatagtaataatttgaagtagtttgaagtaccacactgaggtgaggacttaaaaatgataagacgagttccctattttataagaaaaataagccaaaattaaatattcttttggatataaatttcaacagtgagatagctgcctagtggaaatgaataatatcccagccactagtgtacagggtgttttgtggcacaggattatgtaatatggaactgctcaagcaaataactagtcatcacaacagcagttctttgtaataactgaaaaagaatattgtttctcggagaaggatgtcaaaagatcggcccagctcagggagcagtttgccctactagctcctcggacagctgtaaagaagagtctctggctctttagaatactgtaagtactacttcgtagctattaagtaatctttttcctattctattttctttctcttagatgccacctatagaaaagtcagagggtccagtaagtttctttccttcttcccacctcatctgcaatatatatatatagagagagaaatagatacatacatacatgcataaatacacatatgtgagttaaccagcagaactgtagaattaatattgtggacccagctctatgctaggttacactgataacctgggtaggaatgatatcatcctatataatttcattcctgagatgattttatcgttgaggagctaatgtgagcacatttgaaataactttagaaaataataagtgctgttttgtgtgaatcataagtagtagttttaggaagggaacccacaaggatttgaagttgatagaataaacttaaggaag

SEQ ID NO: 137885 - DNA, 1493 bp, Homo sapiens
tattttgcacagtaaagcagtaacacaggtgggcaagaatggttcttgtccccagaatctgacaataattgaaactaggatcattaataaatgaaagaaaatgagtgaaggcttatccacctagttcaggcctgcttttcatagtcaacactgcaccaacacaccaaagtggtagggagatcttggactgatgggctgaaaaatgggacaatcagtactgtgtttattaataacacagaaggggctttgggtagtcagcatactcagaagcaatgcgaaaggaagtagaggggttcatgtataatgggtgggaccaaggaaagtgcaactgagaattgtttaagtccaagagaaagggccttgtctggtcaacattacccagcaaagaggcaaaaggggcagggcagagggaagggaagagggagacagcacaatcttacctaatagctgcaaatatggacacctgagattgtgagcaatagtctgtaaaaaggggccaagggcacacaaggggcagagagagggaagacttcgtatataaagcatgacaccatggctacctgtgattttacacactggcgcaatgcaaaagggttgggagtatggaccactgtttgatagacaagtgcatggaatactccaatgcttatactttattatgccatgggaaactaagggtggggtggggcgcttgcttaacaaggtcagggagggagaaaaccattgataactgccattgtgcctattaacagtcccaggagaagttttgagtagtcagcagcccctgcagtaatgcaaaggggatactagggcataatatcccactctaccagaaggagacatatataattgcaaatattcacattaacagtacaaggggccttagtgggtcagtacccccgatgtaagcaacgaggaagcaggagtcttatctaatgatcagtgcccttgataattgttattaatgctattaattgtccaagagctgagattatgagtagttaacacttctcagcagcaatccaaagggtaatgggaggaacatagggtctttttctcctacacaggtccacaaatacaattatgacattaatattaaaagaaaagggttcattcataattaacatgcccctgatgcaaggggaatatgtggagatcaactcttagtctaaaagaagaggtggacaattgcattaatgcatattaagtccaaaagaaggggcacttagtgaatatcatccccctgctctaaagcaaaggtggtacaggaacatgcttagagaattgagtttgtgcacatgaacattccaagtgacagtcttgagtagtgggcactacctgctaaaaacactaagaaagtaggtaggatccttatctagtgcacagatcaggagcaaatgtaattgcacatattaacagtccaaaacaacaggactttggttgatcaggacaccctgttgtactacaaaggaaaggtgatggggtatgacctt

SEQ ID NO: 137886 - DNA, 1091 bp, Homo sapiens
taatcccagcactttgggaggctgaggtgggaagatcccttactgccaggagtttgagaccagcctggccaacattaaaaaaaaaaaaaagtaagacaattgccctggaatcccatccccctcacacctccttggcaaagcagcaggagtgctaactagctagtgcttcttctcttatactgcttaaatgcgcataattagcagtagttgatgtgcccctatgttagagtagaatcccgcttccttgctccatttgcattactgcaggagcttctaactagcctgaattcactctcttggactgttaatgtgcatacttatatttgctgctgtacttttttaccatgtaaggaccccacccactgtatttacatcccagctggaagtacctactacttaagacccttagactagtaaagttagcgtgcataatcttaggtgttatatacacattttcagttgcatacagttgtgccttttatcaggactcctgtacttatcaaagcagagagtgctaatcaatattaagcccttctcttcgaactgtagatggcatgtaattgcagttgtcaatggtccttcaattagacttgggtttctgacctatcacaccctctttgctttattgcatggggtactattcacttaaggcccctttctcaaactgttaatgtgcctaatgacaattacatcagtatccttccttttgaaggacagcatggttggtgacacctaaggccccatttcttggcctcccaatatgtgtgattgtatttgtcgaggttgctatgcactagagaaggaaagtgctcccctcatccccacttttcccttccagcaggaagtgcccaccccataagacccttttatttggagagtctaggtgcacaattgtaagtgaccacaagcatgcatcttggacatttatgtgcgtaatcgcacactgctcattccatgtgaataaggtcctactctccgaccccttttgcaatacagaagggttgctgataacgcagtccccttttcttggcatgttgtgtgtgattataatcgtctgggatcctatgcactagaaaaggagggtcctctcc

SEQ ID NO: 137887 - DNA, 1092 bp, Homo sapiens
ttctgtattgcaaaaggggtcggagagtaggaccttattcacatggaatgagcagtgtgcgattacgcacataaatgtccaagatgcatgcttgtggtcacttacaattgtgcacctagactctccaaataaaagggtcttatggggtgggcacttcctgctggaagggaaaagtggggatgaggggagcactttccttctctagtgcatagcaacctcgacaaatacaatcacacatattgggaggccaagaaatggggccttaggtgtcaccaaccatgctgtccttcaaaaggaaggatactgatgtaattgtcattaggcacattaacagtttgagaaaggggccttaagtgaatagtaccccatgcaataaagcaaagagggtgtgataggtcagaaacccaagtctaattgaaggaccattgacaactgcaattacatgccatctacagttcgaagagaagggcttaatattgattagcactctctgctttgataagtacaggagtcctgataaaaggcacaactgtatgcaactgaaaatgtgtatataacacctaagattatgcacgctaactttactagtctaagggtcttaagtagtaggtacttccagctgggatgtaaatacagtgggtggggtccttacatggtaaaaaagtacagcagcaaatataagtatgcacattaacagtccaagagagtgaattcaggctagttagaagctcctgcagtaatgcaaatggagcaaggaagcgggattctactctaacataggggcacatcaactactgctaattatgcgcatttaagcagtataagagaagaagcactagctagttagcactcctgctgctttgccaaggaggtgtgagggggatgggattccagggcaattgtcttacttttttttttttttaatgttggccaggctggtctcaaactcctggcagtaagggatcttcccacctcagcctcccaaagtgctgggattacaggtgtgagccaccacacccggcctcagggcaattttgcataatagaaattcaagaaagactttaggaaatcagtacccccttctatgatgct

SEQ ID NO: 137888 - DNA, 1068 bp, Homo sapiens
atgtgtatgcctttatcattgctcctagatagtgtgaactacctaccaccttgcattaatatgtaaaacactaattgcccatagtcccactcattagtctaggatgtcctctttgccattgctgctgagttctgactacccaagtttccttctcttaaacagttgatatgcataattgcatatattcatggttctgtgcaataaaaatggattctcaccccatcccaccttctgtgggatgttgctaacgagtgcagattattcaataacagctcttgaacagttaatttgcacagttgcaattgtccagagtcctgtccattagaaagggactctgtatcctatttgcacgctacaatgtgggctgatcacccaaggactcttcttgtgcattgatgttcataattgtatttgtccacgatcttgtgcactaacccttccactccctttgtattccagcaggggacccttactactcaagacctctgtactaggacagtttatgtgcacaatcctaattgattagaactgagtcttttatatcaaggtccctgcatcatctttgctttacatcaagagggtgctggttacctaatgcccctcctccagaaattattgatgtgcaaaatgcaatttccctatctgctgttagtctggggtctcatcccctcatattccttttgtcttacagcagggggtacttgggactgttaatgcgcataattgcaattatggtcttttccattaaattaagatcccaactgctcacaccctcttagcattacagtagagggtgctaatcacaaggacatttcttttgtactgttaatgtgctacttgcatttgtccctcttcctgtgcactaaagaccccactcacttccctagtgttcagcagtggatgacctctagtcaagacctttgcactaggatagttaatgtgaaccatggcaactgatcacaacaatgtctttcagatcagatccattttatcctccttgttttacagcaagggatattaattacctatgttacctttccctgggactatgaatgtgcaaaattccaa

SEQ ID NO: 137889 - DNA, 3824 bp, Homo sapiens
gactcctggtctagaaatgaagtctacttccagttaatgttctttctggtatgtctttgctttcttgaaatttcccttttttgtccttactgggtaaattttgaaccaaccaaatcacaaagatgtccggctttcaatcttctaggccacgcctcttatgctctctccgccctcagcccccccttcagttcttaaagcgctgcaattcgctgctgcagccatatttcttactctctcggggctggaagcttcctgactgaagatctctctgcacttggggttctttctagaacattttctagtcccccaacaccctttatggcgtatttctttaaaaaaatcacctaaattccataaaatatttttttaaattctatactttctcctagtgtcttcttgacacgtcctccatatttttttaaagaaagtatttggaatattttgaggcaatttttaatatttaaggaatttttctttggaatcatttttggttgacatctctgttttttgtggatcagttttttactcttccactctcttttctatattttgcccatcggggctgcggatacctggttttattattttttctttgcccaacggggccgtggatacctgccttttaattcttttttattcgcccatcggggccgcggatacctgctttttatttttttttccttagcccatcggggtatcggatacctgctgattcccttcccctctgaacccccaacactctggcccatcggggtgacggatatctgctttttaaaaattttctttttttggcccatcggggcttcggatacctgctttttttttttttatttttccttgcccatcggggcctcggatacctgctttaatttttgtttttctggcccatcggggccgcggatacctgctttgatttttttttttcatcgcccatcggtgctttttatggatgaaaaaatgttggttttgtgggttgttgcactctctggaatatctacacttttttttgctgctgatcatttggtggtgtgtgagtgtacctaccgctttggcagagaatgactctgcagttaagctaagggcgtgttcagattgtggaggaaaagtggccgccattttagacttgccgcataactcggcttagggctagtcgtttgtgctaagttaaactagggaggcaagatggatgatagcaggtcaggcagaggaagtcatgtgcattgcatgagctaaacctatctgaatgaattgatttggggcttgttaggagctttgcgtgattgttgtatcgggaggcagtaagaatcatcttttatcagtacaagggactagttaaaaatggaaggttaggaaagactaaggtgcagggcttaaaatggcgattttgacattgcggcattgctcagcatggcgggctgtgctttgttaggttgtccaaaatggcggatccagttctgtcgcagtgttcaagtggcgggaaggccacatcatgatgggcgaggctttgttaagtggttagcatggtggtggacatgtgcggtcacacaggaaaagatggcggctgaaggtcttgccgcagtgtaaaacatggcgggcctctttgtctttgctgtgtgcttttcgtgttgggttttgccgcagggacaatatggcaggcgttgtcatatgtatatcatggcttttgtcacgtggacatcatggcgggcttgccgcattgttaaagatggcgggttttgccgcctagtgccacgcagagcgggagaaaaggtgggatggacagtgctggattgctgcataacccaaccaattagaaatgggggtggaattgatcacagccaattagagcagaagatggaattagactgatgacacactgtccagctactcagcgaagacctgggtgaattagcatggcacttcgcagctgtctttagccagtcaggagaaagaagtggaggggccacgtgtatgtctcccagtgggcggtacaccaggtgttttcaaggtcttttcaaggacatttagcctttccacctctgtcccctcttatttgtcccctcctgtccagtgctgcctcttgcagtgctggatatctggctgtgtggtctgaacctccctccattcctctgtattggtgcctcacctaaggctaagtatacctccccccccaccccccaacccccccaactccccacccccaccccccaccccccacctccccacccccctacccccctacccccctacccccctctggtctgccctgcactgcactgttgccatgggcagtgctccaggcctgcttggtgtggacatggtggtgagccgtggcaaggaccagaatggatcacagatgatcgttggccaacaggtggcagaagaggaattcctgccttcctcaagaggaacacctaccccttggctaatgctggggtcggattttgatttatatttatcttttggatgtcagtcatacagtctgattttgtggtttgctagtgtttgaatttaagtcttaagtgactattatagaaatgtattaagaggctttatttgtagaattcactttaattacatttaatgagtttttgttttgagttccttaaaattccttaaagtttttagcttctcattacaaattccttaacctttttttggcagtagatagtcaaagtcaaatcatttctaatgttttaaaaatgtgctggtcattttctttgaaattgacttaactattttcctttgaagagtctgtagcacagaaacagtaaaaaatttaacttcatgacctaatgtaaaaaagagtgtttgaaggtttacacaggtccaggccttgctttgttcccatccttgatgctgcactaattgactaatcacctacttatcagacaggaaacttgaattgctgtggtctggtgtcctctattcagacttattatattggagtatttcaatttttcgttgtatcctgcctgcctagcatccagttcctccccagccctgctcccagcaaacccctagtctagccccagccctactcccaccccgccccagccctgccccagccccagtcccctaaccccccagccctagccccagtcccagtcctagttcctcagtcccgcccagcttctctcgaaagtcactctaattttcattgattcagtgctcaaaataagttgtccattgcttatcctattatactgggatattccgtttacccttggcattgctgatcttcagtactgactccttgaccattttcagttaatgcatacaatcccatttgtctgtgatctcaggacaaagaatttccttactcggtacgttgaagttagggaatgtcaattgagagctttctatcagagcattattgcccacaatttgagttacttatcattttctcgatcccctgcccttaaaggagaaaccatttctctgtcattgcttctgtagtcacagtcccaattttgagtagtgatcttttcttgtgtactgtgttggccacctaaaactctttgcattgagtaaaattctaattgccaataatcctacccattggattagacagcactctgaaccccatttgcattcagcagggggtcgcagacaacccgtcttttgttggacagttaaaatgctcagtcccaattgtcatagctttgcctattaaacaaaggcaccctactgcgctttttgctgtgcttctggagaatcctgctgttcttggacaattaaagaacaaagtagtaattgctaattgtctcacccattaatcatgaagactaccagtcgcccttgcatttgccttgaggcagcgctga

SEQ ID NO: 137890 - DNA, 4451 bp, Homo sapiens
aaagctctcaattgacattccctaacttcaacgtaccgagtaaggaaattctttgtcctgagatcacagacaaatgggattgtatgcattaactgaaaatggtcaaggagtcagtactgaagatcagcaatgccaagggtaaacggaatatcccagtataataggataagcaatggacaacttattttgagcactgaatcaatgaaaattagagtgactttcgagagaagctgggcgggactgaggaactaggactgggactggggctagggctggggggttaggggactggggctggggcagggctggggcggggtgggagtagggctggggctagactaggggtttgctgggagcagggctggggaggaactggatgctaggcaggcaggatacaacgaaaaattgaaatactccaatataataagtctgaatagaggacaccagaccacagcaattcaagtttcctgtctgataagtaggtgattagtcaattagtgcagcatcaaggatgggaacaaagcaaggcctggacctgtgtaaaccttcaaacactcttttttacattaggtcatgaagttaaattttttactgtttctgtgctacagactcttcaaaggaaaatagttaagtcaatttcaaagaaaatgaccagcacatttttaaaacattagaaatgatttgactttgactatctactgccaaaaaaaggttaaggaatttgtaatgagaagctaaaaactttaaggaattttaaggaactcaaaacaaaaactcattaaatgtaattaaagtgaattctacaaataaagcctcttaatacatttctataatagtcacttaagacttaaattcaaacactagcaaaccacaaaatcagactgtatgactgacatccaaaagataaatataaatcaaaatccgaccccagcattagccaaggggtaggtgttcctcttgaggaaggcaggaattcctcttctgccacctgttggccaacgatcatctgtgatccattctggtccttgccacggctcaccaccatgtccacaccaagcaggcctggagcactgcccatggcaacagtgcagtgcagggcagaccagaggggggtaggggggtaggggggtaggggggtggggaggtggggggtggggggtgggggtggggagttgggggggttggggggtggggggggaggtatacttagccttaggtgaggcaccaatacagaggaatggagggaggttcagaccacacagccagatatccagcactgcaagaggcagcactggacaggaggggacaaataagaggggacagaggtggaaaggctaaatgtccttgaaaagaccttgaaaacacctggtgtaccgcccactgggagacatacacgtggcccctccacttctttctcctgactggctaaagacagctgcgaagtgccatgctaattcacccaggtcttcgctgagtagctggacagtgtgtcatcagtctaattccatcttctgctctaattggctgtgatcaattccacccccatttctaattggttgggttatgcagcaatccagcactgtccatcccaccttttctcccgctctgcgtggcactaggcggcaaaacccgccatctttaacaatgcggcaagcccgccatgatgtccacgtgacaaaagccatgatatacatatgacaacgcctgccatattgtccctgcggcaaaacccaacacgaaaagcacacagcaaagacaaagaggcccgccatgttttacactgcggcaagaccttcagccgccatcttttcctgtgtgaccgcacatgtccaccaccatgctaaccacttaacaaagcctcgcccatcatgatgtggccttcccgccacttgaacactgcgacagaactggatccgccattttggacaacctaacaaagcacagcccgccatgctgagcaatgccgcaatgtcaaaatcgccattttaagccctgcaccttagtctttcctaaccttccatttttaactagtcccttgtactgataaaagatgattcttactgcctcccgatacaacaatcacgcaaagctcctaacaagccccaaatcaattcattcagataggtttagctcatgcaatgcacatgacttcctctgcctgacctgctatcatccatcttgcctccctagtttaacttagcacaaacgactagccctaagccgagttatgcggcaagtctaaaatggcggccacttttcctccacaatctgaacacgcccttagcttaactgcagagtcattctctgccaaagcggtaggtacactcacacaccaccaaatgatcagcagcaaaaaaaagtgtagatattccagagagtgcaacaacccacaaaaccaacattttttcatccataaaaagcaccgatgggcgatgaaaaaaaaaaatcaaagcaggtatccgcggccccgatgggccagaaaaacaaaaattaaagcaggtatccgaggccccgatgggcaaggaaaaataaaaaaaaaaaaagcaggtatccgaagccccgatgggccaaaaaaagaaaatttttaaaaagcagatatccgtcaccccgatgggccagagtgttgggggttcagaggggaagggaatcagcaggtatccgataccccgatgggctaaggaaaaaaaaataaaaagcaggtatccgcggccccgatgggcgaataaaaaagaattaaaaggcaggtatccacggccccgttgggcaaagaaaaaataataaaaccaggtatccgcagccccgatgggcaaaatatagaaaagagagtggaagagtaaaaaactgatccacaaaaaacagagatgtcaaccaaaaatgattccaaagaaaaattccttaaatattaaaaattgcctcaaaatattccaaatactttctttaaaaaaatatggaggacgtgtcaagaagacactaggagaaagtatagaatttaaaaaaatattttatggaatttaggtgatttttttaaagaaatacgccataaagggtgttgggggactagaaaatgttctagaaagaaccccaagtgcagagagatcttcagtcaggaagcttccagccccgagagagtaagaaatatggctgcagcagcgaattgcagcgctttaagaactgaagggggggctgagggcggagagagcataagaggcgtggcctagaagattgaaagccggacatctttgtgatttggttggttcaaaatttacccagtaaggacaaaaaagggaaatttcaagaaagcaaagacataccagaaagaacattaactggaagtagacttcatttctagaccaggagtcacaacttcaatgggttttccagttctcatctataacatggggacattgagtaaatcaagcaataattaatgctaaaatcctccataaactgcataataaatgtaaagatgttaattcagcttggttttgagaatgggggaagggataggtagagctttgatgtgttgataaagtatccaaatatatcattcaaaccagaatttgtaactcctccaccaaacttttgaaccaaagaagctagaaaggagtaatacattgaggttagtaccatcttcaagggacttcccattccattatcccatgtaatagataatggaatatgtattgcatagataataataaaggattattcctgttttatacattaaaatagagtcctatagaggttacatcatgtgcccgaggtcacacaccatgattcagagtcaatgtagtttttactccaacactctaccttgtatggctcccaaccataagagaacggaagtgcttacgagtcaattggtgagcaagagagaaaaaggaaagaaagacatttcatagaatggctatttggttcctaaataatcaagaaagagtactgtttgtgacctgtttgtaattttttaactatgactccttaatctttactattttcctatttcctccatgaatctgaggaacccaacattggaccaaccatatgacacagtagtgaagttgaccctctgtcagtaactgataagtggtaggaagaaaaagctcatataaaagccaaagctgccctcagaaacctggctatttcagtaggaagcaattaatctcataaactcttctatgtcattcgagaaacaacagagaaccagaagggagacaatggcaacttaagtattatagagcaacttctagaaagtcaaaggatacattaccctcccactggctgaactggaaagtgtaactatcgacccaaatctatcaggtaagcttgctcttcagtttccagaaaaataataaagtatgcaaattttcttccttaagaaataccttccatcttctaagtgtccttggatcaaacaaaaaaagtaatctgacttgtcattccaaatgagggtt

SEQ ID NO: 137891 - DNA, 1289 bp, Homo sapiens
ttcaatattccactttcaacattgaacagatcatccggggagaaaatcaataaggatacattgaacttgacctactttagaccaaatgaatataacagacatatgaaacatttaacccaacagcaacagaatacacattgttctcaatgcacatgatacattcttctggatagattatataataggccacaggccaggcacaatggctcatgcctgtaataacagcactttggaaggctgaggtgggaggatcatttgagcccagcccagaagttcaaggccagcctgggcaacatactgagaccctatctctaaaaacatgtatgtgtgtgtgtgtgcgtatatgtgtgtgtgtgtgtgtgtgtgtgtgtgtgtgtgtaataggtcacagaacaagtcttaacaaatttaagaagactgaaattatatcaagtatgttttccaaacacaatgttataaaactagaaatctgtaacataaagaaccatggaaaattggtggaatttgcggctttggcagattgaaataatggcaggtccagaaagtgatgcgcaataccagttcactggtattaaaaaatatttcaactcttatactctcacaggtagaatgaattgtgtactggtcacatacagaagcattgctttgattgtcttatatttcaagttaaggtccaaaaaaactccagctatgaaagcaacataaatggattttaaactgtctacagttcttaatctcatctgttaagttcccatgcctggagaagctaatgccaactcatcatgtgataattcaatttgtacaatatattatgaacttggaaaaaaaagaacatggaaaattaacaaatatgtgaaaattaaacaatatgctcctgagaaaatattaatattagagcaaagaagaaattaaagaagaaattttaaaatatcttgagactaacaaaaatggagacgcaacataccaaaacttaagagatgcagcaaaagcagttctaagaggaaattttatagcaataaatactaaaccaaaaaaaaaaaaaaaaggatctcaacaaaataacctaatgctacacctcaaggaactagaaaaagaagaacaaactaagcccaatgttagaagaagaaatgacaaaacaaaaatcagagcagaaataaatggattagagtctagaaaaacaatagaaaagatcaatgaaacagtatttttgcacgcattaaccaaattctctttatcccctccttccccactcccactcttcccagcttctggtaaccattaatttactc

SEQ ID NO: 137892 - DNA, 1031 bp, Homo sapiens
gaagctgggaagagtgggagtggggaaggaggggataaagagaatttggttaatgcgtgcaaaaatactgtttcattgatcttttctattgtttttctagactctaatccatttatttctgctctgatttttgttttgtcatttcttcttctaacattgggcttagtttgttcttctttttctagttccttgaggtgtagcattaggttattttgttgagatccttttttttttttttttggtttagtatttattgctataaaatttcctcttagaactgcttttgctgcatctcttaagttttggtatgttgcgtctccatttttgttagtctcaagatattttaaaatttcttctttaatttcttctttgctctaatattaatattttctcaggagcatattgtttaattttcacatatttgttaattttccatgttcttttttttccaagttcataatatattgtacaaattgaattatcacatgatgagttggcattagcttctccaggcatgggaacttaacagatgagattaagaactgtagacagtttaaaatccatttatgttgctttcatagctggagtttttttggaccttaacttgaaatataagacaatcaaagcaatgcttctgtatgtgaccagtacacaattcattctacctgtgagagtataagagttgaaatattttttaataccagtgaactggtattgcgcatcactttctggacctgccattatttcaatctgccaaagccgcaaattccaccaattttccatggttctttatgttacagatttctagttttataacattgtgtttggaaaacatacttgatataatttcagtcttcttaaatttgttaagacttgttctgtgacctattacacacacacacacacacacacacacacacacacatatacgcacacacacacacatacatgtttttagagatagggtctcagtatgttgcccaggctggccttgaacttctgggctgggctcaaatgatcctcccacctca

SEQ ID NO: 137893 - DNA, 1199 bp, Homo sapiens
gtgagacttacttcataaatccatacctttttaatgtggattggagagaagttgttgcgctgtaatacctctgttgctactgtgagagtcattgccagccactattctcatgtcaagctgcccttgaggaggtttctcttgacccaatttagaaacaacccaaaacaaggtttgtaacttagaggaattctttgattctgtgacaaggggtctgtgaccctcttaaagggatcaagtacacaggagatagtacaagtagtactaaatagccagcttaaaaaattggataggtgagatgagacaggaacagtggacagaatggctctaggcatccccaaacaccacatctgggataaggaaatagtacaatggaaagtctatccttggacctactatttgtcattccccatggcatgatggaatatctaaaataaaaagagttgctttggagaaggattgcaaaatattatttcatagaagagatttagaagaggggaaactcccaattacataaggtgggcattatagcttctcaaaacattggttccctatatgggtcatgaagattgatcccagtatcagcctatggcttactaggccagtttaactgaaagatttaatgagcttggaaggatgctgccacctgcactctcactttggcgggtgtttatcaccagtgagtgcggtccctaaaggagcaaaaggacaataagcacccagtggacaacagtgtggcattttgagtgaagatagcaactgaaaaggtcatcggcttggctagattgggctgggcttgttttttaaaaataaaaaaaaagttttccttcatgataaaagtaacaggtgatcattgttaaaaaataaagtatgaattaaaaagtaaataatatgtataattttataagccagaaaactaatttgtaatattcaggtgtatgtcctttcattctttttaaaaattatgtatataacacagttttataacaaaattgacatcatattgtatatatcattttattatctaattttttcatttgaaaattcacaagcatatttccatgttattgttctttgaaaaatacaatattaagtgctccataatatcttatggatttaacaaagtttatttagatgatgtcatgttattggacattttgattattaccaagtttgcgtataaaatttaaatgtaatgaaca

SEQ ID NO: 137894 - DNA, 2149 bp, Homo sapiens
gaccagaatggttagtgatgagattttatgtaagtaggactgggtttttcagggggccttgtgtaacttgccatcaagagttgggaaaggaggccctgagcagtgcagcagagctatgtaaagtgagagtttgggtcttgggaccaggtagcctgggctcaaatctgctctcacacttagcaatgtggtcttgagcatgattcttcacttccccaggactctgttttctcttatgtaaaataggaataatatttattttcaatgatgggggtaaaaagtacttaaagggactaattatgtaaattgcttagaacaggcctggaatatacagctaaatgctgtgtcaactgttgttgctgataatggtgttgactatgacaagtattaaaagaagagatttgactagaggtacttatattttgaatgatcagtgacgatgttagggttgagaaagaaaaacagtaactgacttgaaggttttcaatggtatgtaagtgtgaggtcatttcaccttttatttctctgccaggtagagtgggaaaccaaattaatcactccatgatctagtgactaatctattgcctttgcttttagttccaaatagaaagctgttgaaaagttgttgtattacacctgcataaaggttatcctgaaaacagaaaaatgcattagactttgtcaaaactggatttgaaacctaattcaactgcttgctggctgtgtgacttaaacttgttgaacttcagtttcttcctctaatataactattaattttcagagtttccatgaagatatttgtaaagtgtttgtcataggcactctatacattaattacagctattattgttagatcttgggacacccagcacgtgacaaaaacaacagcagaccctggtgcctgggaggacttcatggatccagcagcaacctggagtggtgctcctctgaagaaatcctactcggatggatataatacaacctgctaagtgtcctagcacttagcaggttgtattatcattgtccgtgtctatggctctcgtctaccagactttaaattccttaagggcaaggacagtgccttactcatctttgtattcacagtgcctaatccggtgcacattgtaggcctcattaaatgtttgttgaatgaaaaaatgaatcatcaacagacattaattgggcgcctgctctgtgatctccatgggctcagcttgtccccgccagttgccaacaacgtccaagctctcttcagaatgcttactcctgaagcttattcctgtcttctaattcttttgttgaggacttttctgtgtagtgcaatgatagcaaatacacttcatctcaagtaccatctccaattgattgataatgcctgccctgattatgttttataacaagattctgaaaccaggtcttatctcagtgtgaaagacatttataactatttagtgatgtctgctgagggtcggagaagggggagtagcagcacaagtgcctcatatgtcatatttgctactctgttttctatgaaatacttcatttctatgcctgcattttggtcttagctacttgctgatgttgcatggctgttgctgctactgtaattgctgctaattgctccctgggttggaccagagtgctcattgtctgaacagaaacctcatcctcacagtctgaggtttgctcctgtggctgatatttaaagttttcccctttcaactttactccagctatccccttacctgcactgacaggtaatcctccaccgtcctgttcacctctcaccaggttcatattttctttatcttatttattgtacttaatcattattttgtgagaagcttttctgattgtagatgtgacaaccagaatacaagttaaaaccacttatccagcgccttacagtgaatcatttaacatgagaaaaaaattgagtgtgtttgcagaccatggggcagaaggaattgagaagggagtcattgtagatgtgagaaagagagagatgataatagatggaagatgatcttgaaagatgatgcaggtgaagctggaagggtgaaatttatggctctagaacacatgcaggtggagggttagccttaggtaagtggaactacctctttgctggagcacagagatagggatagga

SEQ ID NO: 137895 - DNA, 1048 bp, Homo sapiens
tcttttaatttttgtgactcttcaaatgccataatttctcttttgtttgtgaaggatagttttgctagatacagaatttgcagttggcattctttttactttagcagtttgaaaatatttcccattgttggccgggcacagtggctcacacctgtaatcctagcactttgggaggccgaggcaggcggatcatctgaggtcaggagttcaagaccagcctggccaatatggtgaaaccctgtttctactaaaatataaaaattagctgggcatgatggcaggtgcctctaatcccagctactcaggaggctgagatgggagaatcgcttgaacccgggagatgatggctgtggtgagccgagatagcgccgctgcactccagcctgggcggctgagtgagactccatccccgaaaaaaaaaaaagaaaagaaaagaaaaagaaaaaagaaaaaaaattatttcccattgttttctggtctctgatttatgataagaagtcagctgattatcttattgaagatcagttaaatgtgatgttttttattttgttttttctcttgctgatttcaaaatttctttctgacatctggctttgatgatgttactactatgtgtaaatttgaatgtctttgagtttatttttaagacagggtttggctctgttgcccaggctggagtgcagtggcacaatcgcagctcactgcgtcctccacctcccaggctcaagcaatcctcccacatcagccttccgagtagctgggactataggtgtatgccaccacgcccagctaatttttgttctttttttttttggtatagacagggttttgccatgttgcccaggctggtcttgaactcttgggctcaagtaatctgctcacctcagcctgccagtttatcctttctggcatttgttggtcttgcacatattgattaatatttttgatcagatttgggatttgggagccattattcattcacatattttttctgccccttttctctcctctcattatgtttgttatatttactaagagtaattctttt

SEQ ID NO: 137896 - DNA, 1073 bp, Homo sapiens
gactttaagcacttcctatattccatgttttacacttgagggtacagttaagaaaagttaacttactgagaagtttctttgatcctgaaactatattcacctgatacaggaaaccagtcttcttcaaaggtgatgagaatgccttgacaagatgatagggaccagcactgtacatttgttcccaagggaatactgcaacatgcaggcacagcccttggtcacctaatacatgtatttgtgaaattccatgggttcccttaagttgggagctaaaagggttagctttgggttagctgtggttttcactagtttctgcttgacaggatcagaagactgccgagacagatactgctatgctgaatttttcatgttcatctcagggactcactgcatactattttttaactacatgtgctattcagagttaggagatcttggatgggactccaaaataaatgatttaagaaattccataccttacattaggaccagagcttgtagtaaaggatgttgtgatatggttttgacccagaaggatgcttttgggtatcatcctcaagaatgtctgcaaaaggttttcagtgaagacaacaaagaatacctgtgctttcactgggaggaggaatgagcctgatggtagtagtgccttttgcttgtggtacatgtagccaaaagagctctgtgatgccaacaaacattgagaaaggtaatctttggtcactgccagctggattggccagtgcaccttgtattcagtactctatattgaagtatctgtcctttgactgtatgcggtgcttattgtacttagtttttagggccctgaaagctttctttgcacttactggttcaaatcccaacatcaactacatgttaaaagcagtcaggaaaagaatgatttggcttattttaagctttaagcataacatactgacagagcttatgaatatatatacaataaaatttatataataatataaatatataactagcttacacatcttaaaatttagatccagcacacaaaataacattttaaagctaaatactttggattttatgcatgagggaac

SEQ ID NO: 137897 - DNA, 3604 bp, Homo sapiens
ttatttattttttaactaatagagacagggtcacgctgtgttgcccaggttattattgaactcctggcctcaagtgatcttcctgccttaacctcccaaagtgctaagattacaggcatgagccaccatgcctggccagtttttgcttatttatagcttctgactcctgtgcctattcctcacaagttgatcttatttaaatctttcatgcttcttacgtagctgtggtatgttcttttaccatgtatccattcacttcagctgagtttctgttcttctgtttttcccaattgcaaatttaatctaattttctcacgtcatccttgtttggggagggctttcatgttacaagtcataggctgttgatcagcgtgtagacatatgcctttgagtctgagctttactttcccttggtctgatcaactttggatttggaggaggggtagttggtcataagaatgctttcttagcaggcttgtttgcctggctaaggaagtttttctttagaaagattttgggtgtgggtaacactatgacacattcactctatctggtttagctctttaaagctgcttgattgcagcatctaccaagtctcttaaagactcaccttcccctgggtaaaagttctaaaagttccatgatatcacaagctggtttgcacaacatcatcaaaacaaagaggattctcttcaggttcgtagccagcttcctaaactgcattcctcttagggggctgttctgcttcttactattggttaggcacttgtgattgctagaaacagattctctgttgagctcacataatgacaggttatttgcaggccacctgtggggaaataatggtgacttggatcacatgcagtttcacatacaggtgatcttttgtgtctgtgtgtttcacatctgtggattcagccatctgtggatcaaaaatatttggctaaaaaatatggatggttgtgtctgtactgaacatatacagactttttttagttgttattccccaaacaatagagtataaccactatttacatagcatttatatcgtattaggtattataagtaatctagagatgatttaaagtatatgagaggatgtgtataggctgtatgcatttactagaatattttatataaaagatttgaatatctgcgggggattctggaaccagttcctctgtggataccaagggacacctgtttagggggaccttaatgtgattatgcctgttagggatgggaactggattcagagaagctctagaaaactcagcagccagagcttgtacatctttccattagcattgcgccatttatttaactgagctactttgtctctctgcgtatctttttttttttctttgagatggagttttgctcttgttgcccaggctggagtgcaatggcacaatctcgcctcaccacaacctctgcctcctgggttcaagcgattctcctgcttcagcctctcaagcagctgggattacgggcacccgccaccacgcctggctaattttgtatttttagtagagacggggtttctccctgtcttgaactcctgacctcaggtgatccgcctgcctcagcctcccaaagtactgggattataggtgtgagccactgtacccggcctctctgcttatctttggtgtcttataatttctgctttttaaatattggctcgcccatccactttgttttttctccatctctctttttttttttttttgagacggagtctcgctctgttacccaggctagagtgcagtggtaagatctcagctcactgcaacctctgcctcctgggttcaagtgattctcctgcctcaacctcgaatacctgggattacaggcaccagccaccatgcctggctaatttttgtatttttagtagagatggggtttcaccaaattggccagcctggtctcgaactcctgacatcaggtcatcctcccgcctcggcctcccaaagtgctgagattacaagcatgagccattgcgcccagccctccatctcatatttttagcctatttataggttctgcttacttatggcttcatcttcctcataagttttgcttgcttatgaccctcttgacctcacctctgcattgtgttggcttgctgtgtatcctttcagcttcagtttcctttgcgaactgtgattacttttaatagctcgattccaattcctgaaaagacaaatttactaggcctgttgtatcccagtttagttaagatatttatatacccacagcaacagtttgtggatcttcacttttgttttctgccattaatatgatgattaccctgttttgctgcttttactttgcttgtttcttatagcttagcttataaagtatccattaacaactgactgttggacttctctctctttgtttcaaggactgcaattgcaaatgcctgtaggatccagatgccataaatgtataagatggttctggtgttttcttcttttcttgaaacactgtcttgtgtgtgtgaggggggtgatcttttgttcagtcatttttgatagagacattagaagagcgatttctttaaaatataaacaagggtgcaaatgggatggtaaagggcaactgacgctactaggaggatagtagggagtgtttgacattgtgtgtaattgggacatacatatttcctccaaaagggaagactttagtacttctgctgattgttgcctagtggaaatgtctgcctaagattaccagttgtctacaaaaagcctgattggcttcaggtttttttttttttaatttagatatgatttaacgtatatgataggatgtgtataggttgtatgcaattactagaacattttctataaaggtcatgaatatctgtggtggatcctggaaccaatggggttgggagggcagcttcaattgttttaaaatgtttcaggccaacagaatatgcttataaatgcttttataacctcatagcttctgtttctttatagttttggcttatttgtaatgtttcctttttctcatgtggtacaaaacatggttatgtaccattacctcttcaactcagccagtggcttggcagtttcccttgtgcagtgtttaaaactgggccacagttttgaatgcagttgtggatattaaaatgaaatagattaggaaagaatagattaagatagaatacagataagaaaataagaaaatatcagccttcatctggcaaagaaaataccagccttcatctggcaaagggcatcatcaggcatcaccaggaggtgctctgtatccataggttccctatctgtgggttccaccaccactgataaaaaatatttggaaaaaaatacaacaatgcaaaataatacaaattttaaaaaatacaatatatttatgtggtgtttacattgtattcgttattataagtaatctagagatgatttaaagggacgggaagatatatgtaggttatatgtaaatataccattttatataaggaacgtgtatatccatggattttagaatctgtagggattcctggaaccagtcttccatggataccgagggatgactgtattgttctgtgaaatttttgtcccagctacat

SEQ ID NO: 137898 - DNA, 1027 bp, Homo sapiens
tcgtcatagtgggctttctcatagttatgcctctgattttcccttgtaacttcttagaataccttcttcacctctcatctttgctactgattacctgtttccatatttcacaattttaagtttccgagagcacaggcgatagctaaattaagatgctttgcatgttaccactattatgtactttgcttggctgtctaccctgttgcttcaatataaccaattccaaatagctgcattccttttgagggtctcttccttgcaatccagagttcattgcaagaaatggggtgatttggatcattttaaggaagtttatggaattcaactctagtgtggtatcattaatgtaattaagctcttctctccttatgtgtatcatgttggtcctactacagtttggtttcctcatactctgtcttcctctaacctcctggttactgaatacttagattttttttctcattcataacttgagcttttgcaactactataggtgtgaccttccttctacattatctttctctctacagactatcgactttagctcttgctactctccatgttgccaagttgtcattaaactgagaatctgattccctgtgggttaagtttcctgagaccgcagggatagtagttgctatttggcaggtctaggacatttccccctactgattactatgtgcaaatgtatctctttccctatttatgatgcaaaattgctttagcctaacacaatccagctactataagtgtatccagaatcaagctctaaaactagaatgcaacccagtcatgtagcatccagaagtacctgaaccatctttggaacttgacagtttcacagttaactctgcaaccttactctccttatatcctgatgctattttatatgcctgttaggttgtatcagatctacattctgatctatagtttggagattataattttctaagcaaccctttgtgaggtcacagatactttttgtttgttactggttataggcattattggttctcatcactcagta

SEQ ID NO: 137899 - DNA, 1021 bp, Homo sapiens
gtatacatacacaaagactttcaaacaaagatgtatacaataaaacaaccattcagagttatttgattcacagtgtgtataatataataaaaataatacagctgtatttgagtcagcactgaaaagtctcttgtgatctgtgtcttacgtgcatgaattgcagaatattcatacgaataccatgaatattcttcacgggccatgttattaccatcccttagaggaatctcttccttgtcgtgggtctttctttgtatggcttagaagtgatgttgtctttatattgtgttatttgttcttaactttacattatcagctctggtgtgcttacctttttcaccaacgtgtcttctaccctacttacctcataagtgaatctaatacagaggttattttggatataatcattatcttaacaggcaagatagtgggctgtgctatttcaaaccctaaatttggctttcaggattatgaagtattaattcttccactgatatctcaaaaggtgatctggacaaaggaacaggtatctcaggtaagcaattgttgaatatgaaagtaaatattcttctttgatcgtttgttgtatttgttatgtttaatagctttcctaataatgaaccaactttgcatttctggaagaagattcgtacttttttgagacggagtcttctttttttttttttgagatgtagtctcgctctgtcgcccaggctggagtgtagtggtgcaatctcaggtcactgcagcctctgcctcctgggttcaagcaattctccagcctcagcctcccgagtggctgggattacaggtgtgcatcgccatgcccagctaattttttgtattttttttagtagagacggggtttcaccatgctggccaggctagtctcgaactcctgacctcgtgatctgcccacctcagcctcccaaagtgttgggattacaggcatgagccaccacgcccggccagattcatagttttcaagaattttgaattatatttgctaaatttgatattt

SEQ ID NO: 137900 - DNA, 1064 bp, Homo sapiens
aaaaaaaagtcttaaaatattcaggctgtactacagaataaagagtctaacctcttttttccctattctcccatttttatagatgggggaattagaaattgcccaagattatatgagaccacagtagatggcacaaattgcccaagattatagctagttggcatagaaaatggatttgagtccaagccagtactgtgtcttctactcagtgcttcatctaggttctatcaaatccaaggaagccatgtgagacaaaaatgtttttatttcacagtaaaagatttttttttctttttcttttttttaaattagagatgggggtcttaaactatgttgcccaggctgttcttgaacacctgggctcaagtgatccacacaccttggactcatttcacactaaaagattctgtaatagctcctgagattttactcctctgatgttggaaatttccatagtgtgaagttttgttatgcataaaatcacctggggtgcttgttaaacatgcagattcctggatggccagaaaacttgtcattggtcaagagcaacattaagatctgcctgttactcatactgatgcttcctgcccagcaagttcatcagagggcgaggatgaattacggttgccatgaatgtccttgtgaggcagttgggaagccttggtaagttgtcagtggctttggtggggttccccagttggtggtagaaaagagaagggaaactggtcgtgatctggccctttctagctttctagcttattaagtacttactaagtgccagagactgttgcagatattaacaaagtcttaccatggaactttcattcttgtgaagttagacaaagggataagtaaccagtaaatgtataatgtatcataagtgttatatcaattgttttttcccattataatgtaaaaaattgcacttaaaaatggttaggttaaactaagcaacatcttgtgtttttctccctttttcccattctcccttttaatacctgccacagttgctcaatgcaatggaggctgaccaagctgagtgtcaggaaggtcatagatgatgc

SEQ ID NO: 137901 - DNA, 1065 bp, Homo sapiens
aagaattcatgtttgtgtatgtacatggaagttgttggatgaacataccccaagtgttaaacttttctgggattctggctgatttttttttttgagacggagtcttgctctgtcgccaggctggagtgcagtggcgtgatctcggctcactgcaacctccgactccctggttcaagcaattctcttgcttcagcctcccgagtgggattacaggcatgcgccaccacgcccagctaatttttgtatttttattagagacggggtttcaccatgttggccaggatggtctcgatctcctgaccttgtgatccgcccgcttcggcctcccaaagtgctgggattacaggcctgagccaccgcgcctggactctggctgatttttacattctttgcctaatatagttctggaattttgtttttttttttgcagtgttcatctatgactatcaaagttagaggcacattgaaactatttccattttgaaattgttgacctgaacagaagtggaataaatgggggtggtgaggggttctggaaactggagaaatttagtttggaaaagaactgggtggggtggggggaagggaatggtggaaataagatcactgccttcagaggaaggcactaactaccacctacccctctattcctggctccttagtgcaagcattttctggatcagtgtttacacttctcatttatttcacagttaggccctctacacattccttttctgcccttgtccctctgggctttaaagctacaataattgctagtggcagcagctgcttatgaatatgcaagtcttgctctagtaaatggtggccttagttgctccaataaagagatggctcaaacctatcaaggctcctgcttcccctctcctctcagctaggcagcaccaatcttccctatctatggtgggagaactttctgcctgggtctcatggtcactagtagattagaggacagatactttcttgctggtggtaggtaaaacagttaaaaatgagtcctgggtaactgctccttgggacttccaggggtttgagttgagggttgcc

SEQ ID NO: 137902 - DNA, 1046 bp, Homo sapiens
ggggaggcgctcagcattcgggtaattaaggttgcaaaatggcgaggggggaggtaagctgtctttgcttggccatcttgggctagcaggccttgcagagaactacctttttagctgagtgaagggatcaacctgagttggagttctcctatgctgtggccagatccactagaaattaacccagaatcttagcctctcagtggcctatcggtaagtgggtacaaaaatgaggaggcgatgatgactctgcaaaaggttgcggcagctggcggtgcgtaggaaatgcgtaaaaagggagcacttggagacaggccacatttgggcagtacgcattcggagggctctctggctttccgatcttgggtcgctgtacttggctctgaatacagtcaccccatcagagtagcaaaacactgtggttgtagtgtgagaatccaatgttaatgttggccgaaagctcttgattttcttccctgagaacataggcgtgaggatttggatgtgtttccaaatgcttgttactctttgccgtaaacctggaatttggacctatggctgcctgggactcatactgtcgtggagaaagattgaaaagtagttaatggcagtggtggtatgaaggtaacctgggctttcaccctttcctttattttttcttctgtagaactttcagcacggttttgtcaagggagaagattagagtttctattttaaaggcagatgtactgtcatgactctctgaagacttgctgttaatcgctaaaactagtaagttagcacttagatacagacatagttagaaggagcacaggattaaaaactgaaaaaaacatcttttcccagtaatcctagctattatttcatggtggtccttttccttctctgggcctatttctctctctcgctcatttatttatttacttttagacagagtcttgctccgtcgcccaggctggagtgcggtggcgcgatctcaattcactacaacctccgcctcccgggttcaagcgattctgatatctcagcctcccaagtagtagctgggg

SEQ ID NO: 137903 - DNA, 1071 bp, Homo sapiens
acaaaactcctcagacgccgggttaaagaaggaaggagctttattcggccgggagcgtcagcagactcacggctcaaaaactgagctccctgagtgagcaattcctgtcccttttaagggcttataactctaagaggggtccgcatgagagggttgtgatcgattgagcaagcagggcatacgggactgggggctgcatgcaccggtaatcagaatggaacagaacaggacagggattttcacaatgcttttccatacaatgtctggaatctatagataacataaccagttaggtcagaggtcgatgtttaactaccaggcctggaatgcagcaccaggctgtctgactactgatttcacttctgtcttttctttaactcctactttttctttgaggcagaaattgggcataagacaatatgaggggtggtctcctcccttattaggaattgaacatgagatggcacacatatttatgctgtatcaaggtcacaattatcttactgtataaaactgaaaacatcactatctggacagttggacatgtttatggggaaaattatgtttatctttatttctatgctctgtactagtaggttggttcattaataaatatgtgaaaacttttgtttaaaaaaattatttagaatatgcttcattcattcttcttgtccataagactgggaataataaggagtattgtaaattactggcaatttttttttttacagagctcttaagttaccatagaaatgaaatagcttttcccaacagattccagatatttagaattccaaaggttgagatgataaaattcagtaaggccttgatcactgtttgagcatctgctttagctgataggagcacttccagtaattcagacatcatatacaattattctaatcaatatctcttaccttctgaggacggaaactctataaaatccgtttgctaccagattccaggtaataatgccttcagtaggcttccttagcttccttatgtgccccctgtaaacaatttttctgacaagcaacatacctttgtattatatcctgaattatttgatct

SEQ ID NO: 137904 - DNA, 1097 bp, Homo sapiens
ttcaattgttttttatcatttcatccagaacaatgtccaagaaagaccgatatcctacctgcttcagtctatttccaagccatttctttccactggctgacatgccactgttcagttattactcttgcctgcacccaagaggttgagtcagagccaagccacaagtcagtgccagcaaagtagctgcatttatttccattctgcagcagtagataatttatagatgtatttagggtgagttgacaggatttgtggaaaaaggggaaagatggggagttccagagtgaacatagataccaaatcagtagaggaatgaaacacacttatcagacaatctttagaatctcacccagggagctcaaagaggatagagcaaggaacactaggtcagttctccagaaatcaagttgctatgataggcaaaatgctttatggtgcataggtttgcttctgaggcagggagggcagaaatacaacagagctaaagagtaagcaaccagacaagataggcagttcaagggagggaaatgacagaggaggaggtagggggaactagatgataatatgagagaaaagtgaggtagaaagctctagagatcaaccagagcattctaaaagcaccaagttaaaaaccagttgactcatttggaggtcagccaaaccaggtagggtagctgcatattgtattgatgtagctaggagagtgaagaggcagtgacttgagctttcctgatcatttctgcaagaccacactcctgctcccacacccttatcaacattatttggatgagctcatttctcattgccactgtagccccttcaacctacatcaaatgatcctgcattctatcagaggtctccacttcccttcatccctgtttccaggcagaatattgagagaaacatcttaattgttcttgcaactaatatccattattacttgatgcaagttttcatgtaattgaaatccatatttaatttggtcattttatccagggcaaaatgttctatatattccatgagaaatacaagaaagagcagagggtctattcaggctaaattgtttgcaagaaacccatttaagctaactaaaataa

SEQ ID NO: 137905 - DNA, 1687 bp, Homo sapiens
ttgatcttttgtatttttttgatttggtttcatttatttctgctctgatgtttattatttcttttcttctactaactgtgggtttggtttgctcttgcttttctagttctttaaaacgtaccattaaatttttgtttgaaattttctttttttggtgtaggcacttatagctataaacttccctcttagtactgtttttgtcgtgtcccatatgttttggtatgtcgtgtttccattatggtttatttcaagaattttttttcaatttctttcttaatttcttcattgatccactggtcatttaggagaatatagtttaatttccatgtgtttgcatagttttcaaaattcctcttgctattgatttttatttcattgtggtcagagaagatatttgatataatttcatttttttgagtctgatcttatttacttgttactcaaaaaattttatttctgactggattcaggcttagaagtagaaggtcgcagagaagaaagtctgtgtctctttgcaatttgttcttggcgcttctctttagcctccttcattctcttggccaaaagtttagcatattctgcagtctcttccttatttttcttagtaccctgcttcttcagagcaatacgccactgtttgtgttgcaggacacatggattaacaagatgctgaatcttgggtgctttggtcctaggtttcttacattctttgtttaagggctttcttacaacatacttggcaaacatcatctttagagagattgagaaatttgtggattctgctagctcttttgggccccaggcgacgaggcaccatagtatcagtcagtccaggaatatccaatatccttctctccttttttttttttttttttttttttacaataaccaagatgagaacgctcagactggcatccatgaaatgattttctctttctctctccagttatccttggtctgtaacaggaatgcccctcactcagtagcaggtggacacgaccacgggtaaagacaccctgcttcatgggggaaccttgttagtcgtttccaccactgatttggaccacataaccctttcattcttcacccagagcataagcagcaacttctgtagccatacacttctcataaaaagtatgaagtttacgttcatcatccacttcaatgagtttctggcagcaagtggctgggaaggagatgttcagcttcatcttgaagcagctgaacacctctgaggcaccacagaaaatagctataatttcaattttttaaaaatattttaagactgtttcatggcctaacatacagtctatccttgagaatgatccatgtggtgaggagaagaatgtgtattctgcagccattggatggaatgtcctgtaaatatctattaggtccctttggtctatagtacagattaaatccaatatttccttgttgattttctgtctgggagatctgtccaatgctgaaaggggggtgctgaagtctccaactattattgtattgggacttatctctctctttagctctaataatatctgctttatatatctgggtgctgcagtattgggtgcataggtgtatatatatttaaaattgttatattctcttgctgagttgaccacttatagtgacgttgtttgtctcttcataaagtttttgtcttgaaatctattgtgtctga

SEQ ID NO: 137906 - DNA, 1095 bp, Homo sapiens
accacatggatcattctcaaggatagactgtatgttaggccatgaaacagtcttaaaatatttttaaaaaattgaaattatagctattttctgtggtgcctcagaggtgttcagctgcttcaagatgaagctgaacatctccttcccagccacttgctgccagaaactcattgaagtggatgatgaacgtaaacttcatactttttatgagaagtgtatggctacagaagttgctgcttatgctctgggtgaagaatgaaagggttatgtggtccaaatcagtggtggaaacgactaacaaggttcccccatgaagcagggtgtctttacccgtggtcgtgtccacctgctactgagtgaggggcattcctgttacagaccaaggataactggagagagaaagagaaaatcatttcatggatgccagtctgagcgttctcatcttggttattgtaaaaaaaaaaaaaaaaaaaaaaaaggagagaaggatattggatattcctggactgactgatactatggtgcctcgtcgcctggggcccaaaagagctagcagaatccacaaatttctcaatctctctaaagatgatgtttgccaagtatgttgtaagaaagcccttaaacaaagaatgtaagaaacctaggaccaaagcacccaagattcagcatcttgttaatccatgtgtcctgcaacacaaacagtggcgtattgctctgaagaagcagggtactaagaaaaataaggaagagactgcagaatatgctaaacttttggccaagagaatgaaggaggctaaagagaagcgccaagaacaaattgcaaagagacacagactttcttctctgcgaccttctacttctaagcctgaatccagtcagaaataaaattttttgagtaacaagtaaataagatcagactcaaaaaaatgaaattatatcaaatatcttctctgaccacaatgaaataaaaatcaatagcaagaggaattttgaaaactatgcaaacacatggaaattaaactatattctcctaaatgaccagtggatcaatgaagaaattaagaaagaaattgaaaaaaaattcttgaaataaac

SEQ ID NO: 137907 - DNA, 1010 bp, Homo sapiens
tgggatgttgtataggcccaactcctgccagagtcacaggcccactcctacacatcctacagaggcctcccttccccctttccccttcctttcctctcttactttccactttctgggtgaagggtgactttcgatggagcactcaagagtgtggaagccatcacctctggattttcgcataaagatagctgctatgacaccctttttgtcacttctacacctctttccacagccctagtaacccagctcagaaggtagtattgtagaaagtcttactcaataatattcaacaaatgtcgtcattacttgtattcctttcttttcaaatcctgactatcattgtcccccatctcctgggccagctgaacttccagagatttcatactggtttttggtagcttccgtgtttctggttcattctattttgagcccctgacatctattttcttgccaaaactgctgcacaattggttgtagaggggtcagagaagggagaagacagacactcaagtcctaacgagagtcaaaagtgcctttacaggaagattgctccagcccaggaggttgaggctacagtgagccatgatcaccactgcacctgtctcaaaaacaaaaagaaagaaaaagaaaaaaataggccaggcccagtggctcaagcctgtaatcccagcattttgggaggctgaggcaggaggatcacttgagcacaggagtttgaggccagcctgggcaacatagggataccccgtctctacaaaaaaaatttttaaaaactaggctggcatagtggcacatgcctgtggtcacaggtacttggaaggctgagatactaggatctcttgagccaaggcggttgacgttgcaatgagccatgatcacaccactgcactccagcctgggtgacaagtgagaccctgtctcaaaaaaaaaaaaaaagtgccttcagggagggtggaggtgggggagtgaagctcccagtttagttgctcttctgcttttacatggctgaa

SEQ ID NO: 137908 - DNA, 1092 bp, Homo sapiens
catggaaagctcaggtgaaaccggtcagaccagatgttgagaaactgcagcttttaggaagagaagacagatagatccacaggcagcaagaagagagaatagggaggtaaaaaacctattgttccagctcctaatcacaggacccccaccctcatcacacacctatgggctccagcatatcacttgctcaagaaggcaatggctcatctgtgtcccatgagtggatctgcttattatctccacgtaagaccacccaacctaaaggctactttccaggccatagctcaacagagactaacatttgccttgaggctctctttttaaaaatggaatctgtttttagcactaaaggaaaagatagccttggagtgggaagtcacaaagaagaccccaaagttcaactctcctttgcctcacttttccacatgctttgtagtatagggtaaggcacaggatcttataacagacagaccagtgttagagtcctggatttgccatttacctgatctgcaatcttgaccaagtctgagcttcactccctatctgtaaaaaaggggcagtgggagcatcataatccctacctcacagtcttacgataaggttcaaatgaaaagatggatgtgaaagccctttgaaaacagctttgcattatcatcatgattaccacatacataagtttatctatagacttgcacatgtgcttatgcacgtatagccagattgatataccacccatgatgcacacgtgtataagcaaccacttatatgtacaaaactacacatacatctgatcttaagcctgaactcatgacacagacaattaaaagtgcatacacatacacatttatccacatggatatactttctccttctctcacacacgtacacccacacaagcaaatgtatatgtatctctgtaagtgtgtgcatgcatatgtgtgtacatctatagcctcatagctgtacaggtgagcataccatacccttcagtttctgcctagataatccagttttccgggggtctgacaaaggccctgtttgtaaattcctccacttgatactgataatgtcccttttgcccttgctgaggct

SEQ ID NO: 137909 - DNA, 1079 bp, Homo sapiens
ccatacttgaatcaaggtagaccatgacagatctaccttgattataaaccactatatctctccttatgaagcattatactcaattgttagctcttactgttagagctaacaattgagtataatgcttcataaggagagacatagtgattctagcacctaacacaatgcactatacatagtcagtgcttgataactttgtattgaaatgaaatgagggccaggagtgggagaacatgagcttgttttggggaaggcattgtgggcaagaggggccaagtggttcatgcctctcactccaggcatgctgggcaaagccaggatccactgctgacttctcaggccttatttgcaaggctgctttaaaggtgctttgtgtttgggtttgttttctgacatcattgttcttagcaaccaaggtcagatttttagcttttcctttgactgctaaccatgcccctctgcctaagaaatcccacaggaagcctccaagcttcactttgcctctagacacctggcaaatgactctcccacttccttgccctgtccacagactctgatgctagttgcgggtgccaagatttttttgccccctcctcttcccctgggaccaatcagatttctgagctccagggtagagccacactctcactgatcctctgtccaagtctagaattcccaaagcatggtctgcctcatctgtgctccaggtgcaactgggcaggataaatttctcacacattggtcctgtccttccctgggaagcctggctttcccactcccacttacctaagtcaattctctgctttaaggctgggcgcggttgctcacatgtgtaatcctaggactttgggaagctgagggttgagcccagtagtttgagaccagcctgggcaacatggcgaaaccccatctctgcaaaaaaatacaaaaattagccaggtgtggtggcacacgcctgtagttccacctacttaggaggctgaggtggaaagatctcttgagctgggagattgaggctgcagtgagccatgatcataccactgcactctagcctgggtgacagagtaagaccctgtttc

SEQ ID NO: 137910 - DNA, 1054 bp, Homo sapiens
ctgagccatgactccgatcttgatcaaccatgttatttagcagggtgtggtggtcctcagcatatatatatatatatctcacaagtgttcactgcctcctatcaaggctagaaggtgagcggtatcctgggaagaagaggctgaggccagtgcccccccaggggctggagttgagttgaagtcatggctgtcagcagatagaaatgtcaactagtggtggcctccagtggaaacatcttgcagggagagactgtaccccagccagtccctggagttttggaagacaaaacactcactgaaggacagagtttgagttccccctccccactggggctctgccacttagaactgtgtgactgtgggcaagtggcttagatacattctgttttctcagtcatcaagcaggtatacttaatacctatcagtgcagttgtgtgtagtaatgcaggttaagtatataaaggggaggtgctcaagaaatgttagtttcccaacctttccctctcctatcctagtcccaatagtcacacccactgttggaagaaaacaattgcatctgacactctctccaactcctacctcacctccttggccattctccagactcgggtgattaagaagatagaaaagataaggaatgtctggagcacataagggtccatacattcagggtaactgcaagggcttctggagtataatgactttggtcaacaactagcatgggtggcatgagcatgttagcccataacagaacaagtactgggatgtcagggccgtggaaggaaagagccaagactcaaggtggtctgacttcaatgcatcaagcagaggcttgctggtccctgtcctcttctgttctgctttttaaagactaaaggtccctgtgggtatggagaaagcagctgcatctgagaaaataagtaatacagtagaagctaaagatggagttctgtggcacccatgagaatgttcctggaagacttccaactacggggagcataattgaccaagggtcttggctgctgcactctgaaatcgtcccagcatttgtgct

SEQ ID NO: 137911 - DNA, 1120 bp, Homo sapiens
gaataatttaagacttgtataaggagttttcttgagggggactgagaggcaaaagcccttgtaaatattttatatttactaaaacaaaccactaaatataataccaaataaagatggtattaatttccttttaaacccactggcctagacaaaggctagagtcttcacccagctaggggagactggaagtccataagtgggcaagagacacaaccctaaaatattcagtttcagacctaggctaggtgcagtggctcatgcctgtaatcccagcactttgggaggaggctgagcggggaggatcacttgaggccaggaatttgagaccagtgtgggcaacatagcaagatctcatctctacaaaacaacaacaacaaaaaacttgaggccaggagtttgagaccagcctgggcaacatagcaagatcccatctcaataacagcaacaacaacaacaacaacaacaaacagacctattgctcctccatggagccagggaacatggcaacacagaggactcccatctccagtactaggccagcctatggccagcaaacagctgttgtttcaggaaaggggttcagagagaaattgcatggtgtgaaaaactgttaatgaaacaggatatgagatccatctcatgtcttccttccagtactccccaaggaaatggccatacttgtatttcactcttattttattttacatttccttaataaaattttaaaaggtttcatgaggctatatggaaacgaaggatgactcttcaggccatgaggagagtgtggcatgagattttgccgcagtatggaaaggagaagcctggaatggggaaccaagcacaaaaactttgtcctgggagttcctgcaggtgtccttgagaatgaactatggcagagaaaggcaggggcagaacccttcagagagcattgactcatcagctgctacaacctgatgagccgatcaggttcttgctgctcttgcccacccttcagactctttccctgagcctcaaagccagcttgaacaatatttcactcttctaggctgcctggggagttgggagtggtgctcagcccattttgtgggggttggagactgtttgtgcaccagggcagtcc

SEQ ID NO: 137912 - DNA, 1070 bp, Homo sapiens
gtgtagggtctgctgcaaacccatgcttcttccagggctctcagtctctgttactttcctcaccaaaaagttgcccttttgtgtatggtaaaaacaacgttgtccttccctgaattaatttaccaaccttggtctagaagcccatgtctttgtcacaatactcaatatttagtgatgtggccctagagaggttttagactttcagtcaaggttctgatatttttggtctgattctgccaacccagatcattttatggccacagaaccaaatggagctagatgctttcctggcacaattggtgagttttgttcaattcaacaaacctttcttgagcaccatgtcaccatatgcccagatagctctctgccagagagagaggtataaagccctttaagggcccgcccctcccctccatcttcctgcctttttctaccttgctgcacttcttctgcccatacaggctcagctccatctagagaaagctaagctggaaagtggtaaggggccttagatataatcttttcagaacccctcatgatatagacagagaaagcaagacccagaagagtaagaaacttgacctaggctacacagcagattagcagtagggtttggagttggggtctaaggctaagggggggcttctaaaacaaagagaatatcccaggttagtatgtgcattggggtggatgtgggaacatgtgaaaagccggtcaagaccaataacctagactttgtggccacatctaggattggtttgaaggttaccttgtaggcccctagcactcccgcccaaagtatgtctcagaaacagaaatggcacctctgggtaattcttttggagcttgaaggctgtgcacatttaattttccaaaaataaaatcctagtataggcaaagccttgtaggaacaaagccctgagggaggcagctcagaaaagacaattaagaaaaccccagagagcctttgtaactacatagtacaaaaaattctaccagtttaaaaaagatattcttgcctccttccatatattccacagactgattgttgtcaggcatgctccatgaca

SEQ ID NO: 137913 - DNA, 1018 bp, Homo sapiens
gagccctggctgaggaggaagtccattcagatggttggcgagccttagaattttatttttggtttacagatgggagcaggttatggcttaaataccagagactcttgctattcttaccaagatgtattagagtttcttgaataaatgttccttcatttgctgtagaaaattaggacaatttccagagactttgaataattgatatttaaatgaatttcgccagttgcagtttttccttttgggtccacagggctcctcatactcccattctggaactggaagcctctctgttaagtctgtaaacacttcctttcccccaacacagatttcttcaatctgtctaacccaaaaacactgccctgggacaggatgtccctatgtaagcaggacagtgggagaagcctggaatttaaggcccaaattgggtctagacattcttgataaatgtgcctatcctagcgacttgccatttaaaaaggctaaacacaaggtgggacataggggatcagaagggagcaagtgaggccactcccccatactccctaccctgagtcttgcccctaagagttgaatattggtggtgggagggggactcatagaagagagaggctatagctctctatagcaaagcagattagagtagctccattggccccctagggaaggagcctcagggaggctgacttgggtttcacaagaaaaagtacattctaagggtaaagtacataaagagctgcttcaggaagaagtgagctccctgtcatcaccgaggttatctaagtaaaaggtagagggccacatgtccaggaccctctatcattcatttagagttagaatcccaggacccttgggagaccattgaccctaaaattcattgatcctctgtgtttggagaaggaactctgcccagttttgtctagccaagtcaggtgattcctaggatttttgacataataagagttcagaaacaccccagggaccacgggcctttcctggggttttgcaaaggagcagaatt

SEQ ID NO: 137914 - DNA, 1113 bp, Homo sapiens
ggcaggccaggggaggtcttgggaaatgcaacatttgggcagataaacaaaaatgcctgtcctcacttaggtccataggcacaggtccggggtgaagccccagccaggggccaggaccttaaccccttgtatcatttaaagggaccatgctctttccttcctagcacttccatatcactggctgtgcccatttctgggggagtcagttctggttgcttggagatggtagccttagggagcaattggtctcccctcttcaggacagacaaagaagtttgaggatgtgcatgaccttccagcactttttgtcatctcagcgagaattgggcagcttctggggcttggaggagagctgaggctacccttctttatactagaggttctcaaagttttttgtttttggttctcaaagttttggggtcggtaccccaaagctcatggttaaagcttcagtggtttttccaagcagaaattgcatattgaaactgggtgccctttcttttgctggctgtggggatgtgaagtgtgggctgtagggcctcagataatagcacaatttctatcaattgttctgtaaaatcttttcttctcttccctgctgatgcagagggccaaaatgtttccttcttcaaaccagtgcccgtgatttagctttcattgacattgataatgaacataaaggtccctgagcaaggctgccccttttgtacatccttgctgctcttctcctatgtatgggggtgggggggatgacactggaaggaagggggaacgaatgagaaaatgtcctgtggattctatatttaatgtgttcagtgacatgcagagacgtttaagtgggatttttgtaaccacctttgcaaaatgatgacagtaagggaaatctgacatagttgagtccatcttgcttctaacctccaagcagtccttggtcactcctgggtataggccaagctaactttgggaggaatttagtttatggtttaaccttaaaggaaggatgataatagtctttcccaaaactaagcagcctttgtaaaactaatgaaaggccacaagattaggattatgaggagcctgaattctgctaagatgtagggtatagttagacaa

SEQ ID NO: 137915 - DNA, 1076 bp, Homo sapiens
gaactgacaggatagtaactaggccctttctagggccccttcctacccacagagctaagaaccagtgggttttcctttggggagttgataagagctggactgggaccagcggagggggctcaggactttggccttgaatgaaatcattggaggccaaccatgccccagctgcctgtttgtaacggaaaatcatgagtgggaactattgtcttctttggagcccctcaggacaacctcatcctcctggcccggggatgaccctgccttaaggtggcaagttactgttggctccaagtgacagccaggaatgcctggcaaaaagatgatgaaagggtgggtgacaggaacacaatagacaaaggctcagagaggagaaaaagagacacaaagaggcagagtgaggagagaggctgagctcctaatgaggtgagctgtgctaactgaacacagcctggcagtgccctctgcccctagccaggggcactgggaatgttcttcagtaagactgttgccagagcctgggcataaggaggcatcagtcacctacttcagagggatcaaagtggttcagagtctacctttcatggcacctttaatgccctctaagcaaagtggcctaggatgcccagcatgggagacacattgggtggtaaaggctgggatggcttccccttcccaaaagaaattttccaaccctatgtgcaactgctgcctgtacctttttgggatccaggctaggaattgattttttttttcttaaatagtctctttcctggcctggcccaggtagaaatatagacctgtcatgaaaactgagagatggggctcaccatatcaataactactgcccctcctcccgccatggcagctcgtgtcatcagtcctcctctacctgctgagatgaaaggagtttcttcacattttgccatgtgtatacaagaatggggtgctgggagggccttgaggttaatgccttggactgtaagatttgtaaaaatcagtgactggaacatggaacactgtggtgtttaaggtttcttccctatatgatattctactcttccagtctaggatta

SEQ ID NO: 137916 - DNA, 1167 bp, Homo sapiens
ttttgccaggcattcctggctgtcacttggagccaacagtaacttgccaccttaaggcagggtcatccccgggccaggaggatgaggttgtcctgaggggctccaaagaagacaatagttcccactcatgattttccgttacaaacaggcagctggggcatggttggcctccaatgatttcattcaaggccaaagtcctgagccccctccgctggtcccagtccagctcttatcaactccccaaaggaaaacccactggttcttagctctgtgggtaggaaggggccctagaaagggcctagttactatcctgtcagttctaacagtagtggaacaggagaatctgggccctaggagccctgtaactcccaggagagaccactgaaaatactggagcaacaatgcccctgcttccatttctccccacctcactctcaccaagtcaccagagggtggttctgtaggacctcttttgttgcttaagatgcagatggctcttaagaatcaggcagtcgcccacttctctccagatgaagggaagacattcataggtcccaaatctgcccattcagatgtcacataatatggtgggatatcaatttacttcttccacacatgtggttgtgcacatgtgagcttgtgtgcttttggagagaatgttgattggcaaaagcagcacagtattaatatttagagtaggatgcagcctcttatgcaccacagttaaatctagaacgaacaaaatttcagagctcaagacatgggacatttaaatcctcaaggagtttggaacaaaataaacagatctaaaaatttggtttgggtatgtatgttgcctacaaggaagaaatagtcttaacctgattaatagcagaaagtttgacttcagagctgaagtctcctttcaaatcaaatttctgccaggttctatgctctctgtgagagcagacattagaaaaagagctatataggggtttggagttggttgactatttgagattggatttttaaacaagctctgaagtggaaaagtggttacttcacaaaatgagaatgtggttacttgctgagttggaatggaggccccaccaaggccacagccttgctacaaatgtgccatattgaaaactggcattaataataatccaattcagctctccttccctc

SEQ ID NO: 137917 - DNA, 1016 bp, Homo sapiens
ttcttttcccctcccctggcattccagtgtattaacatttggcaggtgggctcggcgcggtctctgcggtgacgagagttggggaaagatgctcccaagtgtagtccccggtctccgcgggggggccacaggctctggcaggagtgagggaacgaggaggcccacgacaggtgctgtctgtccgctgctctgacaggcccgggcgggaatgcggcccggcccagtactgctctccccacccactcagctggacgcggactctgacacttgttagtgtgagcaatcgactaattttatccggctggggctcagcaggaaaccaatgccgaggcgcgggtagttcttccgggcgactctcgcccccgggaggatagtcgtggggagaggaagaggggttgggggtgggattcctgccgcctccatttcactgggggcgtggtggctcctgatctgcctcagagaggaccgaattttggcgctaaggtcggtactctctgggtactggcgcccagagaagaaaagggtatcttggaagttaggtagtacaaactctttgtgttcttctggtttttttctacttatgttcctttcattcctgaagttcccggattctagcagagtgtctgacacgcagcaggtctctagaaaagactgcttaaatgacttgaaaaccaggcatagaactttgcgcttggtgaccgctagagagagctgaaaggcaggaatcaaaggggctttgaagcatagcctcctgaacccctgcaggatttgggtatctaatccctttccttgtgcctctgcagtctctgctgcatttcagcttattagaatttctgaacttgcttcaagggctcttattctacccgtcacccacactatctaggcgccagctatgagacactagggatttgtaatccttgtcagctggcctgcactgctactgtggagaagtggcagggagctgctggccgccttttcagacgtgaaaagaccctagaggagagcatatgctcgta

SEQ ID NO: 137918 - DNA, 9247 bp, Homo sapiens
atgcaaggttcagactacttatttgatctgatctttaacttcatgtccattgaaaaccttggtaacattaagaaatattcaaatgcttttaaacctataaatcttgtttgtatttttcttatggctacaataaatagtcctgtattttaaaacaacctcaaatgttatcaaaggcacagtatgtagactaataaaaatttgacagaaatgtagcttgaactaaatgtgactgttcgttaaacactgtttccttacctagtttgattacattagtattttggcagaggactgaaaaaacgtcttctgaccatcccacagtggtatgcttggctctgtatatgataaaatactgaaaatagacttcctccagattccctttaaaaatcaaataattctctaaatttctctagtgtagcttgctcttttcaaatggaattagaattttcttaccttataaatttatgcagtatagtttgtaaaaatctgtaattatgaaatgtgttccgaatttttaagttatttaatgcagagtttcagagcacttatatgattgtcctcattttagtagttcctttttctccctctccccctcctttgttttgaacaggaggagactcttcagatgatgtgtctaatggtgactctataatagactggcttaactctgtcagacaaactggaaatacaacaagaagtgggcaaagaggaaaccaatcttggagagcagtgagtcggactaatccaaacagtggtgatttcagattcagtttagagataaatgttaaccgtaataatgggagccaaaattcagagaatgaaaatgagccatctgcaagacgttctagtggagaaaatgtggaaaacaacagccaaaggcaagtggaaaacccacgatctgaatcaacatctgcaaggccatctagatcagaacgaaattcaactgaagcgttaacagaggtcccacctaccagaggtcagaggagggcaagaagcaggagcccagaccatcggagaaccagagcaagagctgaaagaagtaggtcacctctgcatccaatgagtgaaattccacgaagatctcatcatagtatctcatctcagacttttgaacatcctttggtaaatgagacggagggaagttctagaacccggcaccatgtgacattgaggcagcaaatatctgggcctgagttgctaagtagaggtctttttgcagcttctggaacaagaaatgcttctcaaggagcaggttcttcagacacagctgccagtggtgaatctacaggatcaggacagagacctccaaccatagtccttgatcttcaagtaagaagagttcgtcctggagaatatcggcagagagatagcatagccagcagaactcggtctaggtctcagacaccaaacaacactgtcacctatgaaagtgaacgaggaggttttaggcgtacattttcacgttctgagcgggcaggtgtgagaacctatgtcagtaccatcagaattcccattcgtagaatcttaaatactggtttaagtgagactacatctgttgcaattcagaccatgttaaggcagataatgacaggttttggtgagttaagctattttatgtacagtgatagcgactcagagcctactggctcagtctcaaatcgaaatatggaaagggcagagtcacggagtggaagaggaggttctggtggtggtagtagttctggttccagttcgagttccagttccagttcgagttccagttccagttcaagttccagttccagtcctagttccagttccggtggtgaaagttcagaaactagctcagatttatttgaaggcagtaatgaaggaagctcatcatcaggctcatcaggtgccaggcgagagggtcgacatagggccccagtcacatttgatgaaagtggctctttgcccttccttagcctggctcagtttttcctcttaaatgaggatgatgatgaccaacctagaggactcaccaaagaacagattgacaacttggcaatgagaagttttggtgaaaatgatgcattaaaaacctgtagtgtttgcattacagaatatacagaaggcaacaaacttcgtaaactaccttgttcccatgagtaccatgtccactgcatcgatcgctggttatctgagaattctacctgtcctatttgtcgcagagcagtcttagcttctggtaacagagaaagtgttgtgtaattaagatctgaactctcagctatgtagctgatatagtgatgggcaaacaggaatcacttgcttttatgtccactttttgagtggtacttaaatgtaaagtaacaacctgaattgagtcattgctttctgaaggaatcattgtcctttctccagtttttgttccagaataaaaggaaatattttaaaagccacgttataggacctaaaaatctgatttccgtaccagttaaattggtagcatcactgttactgataatttatcatatacacttgtcaatttttcctttgttatcttaaaagatctgccttagcaatggctcctttttcatgttgatctttaaattttcccacaccataagagaggagcaaaggaaattaccagtttagactaagttacagtatgtgtttcataagtgattaaagctatatcattcccagttattagttaacacaaattcagccacattctgagtattgtttgttcacctttcagacttggtgatactggacatgtcagtgtaaataacactaaggttaggatcttctaagtgtataactgtctcctaagcccatcactgtggcacactgtagagtgagcttatagtttaattgagatatttatcttgtggaaatattaaaaagcctatgcttgtgtaagtgaaaaaaaatcacattcatttgtttaaaaatgtaaagctattttgtagaggctcagtacttttccaatgcactgttgtatgaatgcattaaaaattgtaaagtaccatgcttagaactgagaaaactgctttttgtgagccaacatagtaacaaacacaccaaacaaagtacaaagctgcttttgtaagtgtgtagatgtcaagagcagaacatatctataatatttaatgtgtgaacagctactgtgacatgcaaaggaaaggacagtgcagaattaaaccgtgttgaagaccagtggaaattgtataatttaacttggatttaggcaggaagtgaaatatgggaggagtaaagaaaactgaagaatttaaagttttcctgaagacagtaataatgcagacacaaactggtttcatatggtgagagcagccacagcagcagcttgacctggtattctacctgagtagatgaagcagaagatcagcaagtttggcagagttttggtttaagaaaaacaaaccactactacctagcacaagttaaatttacaagtctgctcctcaaaaatgaaaaaatggaggaaagagactataaaaccacttttagcatatgaattgcagttggtacacatgtgtgtgttaataggaaagtctcgaatttgtgttgtttttgagatttgtcatttaaggtaccagtgcacacttgatcatatttcattactatctctaacacagtcctaacatctcaaatttaaagaccagttgaagattaagggatttttatcctttgttgaaagtcatgttgggttatttgaaattcaaattttaattgtgctgcccatatatgaaaatgagactgctgactcgctatctatggacatgcactttatgttggtttcttagtagtaagagtaacttcatgataaccccagtcttcttgcctaatttcttttttgagactagctggggttaggattagaatgactatggagcagatatttgttcttctgggaaaagctttaacaggccaaaatagggattgaacttgtccttggcctttatcaaagcaagctagctacccagacgtagtcaaatactctacaaaataaacaagtctgctttaggaattgtctgggtaccttcactgttaccaacttagctgtaaagattatttcaaagctcactcttccatgatttcttctggctttcaatcctatctaagtatcaaggaaattaacttgtaaatatggtagttgtttactaaggatatgtactgctcttgcaaggaaataatgtccaaacaaagcttcacttattttttttaatataagcagatttcactgtttatggcgcttatgtaatacattttatctttttaaaaatttgtccgtgtaaaagtcaggattcctttatatttgtgagcctccttttctcctttcctaaggatgtaatctacagttttcagatctgcagggtagtcttgattggctaaaaacaaatcaattttcttcttggcataaagtgtttcattattataggggtgttcattttaaatagtttaaaaacaattgcagcacattctaagcataagagaaagttattgacaacaggtaccttcctaatctcccaagacgtacttactcatttgtgaagtattaaagtaagaggtaactcaagcagaatgctggctatgaatgtagatattgaagctattcataaacactggaaatagaattttaagcttttagccttcagtggaatgcacatattggacatgtgcatgtgaacacctttttcagtagcactcacggatttccattcgattgtatagaatgaatacaagtgttttagtggaatttgctacttaatttttaatcttgcgatgtccgtgattattacatgcttactagtgttgtggacattgaagacaaggtcattcgtaggtgtcagattacaatggagaacaaaaatcgttttccccccacccacatccaaacaccattctcgagggagcatttcttgcaaaacaccttacatttcattttctatctttgcactttttcttaagtacagaaaagttgtctttaagacctagtttgaacttcatgcagtaagaggaacaaggataaacaatgttgggagttcacattgttcagagcataaggaaaagtaccaaaacccaaattttcttgaatatttcagatgtttttaaaaactcacttctagtctgaaacatttgaattgttttaactctgagcagctgacaaagttgaggtttttttgttttgttttgttttgttttgtttttttgagacagagtcttacttggttgcccaggatgaagtgcaatggagcgatctcggctcactgcaacctctgcctcctgggttcaagcaattctcctgtctcagcctctcgagtagctgggattacaggcgcatgccaccacacctggctagtttttatatttttagtagagatggggacttcaccgtgttggccaggctggtcttgaactcctgacctcaagtgatgtgcctgcctcggcctccgaaaatgctgggattacaggcgtgagccaccatgtccagccaaagttgaggtttattagtactattagaaacaaaattgagcaagttaagttaaaagtttgctgactttgtatcaacactatagaagatgagccaccttgttaatttggaatatttgctctgaaaagaacatgttagttacaccttaatggtgttaatggaggtggggattgagaaaagtgttcacattagtgttggaatgtaggtaattgtacagtttataagacctttagcaccaggaaataaaatatgtgtgtgtacacacacagtttttaaaaacgattggaattcatccaaaccttaagattaggaaactgattggctgtaagtgttgcctcaagtaatgtgtcccccgccccataacatgtcttttctgtgccaagtatcctctcctagtgtcagtgtctcaaattatatttatgaagggttatcacataatatgctttgtatttaactacctgcttcccaggcgtccatgacatgaaatgggtgaagcatcagccatgactttcggtcagttcccaaaatacccaaatgatagggaggtaaagattgcaaaattcctcttaaaaggccatttttacagcttgctaaaatacagtggcaccttatggttgttaatattttttcttttaaagatggagaatgtttttattcttccccttttctcctttgttcttttgcgaacaaaaaaaattataatctgccttatttgattttttttttaagttttaccttacaggcttccctgtcacatgttttaccatattaagtacatagaagccatgtttgcagggcacttttattctcctagtcttataagactatgctaattgttactttctgaagtattctgtaccttagtatgcaagattgttaaggcacatgttaaagtgtcaggtgtgtttttttccctttaattcttcagtatgtttatattcaataacagtattgtaattcattgagttaactagtaaattgtgtgcttttgaaaaaacatgaaaaatgtaaattgacagcatacttcatttggaaaaaagtaaaagatccgaggaactagtatgtcacttatttatttttattttattttattttttactttttgagacagggtcttgctctgtcacccaggctggagtgcagtggcatggtcacagctcactgcagccttgacttcctgggctcaggtgattctcccacctcagccttccaagtagctgggactacaggcatgcaccacattgcctggctaattttttgtggagatggggtttcgccatgttgtccaggctgttcttgaactcctgggctcaggcaatttgcctgcctcattctcccaaagtgctgggattataggcgtgagccactgcgcccagccttacttatttttaaatcagattttttaatcaactaaaacagctatgagttaagtacctgccctgcaaaaatttttagaaaaagttttaggattatgaaattaagaattattttccttaactggaacagttctaaaatttatctgatacttctctaacaagtgagtgatctcatgtaaccccagtttgtatcttaaaggctgcagcatagaattgagctgtataacagtgttagaactgtcaagtgataatcacagaacagtttgtatcggttttataattctcatgtcttgatcagatctgaaggaaataggcataccctccaacattctaaaaattatttatttttattaggatttgtttattaaagttccacgagctgctttatggtcagttgggctgagtagtagatatcttaaagacatgcagtgaaagtgaaccctgtcatatcatggtgcctctttcaaggttcctctgtaagttcctcatcttgcagaattatttcaataccaaggtatggttgaaccagctgtccagccttaactctatttagtgccccattactaatgttcttttaactggtttgtatgtgttttaactgtccagtgtttggattttacctcttgatagctccatttgtccctggtgctgcttttaaggatgtagggccatgtgatcaggtatcaagttgagtaggtacgcagttggcctggtgatgtatctgtgcctgttttatcttctcccaggaagagctgctttggtatagttgtttacttggattcatacaaagaacagggcagcaatcttggaaagctttctgaagcttataagaacctgaaggggtttggagggggaacagtaacaaaggctgcctttatgtctttggtcacaaagcacatagatgtatgttctgtaaagactaaagtgattgttataccagggcttcctgaccttcgggagagactcaaaaaagcagagaggagcacaaagtgaagttaatttggttggcttgctttatctggtttctcattttctttcaatttaaacctgaacataacacccttctccgatacctatccagcagactcctggttgggaagccctgtattaaattttgagaatgtacacagttttcttttgtacagtgctttacaactgctaaaagttaacttgtttaaagcaaaacaagaccttgaaaggtcaatcatattaaagctggtttgattattaatagttatcttttaggaagaagcttttttccctatgtaagatgtcatactgcagatttaaaatatagactatcaataaaatgcatgaagtgatcatttgtgcttgatcatctctccttgggtttttctttaaaaaggggaatctgctataaaggttctgttgcttcaaaccaatgtcaaatagacttgatttttagagtcatggaattacagtgcaaccttgatttttattcccctcactgctatgagtgtgggcaggtactggtttatatgttataacttccgttttatctgtgttgtgtagttgaatggcttaatcgttgagtggtaaaataaaagattatattccaatacaagaatcctggaaagatttatgtgaatgacattttaagtaggcgcatctttgctgtttcttgtattctcgccattgctctgaccactcccttgcttgccctgtatatatacaaaaacttgtaggtgtgcacgtgtgcttgtacttctgtcttccatttctatcttaatctcttaaacatattgcttaagccactaagatgtccttgtttcaagtaaatcgtcacattgtgacacctggtgtattgtattatagtttcatttcctctggtgcctgcagagctatctgtcattggcatcataactcggtttctcaggatagttttgatgtagtcagctcttcaactcatgaccttcccaaggttttaagtttagtgtcattcatgattttattatttgaaactcaataccaccatcaaaaagttagtgctctagacaatgaagccaaagcacaggcatcttaggtcagtgaaaaggatccagacataaattagccaggtgtggtggtacacagctgtggtcccagctacttgggaggctgaggtggtagaatcacttgagcccgggaggtcaaggctgcagtgagccatgatcatgctgatgcactccagcctgggttacagagcaaaaccttgtctcaaaaaaacccccagatacctagaagaaaggattcgataaatctgggtggattataaactgaactcttaatggtcattttaaaaaataagaaagcaagggtccagtttctttgaggtctttgaatttagacaagatttaactataaggccttgcatggattactaactataatt

SEQ ID NO: 137919 - DNA, 1079 bp, Homo sapiens
tgggattacaggcacctgccaccatgtctggctaatttttgtatttttagtagagatggggtttcatcatgttggccaggctggtctcgaactcctgacctccggtgatccacccgcctcggcctcccaaagtgctgggagtacaggcgtgagccaaagttagatgttatatgcaaaagaactttgtaaattgcttttaatatgtttccaaagaagtgaatttttcccaggacctacctactccttggtttttctttttggtttgaaaaagttttctcttttaaaaatatgattttttttctaatcatcttgtgtcagattactgtgagtcactgataaagtatttgattgtcatacccctaatgtcatctttgccctgtggtgttaaatttcaggtgaaagtactgaggaagagttgctgagacgactacagcaaattaaagaaggcccaccaccgcaaaactcagatgaaaatagaggtatgttttggttttggtggggaggtggatagacgatgggatgataggaactttgtaatagtaaatgtcagccaaagattatccagatttggcacaaattaatttggtgctaagtaactgctcataaaaagaaaactgacattttcttgatacttagaatgtcagcattttttttctacctcacctttgagatgtttatgttaattggaacacagtgagaaatggcccatttaaatgtgattttgtttgtttgtttgtttttcacctccattgaaatttattcctacttaattccttctttataaacatgtgacttcttcaccagcaaaaagaaatgtctaaacccagtggttcctaatgagatataattttgccccatgtgggacattagcaacgtctggagacatttgtgtagagggcaggaatgctgccaaacatcctgacatgccataatgcacaacacagcccccatgacacagaattaactggcttaaaatgtcagtagtaccactgttgagaaatcctgctctaacctcaggtctggtgtttccctcccagtgtcaagtagggattttgattgtgcaacctgagaggctacga

SEQ ID NO: 137920 - DNA, 2138 bp, Homo sapiens
agactacacataggggctacttctgcagttcaaactccttgaataatcaacacttggctctttgaataaacaataacttaagtagtatcagttacatttgtcaacaaatcaagagccaaagagaaaaccactccatcatttaccttatttttcagttgattagtgacattgcttttcaatattcccagctttttggaccactatacttaccaaaagtccaatattatgtttattttctctggacacatttcttcagcttctgcactcaaacataatttcactaactcaccatcaataaacagctttcctcgtttagccaataaatgagcccctgggaaatttactttgattgaagcctcatttttatttttgtgaagaaatattttgtgatgagatttcactttaaattttctaactttttgaactgtagttttcctgtgaattgggaatattgtcactagtgtttaatagtgtcagtatatattgtatttagtatatagtattttttgcataatcatgcattctttgccatctaatctgatttttgaaaaacccatcctctgctgcacctttaagcgtgacattcagagtccacttttctctttgtttgagatgatgagtgtatactcagttttttttaatgtccagtgtgaaggcacttgaaatgctgtcattatagctacatcactgcaacttaagagtgcacagagcagcagtccaaagcaatgggagtgccacatacagtctgtcacaactgctcaactctgccattatagcacagaagcagccatagataacatgtaaatgaatgtgtatggctgcgttccaataaaactttatgaacactaaaatgtgaatttcattgcattttcatatgtcacaagatagtctctaaaaaccattcttaggttgcaaggagaataaaaatatgcagcacgaggctgggtgcggtggctcatgcctgtaatcccagcactttgggaggctgaggagggcaggtcacttgagctcaggaggttgagaccagattgggccaacatggtgaaaccctgtctctactaaaaatacaaaaattagctgggcgtggtggcaggtgcctgtcgtcccagctacttcgggaggctgaggcagagaatcacttgaacccaggaggtggaggttgcagtgagctgagatcgcaccactacactctagcctggttgagagagcgagactccatctcaaaaaacaaaaaataccacagtatggctggatttggcccaagggctttagttcgccaaccctgtctggttcaagggctgtagtttgccaacccttgacctactcttaatataacagtgcttttcaggagtttttgttaggaaatttcatttgaggtctgaaaatccatctctagacctacattctggattttcacataattaaaacttgtatagaatacatagtgacctttattttcaagattagtctcttttctcttttcaggtattttccacttgttcatcaatatggaaaactcagattccaatgacaaaggaagtggtgatcagtctgcagcacagcgcagaagtcagatggaccgattggatcgagaagaagctttctatcaatttgtaaataacctgagtgaagaagattataggcttatgagagataacaatttgctaggcaccccaggtatgcttacatatatttaaggatttataagtgtaagttgctggtttaaaaaaaaatgcttgaacctgttttaaaaatccatttctttagcccttatgaaatattatttaacataggggatatggaatgacatttattgctgtatttattacctgattatatttactgatgtttggaattacactatatcagagagatttttaacttatgaattatgaatttttagcgaactgaattgaaaagaatggagctaaatcttttttttcttagttagctttatctaacttactagataagaatccgagtgtggaatagctaatgggaacttagtttttaggaaagacttattctgttatctctgattttctgaatatgtcccagttgtaatcctccagagctagccttgggtaacatagcaattagaagtttgtgcttaattatcttttaccccactaagtccc

SEQ ID NO: 137921 - DNA, 3356 bp, Homo sapiens
cttgtcacccaggctggggtgcagtggcacgatctcggctcactgcaacccccatctcccaggttcaagtgattctcctgcctcagcctccctcccaagtagctgggattacacgcatgggccaccacgccaagctctttttttttttttttttttttaagtagagatggggtttcaccatgttgaccaggctggtctcaaactcctgaccttaggtgatccacctgcctccgcctcccagagtgctgggattacaggtgtgagccactgcacccagcccccgatactattgttaaagagtttgtgccactgctgtaaatgtctttggcatgtgagttttctcttttatttggttcatgtccttcaaatgtcagaacttaaccagatatctttgccttctttggaagatttatatttttcaagccttttaaccctgcagttgttttcagaacaatttacctatcctacacaagtgaattttgtcttaactttcatgcattagcgttcaaactactaaccgctttattaagaacattagttaaatgttcttagcaaatttgagaaattatggctgactttttttttcctttgtgcttttctatatttttaaaaatcggctgcctttaccacttctaataccaagttgtattacttgagattcatgtgggaaaacttggcttccttttcagggtttttttttgttttgttttgttttgtatttttttagtgcctgttttttgtgcgtgttttatttaagctggtgatttctagtgtcaaagtttcaagtattataaagtaaccatttgtcagaagtttatgtagtataatcttattacagttaagcaatctcagttatgagattaagaaactccaaaaatattatgatctcccccccaccaccacatttcttgacatactcatcttaattaaacaagataggatagttctaaaaataatgatctaaggaaaacagtggagatctaggtatgcctctgtctagactaaaatttatttaggcttagcaagcaggcaaggtttgacaagacaggcttctttgtgtttttatatctggagtaagacttgacttatttttctctctaggattgaattgtgaacattccggcacttcaggtgttgtgtgtgggtgtatgtgggattaagtcatagtaccaatatagactaccctttttccataaattttttcgtattgtcctagtctgttcaggctgctgtaatagaatatcataaactgggtggcttataaacaacaaaaacatatctttcacagttctggagactagaaaatccaagatcagggtgccagcaggtttgatatatgttgagggcccaattcctcatagacagctgtcttctcactttaacctcacatggcaaaaggacaaaggaactctctggggactattttataaaagcgttaatctcattcatgagggccccacccttatgaccaaaggccctacctcctaatatattcaccttgggatttaggatttcaacatgtgaatttgagggggacaaacatttggtcagtagcacatatgttcatggaatttagttgtgttcgtggggaacataaggggaatctggggttgtaaggtaaagaattagaggatgaacatttttgtttgtagtctccctgtattttagattgttgactaccattgttttttattagtgtgcagttcattgatgagtatgtgtggaatgtctgccaatattctggtttccttaaactcgtacaaatagtgaatgacaagaatttttggctaagtttatgtattacctagaacaggagttggcatcctttttctttaaaaggccagatagtataatattttaggctttgcagatcaaaaagcaaaattgagcatattgtcacacaaaagagagaaaccaaattctcacagtttttcctgataaaactcaaaatgtaataacaataattgagtacagtgtttcgtgagataggtttactaatgagaagaatgatactcttttgagggtaacattttgcttaattgggattcatagctagtattccttattagtcatttgcaaatgtccatttattgctgacttaaatatttaatctttgaaaatatcttttcatacatataggtattgctatcttaagcaatccacaagtgtatgattttagtgaagcatatatagaattttgttagatttttatctttttttttttttttttgaaacagagtctcactgtgtcgcacaggcaggagtgcagtggcgcgatctctgctcactgcaagctccgcctcccaggttcatgccattctcctgcctcagcctcccgagtagctgggactacaggcgcccgccaccacacccagctaatttttttgtgttttgagtacaggtggggtttcactgtgttagccaggatggtctctatctcctgacctcgtgatccgcccacctcagcctcccaaagtgctgggattacaggcgtgagccaccgcgcctggcaattttttatcttttaatttaatttaattttttatgaagatggggtctcactatgttgcccaagctcgtcttgaacttctgggctcaagtgatcctcccacctcggcctcccaaagtgctgagattacaggtgtgagccaccacaccccagccagatgactttaatatttaccttttggcatattaccactgcagagatgtcacttctagttgagggttagatggaagctcctcagttgcacagttaaatggattttgaaataaggaaatttattttgtgcttacattggggtctgcaaaacagttctggaactgtagtttgagctcagaaaatgtatgtgctacaaatttgtgtgggaatggagctctcattactttgtcaggacatgaagtatataaaacagcttgacattacatgtgataccaatgttgttgctgaaatggctttaccacagtataagtttcatatataagtattttttgctttgttgttttaggatggattcattaagaaacattatcaagtctgcaggaaacactaattttccaagctatttattgtttgataatagtaattgagagcggttctcacagaaaataaatccatctttgccttgagcacaacaaatcacaataaaactttaccaatattagcccatcaaatgttgtgttgtagagcaagacaaaatttctgacaaaaattcatggaacttgagcttaaaccagagttcataagagagaagtttatcattagtgctactggttcagtaatatgatagattgaaattttcttcagatcacttgatgatgagtaataaaatatataaccataaacgttaaatacc

SEQ ID NO: 137922 - DNA, 1386 bp, Homo sapiens
ttctcaaagtgaataaaatctgttttaaataaatctcagggttggtgttcttgctggcctttcctccccagaattaaacttactggatacagtcccattcattgaccagatgagtagctctttgaaacgattgggcaaaatttctcatttggtttcttgtttccaggaatggatttggatatattggcacacagtactctaaaagaaataaggttaataaaatatgctgtttatctaaggagcaactgtatttttaaaaattactaaaagttgacttatttaaaaataagtccatctaggtttgtgctgcttacaaaaggtgttttgtcattttggaatttttcatacagggagtgaacatggtataaaaagctcatagattgaatagtttagtcatacctattgggattgaaggaaggaatgtgttttaaagtatagagtcttgggatatgttgggaggcagttgtcttagtgaaaagttgactggatttggaatgcagagacctggatttaattactggccctttcccacttactagtcacatggtttttggtaaatcactttctttctctgtgcttctgtttgtcacctgtagaggtggtgattcctaattcatgggattattgtgaagattaaatgaaatacaggtgtaagggctatgtaaatacagggtgatgagtattgcttatagccagagagagacctaagtgacttcaaaacagttatatttcattgtttaaattactgtatgtttcacgggtaatcttttcatagaaaaacagctgatgctaatcatatgctgaagtcagaatttctgacttatctgagataactaaagaaatggatttatgaccttctcttttacgatgatgttgaaagatcccagcggtgtataaggattctctttttcctcttgctacttaagctagaaatgtaccacaatgttactcactgcaaagtagaatctggagacctgttttgttaatgttattcttcactaatattttcacacccaaaatggagatagagctgtatttgatcatttggagtatggttttctggtatttttggcatgcctaaactttaaaatgtttgtttgcacttagtaaacaatagtggcagattatatctacctggggcagaacttgtggtttttagatttattccatttctttcttttatgccgcttagatagtgaaggtctgcttaaaataagaccaggctcattgggtgtgtgagagtaaaattagtttacaaggcatttgagagcattgccttgatttccattttctttgcaaatgtaattatgtctagtccaggggacctctgcaggtattgtagccatagcttactctttgaattcccttataagggagggagtgcct

SEQ ID NO: 137923 - DNA, 5524 bp, Homo sapiens
ggtaacaatggggaagataatggctgcctgagcaacgtctccgagcaggcgctgggctagaggcgggtctcaaccagctactcattggaggcgggcttgagagcggcggccagggaggtgcggagcagcctcggcggcggcggccgaaccaaccgagtcggatcctgaccctaaaacctagtaagtgaagacttgggaatcctgtgagaaatgatgtagagcgagaggaagacagcggagccgcggctgccgcgttctctcaaaatggcccgagtgacgcgtcgtggcagaggctcagcgccgcctccggaccccaggcccgttgctgcggggggctccgtggcgtagtcgccgctgccattttagttgagtggtatagtcgacaggctctttgaaggggaaggaggtgggtagtacttcctctcggtggccgcgcgagctgcagcccaggccctccggagccttaggaaatcgggggaggcagtttttgagttttggcctcaggcgtcagaatcttagaacgtctcaggctttttcttctctgttctctggaggcttccctgacctccccgcgttttccatggcgggcttgggtttgggaaaagggaagtaaaaaatcaggctgccccaagtgagatgctggcaactcttgggcctttagatttccaaaacctcattttgagcccttctgcagggtattaccaattaggcgccccctggggccgcgatgacatcttccctgaggatctgaggcaaatgtggtttactcccttgctcgaataaccctggcatatcctttgccaggtatcactggaaggatccccccgcaaaagagagggaaaagccgttaggtgtttgttgtgttctcctggataagggatggaattgggccaaattttcaagttaatttgtgtttaatccaccaacaactcaatccctcccccattaaaaaaaaaaaaaaaagcctaggggggtctctgcttctgcagacggtacctgccacgcatgccatagcttagtaactagtattaaccggttgggcttctgcttcctgaatactcggtccctttttcccttatgctgattaatttcaagatggaggagacagccacgttccttccctagacagtttcaccatacttattccacaggttagtctgggaatctgaggcctagcagtcttgttattgaggtcattttttttttcattttggggcaagaggaagcagttgtatcagattgtcatcttccatttgcaagaccccacaatgattttttgccagaagtaaggagcccgcatttcctgaatcagaattaaccgcagtgttttggactgattgaaagggggaagaaataataaacctactgctactaatcatttctttcattcttcgtgattatagacagagtaactacttatcaccccattaagtacattgtatcttccctggaggactggcacaattataacccctccccccccatgacttttctaaactgtagaaatatagcttaggtagctagaaagaccaatccactttttaaaacttgattttaggacacactccacttactgaaaaatgttacaaagatttttttagtccatgatgttctgatgaattttaatactttagttcctaccttaggctagtgtaatgtgccagataagtccttgaaagtgactatcagaatctgaaaataattactggtctgataaggaaaggcttattttaagcaagcttataataaaacgtaaattgtctctcagtcttagaagacatcttttatctaactcctggtcccctctgaccttcttgctctccccaaatgccctaatactaatattgaattaggttgggttatggtgtgtctgtatttttttttttaggttgtgtctaattcaaagaaaatgtgtatctttttaaagaggaagaataatggattctttttttttctagagcagagtgaagaaaactaaaatccagtttattgtatttcaatactatgtcataacagtcaggtaatttattttttgttgcgtctcctgatgatttatgtgtagaatgcatgtttacaaatatttattgttctattttgcaggccctgtaattggatgggctcattgatagatgttagatggtgttgggtattcttcatgataagaatgggtacttttcactgggaattaaaagggtaatgtttctggatacctggaactcaccagtgctttatctgtgaatttgactctttaaaataatgtctgaagtttaccaatacctgtatagaacaacaacaacaaaaaatttgttgtcttatatcattgttggaatggcatgagtataagtaaaataacatttaaatgttcattggataactaaatgaaatatcagaatagcttacgagagtataattttacgttactttgtgtgtggtggttgatttttttcctttaagattcaaaaattcataattgatacatgatacttttaattgatattgactcctttcattattattatcatcatcattagggtaaccacataatttattgcctaaccaagacacttttaagaacaaaaggaacattaataattcctggacagcaggtgcaaaccttgattgtccccgacaaactgggatggatacttagcctaaattcataaccaacttctgctgaaggcctgtggtgctaggccatgtgctttatatgcattattttataattctcacaacagagcctcatgagaatgttaacttttatagaggaaaccaaaaacccaaagaggttaagtataatttgtcctcagttaaatagctttaagtggtggagccctcattttatcccaggcctgtctgacgttatacttctgggtttgattgctgtctaattagataggaaatgcaatgaaaatgaaaggttgtagtaaaaagtctgtaggttatgttgcatcagaaacttttgttaatacttaaaggttatccagcaatccccccttttcgtctgttacgttcctgtttcagctattatgcatgtttacacatatttattgttctatttcacaggccctgtaattggatgggctcattgatagatgttaaatggatagctccttgtatatcatttgataaacttaatttaaaatcagaaatgattttaagaaatagcttaataattaaatgatctggaaatactaggctggttggatatctttgaggttagtgaacatgtagtgagccttaatatagtagtaggtcaaatgaggcatctgcatttatggaattatattatatgtacattaatttttccatggccatggtggattagaaatagagcaaatcaccagccagcctcctgttctcttcatttaccatagagtggatgacaaattagagaataaaaagtcttctgtcaaacccaaaccaatgagggcctagaattttgtgccactgcctagaactggacaggtttttctttaacacaaagatttctaaaacctatggcccattgatttcagaaagtatctagtttacataataaattgaagttctgatgtccaatataagaaagtaataacacttctgtatctatttttctttcatttttttttctcagcctcaaacatgaaagtttcccagataatccagcaattcatttctctttttatcaattgaggtatttttatttatttattttttatttttttatttttttgagacggagtctcactctgtcgcccaggctggaatgcagtggtgcactctcggctcactgcaacctccacctcctggtttcaagcaattctcttacctcagcctcccaagtagctgggagtacaggcgctctccaccacgcctggctaatttttgtatttttagtaaagatggggtttcaccatattggccaggctggtctcgaactcctgaccttgtgatctgcccaccttggcctcccaaagtgctgggattacagacgtgagccaccgcgactggccaattgaggtattttttaaatatacctcaattgggggaatatatttatgaacttgtggtttttctcctgacatatatagttggtatttttgctctagattttcttatattttaatgttccaacacaagggttttttttttttggttttttttgtttgtttgtttgtttgtttgtttgttttttggttaggagggcaggacgagttttgctctgtcgcccaggctggagtgcggtggcacgatcttggctcactgcaacctccgcctcctgggttcaagcggttctcctgcctcagcctcccgagtagctgggattacaggcacgtgccaccacgcctggctaacttttgtatttttactagagatggagtttcaccatgttggccaagctggtcttgaacccctgacctcaggtgatccgcccgccttggcctcccaaagtacagggattacaggcctgagccaccgcgcctggccaccaatccaagagtttaatttcattagtcacagtagcacctacatatctgtgagacaaataatctgtaggcagagagcacttggtgcattacatagattggtggatttcttgcaataattttgcaactacaggttggtttgcttttataacatttgagagtctaatggcgtttccatgatgatgaacatgttacttcctgggagaaaggaagtatttgtgtttgatgtttaaaatttttttctggaatgacaaaaggtcccttctgatctccccttgactataggaggaaaagtgttaactacaacttttgttttttattgaccaatgatccctttagtgctgattataactaaggagaccatatgaattatctaaactgggacacttttgagagtgaaagggagagccatattactgattacttcagtacaagtgtaaacccttactcttctggacaaaccaaagatatattgtcaccctcttcatgttatttttatgtaggtatactagttcaggaaggacaattgtcagcatggttggtcttaaatacaaaattacttcctcaaataactgattggtatagataatactttcttttttagttaagtgattttaattttttttttttttttttttttttttttttgaaacggagtctcgctctgtcgcccaggctggagtgcagtggcgcgatctcggctcactgcaagctctgcctcccgggttcacgccattctcctgcttcagcctcccgagtagctgggactacaggcgcccaccactacgcctggctaatttttttctatttttagtagagacggggtttcactgtgttagccaggatggtcttgatctcttgaccttgtgatctgcccgtctcggcctcccaaagtgctgggattacaggcgtgagccaccgcacccggctaagtgattttaattttaaaaattggcttcaatctttaaaaacctgatttttgatggaaaaatcttaggtccttaaaatagtgccttagttactgatgaacaccaacattgtcagttatcagtgatttt

SEQ ID NO: 137924 - DNA, 1054 bp, Homo sapiens
actcatccacataagatggaaaggatgtctgtccatctaacaagctcaggggtttctgagtctcagaatgacatcccatttcaaaaagaagaaaagagatattgaaatcattctgcctgtttgagagatgactggttatttacagcacaaaaaaaggcttagaatgaaaactagaagaggccttttgtttttcactcccagtgaggagagtagaaatcttaagatgctctactgggctacctgtagcactgactggagtttgctgcctacagagttttgaatgtactagtccttagtttccatagaactgaatgcacctctttagtaagttgctgatttatggtgctaaagaaaatgattattcccatttttttcttcttccccaagccccttaagcatttaagaaaatttaaaataaaagcgttagaggccctttttatgaatgtaacctaagtttctgtttgacatatgacactgcaacttaaaaatgttaggaaattatttgcctttttttttcttttagagttaagctttataaataatctgtagaatcaattgaagtttaaagcttaaggatcactcttaagacgtctacaaaatcttgtatatttttaagtgtgccaatttgtaacatattttgtaagtgtatatttttcttagaaaagtgctgtgaagtgtctgtatgtgagagttttcctttttctgcaccactaggtgctaataaaaggatatttacttcaaagtttctggttttagaaaccacaatacaaagaaaaaaaatacacttttgttggaaattttgtaacacaaaacatgttgtgaaagagtgtagtgatcttgtgcaaaaaaaatgaacatttgtgagcttcttgctgttttatagattttcttgtaaattattcttgtaacacttctggttttgttgttcttgttgcgaaggtttcaaatatttgtgactgaatgtacggtgaaactgtcataatgttacctagctgagttttgttattgtttatgaaataaataaaaagaaaagtttaaaatactgctttagaat

SEQ ID NO: 137925 - DNA, 3292 bp, Homo sapiens
ggataaattataaaaatagctataaaatcaacactaatgataaatgaagtatatagaatgcttttatttaaatagtttcctaaatgttttattccagttttgtcaaaagtgcactcatatcatggctttagtgttctttcagtgtttaatcttgcaatgccaatgtcatttaaagaaaatgttaaggcatcccagttcaaccaaatttttcttcttatgagtaaagtacatttactatcagataagatgaacaatttgtggcaacaactgatttgggccatatacccttagtctgaggataaccaatatttgatgccacacactaaacttaaatctcaattttaagtacaaatttttaaatcacattttttattcagtactccccctactttttaaaaaaaatttcacagccccaacattcctcactactactttttcttcccttttattcaccacttgacttctaacatttgatctcttttctttgcacaattgaaggcctgtgcatctgatgactgatgcattatggcacagatgagataatggatgtgagagcgctttgtagatcataaagtgctatacagatataggggattaatattattaatattgttagttgttgtcgttgttactattcttattaatattgttactaacctattaacttgtgaatatataggctggggtgggagggtggagaataagtgggaagggaaaaaggggatttaacaaaaaaagggaagatgtttcaaaaggaaaattttaagcaaaatatgaacctacctagtcaatgccacctaaatgtattcacaaacagagaagcaacatttgaaagtagtcagagagaaatggaaggaagcctgtcatgtatataagtatatacacttcccggtccatgattcctttcaccagcctgctctattccttacagctgggtcgtaaaatgaacaagcctgtgttcttgatcatgtgtgttcccagcgtcagtctcttgtgtctgtggggatgagtgggtgaggagcattctgtgaggctggtacaggcccattcctaggctttaatgctctgtttgcagtgagccctggaaaattacttagtggaaaggcaccagatgaaacatgtctcctgccccatagctaccattcaaaagggaaaataaccaaactggaaaaccttcttctatttctctattctgatagctagctgtactaaatgctatggccagtccctagaaactggtctttgttttgtttttgtttttgtttttgatttttctgttttgcagctgaattttggcttggaatcaccaactctgcctgtattgtgatccccaagactccagacctcagagtcacctgctggcttagaggagtggagtgctttctatgtaatgaaaaggtggcaattaatgaaaaaataaagaaaatgttccattaatacaatgtgtttttataaaagtaaatatgggagcagttgtcccagttttttttcggtatcagttcagctttggagaatggggtgtgagtggggtaggacagcctgaaactgttggaaacaatttccttgtgagaacttgctatcataagtcctttggaatggatattctttcagttgctcctatggagcccattaagggccaattctagggcatagttcatccctttctccaaagagaattgttattttaaagtacctttttaattggcctgcagtgtattatatgtttttaatatataaattagtgacgcataaccagtcactttgtactgaaacataaaaagaaacagagtttgagaaatgagcaataggccgaggcagaagatgtttattctcttaattgcatttaatattcctctcagtacattgtgttctgagatgttcatcatttagcattttgttggtcctgtctctgctctcacagttctttttcttcctgtcataaccagctgccttagtagagtataaaaatagtgttttgccctatcactggtatctcaagtcagaaatatatattatccttggtctgaaattcctgattaccgctcccttctaaccttccccctctgagaagctgtttcctattaatgcctccctaacagagtcccatttaatctttactttcctggaaatggtaacctcccttattcttcttacttaatctcagaccttggtcttagaatttttcttttatggtctcatatcccacctgcccaaattgtcagggctcaacaatcttaggctgctttcttctggaagttcagaaggaaaccttcccattcttaattgcctttaattgctttggctattttcaaatctaattttttaattaaattttttttaatttttatagagtaggggtacaaggacagttgtgttacatggatatattgcttagtgttgaaatctgggcttttagtgtacccatcaccgaaatagtgtacattgtacccaataggtggtatttcatccctcaaatataattttaaacacacactcgtgcccacatggacaaattatatcacatgactgaggaaacttagaaattccttttccctgaagatctgttaagaataggtctcatctcctgccctggttaggtgctatattatatggagaagggtattgagactttgggggtcatgtttgggctgtgataactggcttgaaccagtgaccatcctttctgcctcgccaaggtctcttataccagcttcttcacatatgctgcttcctcccagctttcccttctgacttcttgttactctgcaactatgtgtcaaggccttaccttttcctgatgttttcaaacctcctgcattactttgatcatcacttcttcagccatctcactgaagtccttggtgctagctgggcttttgtgacaactttcaccttctctgaactttttccttgctgggaagcatctgcgtgtgtgagggggctacggagggaagtgtgtgtgtgtgtaagagagaggcaaaaggatgcttcaaaagctataaacaactctagcaagcatcctaagtcctatgtgaggttttgcagttctagtgaatttctgttttagtaggtttcaattagcatttactgcctaaaggagaaaaaccatatccaaggaccttttagccatgcttgctattaccaagctggaccagtgtgatgtagatccaacatgtcttcagcttacagatgctctcagaacagttccaagaattgaagagagctaagtttttatgctgaagaggagaatggagcactagctagtcctaactattgctagaaatagaaatgt

SEQ ID NO: 137926 - DNA, 1640 bp, Homo sapiens
cactaggaacactaaaggggttccaagagggtgtcccaggaccattggacagtgtggaaaaaatcaagtgggactgcagtaccctttcacggcaggtccaaatggaggatggatttactttaaataatcaccagtttcagttccatatgttcaatgatgaggattctgtcagcctgctccaaaaaaacccttgcctgtcaacatttaatgatccatctggtcaaattagtaccaacaacaaagtgtcaaaatcaagaaagaaaagttcacccagcaagagtggggctatgaaccaaagctcttctcagaaaaacaccaggaaaaaatccctcaaaggtaacaacaaggggattgaaaaaccacctggcaaaaactcccgccaggtccctaagtccacaaagaaagggaaatacatggctgccatcaatggagagaaaatgcaaattggcattggccgtgggggaagccaaaccaacaccatatcctccactgggaagacattggctgaatgtatccaacatggtggccctatggcctctatgaagatgccaagtcaaaagggactttctggagattgggccttggggaaggagagcagcccaggctggagtgatatgagcatgggcaccaacaccaacagccttctggatgatgaccaacgggaatttcaggagccttcctatatcttgtccaacattgcctctggtatggcagatgtgcagagattcatgatggcctccatagagcccctttgggaacccatggagcaccatggggatcccaacatattctactcccctgagtccaatagtctaaaattaaaaaccctcaaaatattggctgggacaccacaggagtctaagaaaaagatcaacagtgggtcccaaggagccactaagaatcacaggtcaatcaagggtgtgagcaaaagcaatgggaaaacagcaataggtgatcctggtcgtgcaaacatgcctggttataacgaggactctcgctctaccttctttgataaaaagtatagtaacatgagcactttaggcaataacggaccgacacacaaaaagttgtatcgtcacaaatccagctccaaggccctgagagatgagaaatgtaagggaaagcacatggagcgagaacaggtccacaaggatgagtctgggacagcttcttttgaaaaactgaggtaatactgcaccagtatggctgagatgatgcacccttagctctcctactacctactaagcccgcagtccctcattttttccctcttgaaagcaaaaatttgcatgaaagaaactgtcccattcccttctttttcaaagtaaaaagaaaattttaaagtgcatgaaaatccctatacctttaagccacccaaaagattgggcaattttgttgtggcttggctagggataagctctaacaaagctatttcttcttctgctattcatcactagttactacatattaagaaaatagaattaaaatatgctcttgaatgatttttggaagtgaaaggctttgcagtaagacagattttgaaaaatagaatttaaaagtcatgtagacaaaaagccaagatcatttaaacaaaagagcattagctggaaaacaaaatctgaacatgtggcaaataggag

SEQ ID NO: 137927 - DNA, 1004 bp, Homo sapiens
caaaaggcctgaacacatggtcacttcccaatgaatgtgagaaagctccatttgccataatggagcctgcaggcatgtcagctctgaatggggactgtctcatgcagccaagtcggacttgcttaggctgcttcatggaatccaaggatgcagtagatcctgagccagggatcagtctgaaagttggtgatctaaatagggattatgaaacgtgtgcagtctctgatatagggattcagtgtattaatgctggagaaaatatgaaatatggagagcagctgctctcagaccagctcctaggcttccccctgcataagtcaagggcaggagacagacgagaaactgagaaacctgacattgacttggaggatccggctcagaaaagctattatgaggcattactgttagacaagtgcaatacagaagaagctttgcttgcaaattccaatcaggattggggttacttcgagacttttattagtgaaagtaagattgaactgcttgacctctgttccaaaaatgagctgtctgtcaacctattctctgaagaagatgtggataactacatgtttgatgatgatgaatcaacactaggcagtgatgtctgctccctgaaaattcgatatgaatcctttcaggacaatgttcgagacaagactactcttttgatgcaggaagatgcccaattcaacttttttcccagcgtctttactacctgccccaagcgagagtctaagagtggggccctgaagcagagcagtgatttttcccaattcaaggtccctgatgtgagcatcatctggggggaggaagataaaaacttggacaagaagaaaggcaaagaggaaggacaggaagacaaaggtgtagagaagaaagatggaaaggataatggagaaaagcctgccttaaataaaccatgcagtgggactgaagtagagcaacttaagaatccaaagcagggccatcttgctaattccctggagacatcagggagtttcagt

SEQ ID NO: 137928 - DNA, 1040 bp, Homo sapiens
ctttttttcttgctaaaaagtataattgtagcttgatttcccccaccccccagttatttccccaagaaataggggcctttttaaaaatttgaataagaagctggataagcatttgaaagacatgaggacagtggatacctgaagaggtaagaagttgaggactttaaagtaaaagccttaatgactaatatattttttcagaaggtcctgcttccaccatttctgcaaggaacagatgactctaaagatatcatatcaaggtctgctttctgcttgttgcataactggatggagtaataaccaagattgaaactgtcattggttaaaggagactaaatggagcaggtcatggaaattgaggtgtttctttctttccccaaggaggggctggagagaaaaagtagcagagacttttgtcatcagctttcaggggcagaaaacattggttcctctctcctctgacctgcctctccacctaaaaacctgaatggattctggattccacttcaggctgttttgagttttgatagaataagtttgttaagatgttggggaaaagcaaaatatggtcttccaggatagccctggtggggagaggtagaaaatggtgggataaaaagtaggattatactagggccatgtgaaaccatccacactgtagtggaggagcttgactgcatggcagaaggcaaggtttttcaatttatcctaaaccatatcccacaatgttccacggctctgtctccattcagcaaatatttgcagacactatataggctgtaggaactttatcattcccattgcttttggcaccacaaaatgtcttagagatcaacagaaaagatgaaggaaggacctgattgccccattcaggtagttctccccattcttgtagttctgcttagttgctttgagcactggtttctgtgtccccctccttgaattaccacaggatcctggggattccacttcacaatttaagagtatcctatcaggaattctttaaatggtactctgagtggtgaagagggagaagaaga

SEQ ID NO: 137929 - DNA, 1489 bp, Homo sapiens
tattggatataggtatatcttttttgtgtgtagcatgttattttatatatctgccttatgttttgtttttgttttatttaaatgttggacttaatgcagagtaatgtggaggctctaaattgtttgcttccttttgtttaattaaggctatgccatctacttattccacctccttaaagaatctcaattaactaaaatatttcttttccaagtgttttctcacctctcttctttaacctcacatcatccctaggaattttgtgcctgttattatgatttctgtttgacagagaagaaactaaggtataaagaaagtaaacagctaggccagtattctctgggataaaaagcagtcaatgttactcttagacttgtgctttttttcactacagcaggttttccaagttcagcaccaatcacattaggagaaaaggctgcagttgcactgatcttggaatcaaaagatttggtctgtgcccctggttctgcctctcttatgaccttggacaagcatttaaggtctctgagatcctacaaaattgggtaaatgccagcttttcttgaaactgtctctcaaacttttctactcttcagatatctttctctaatatcatcttctttcctctgattttcttgtacttagcttttctttcttctatttttcttcctgagactttctctgtctgttgcagccctgactatcttttctggcctgcccctcctcctattggtatcatgttatcctatgtaatatttatctgatcagtttcttgcattatctttggatgaagagaaagtaagcctcatttggcatctttataaaggatacagtaccttaattgattacttgtcagaaagaatataaaatattaaacacgatgaagattaaagattccaaataagttggtaaaaatctattttactttaaggaactaacaaagaagtttatttaaataaatttttttaatgaagaggccatcaagctagggaaactatgtgttaatttggtgttgggagagatatatgtatatgtgtgtatagtttcaattaagtttggatagtgtttgtatatgatatataaattgtgtgtaccaaatgagttattgctagtgattaacagtgaataaaataacttctaagatgtgttagttactatttactgaggctgaatgctagaaatactgatagcatgaaactctatttcctaattattctcagagtccaattctgccttctgtctaatcttcactaaatcacagcagcatatttttcagcaaattgtgaaactcaggtaacctggttagaggagaaaagattaattgaatcacataaatattctctttgaagctagacttttcttcctcttatgttcagatgggaataaatcatatccacccaccccaccttacttagagagttttctccatgcctggaaggcaagggcaaagaacacagagatttcctgtctacagtcacttaggagtttagc

SEQ ID NO: 137930 - DNA, 1162 bp, Homo sapiens
tagcaaagcagctcactgacagcagtgactggaatattgccaagctagtcccagagctcagcctactttgtttagaaattaagcaaatggaaagtttcctgaggttctcttacaatgcaagaatgtatggggtttcatttgtgaaccaacagggagttaaaaagcaggaagtcaattatatattaagtctcacattgttctgtaattgttttcatcaattatatttttagttgtatatttttggccaattcgcttgtgtcaattacatatacttccttatattgttgtcaaattgtttcatgtgcatcagtcatagcattcctatgtaaactggaaattccccagggatagggaccatgattctcttttgtttcccccaggaaatagcaagagacctggcacatgttttgagtgttgaactagaataaggtatttcagaatacttaagtctaggtctgtagtactattgtggatcccctaaaacactttagattccacaatagcactgtgaatgttgacttaaagcagtagcatgactttatattccttatagagttgtttccagggacactgttaatgtatacagtcattcaggatacaaactagaaagtagaaacatacacttatctttaaaatgagaggatctaactgattcatggcctgttcttggcttttccacttgtgtctaccaattaaactctttggactcaagagtttttctacctgcaaaatgggatagtaattcctacctcggcaacttgttgtgatgattaaatacaatatcatgtcaatatcctggcagtaccagttccttggagtgagaacaggtaacctgttgtccattttcttggaatgtgctacagggatgacaatgaatctttctgcaaatctattcagaaattctggttctgaggagtagtatccatgactgatatgataatactaaagttctgtcaagctctaaaattctgtgattataattttcattatcccttttcatgtgtattatatattgccatttagagtaaacaaaatgttttcccaaccccttatctcatttgaccctcacaactgaaagaaatgcatgaaaagctttagcttattcattgagtccttaatatatactacatgagtacatgtgttcaataaaaccactgagtat

SEQ ID NO: 137931 - DNA, 1551 bp, Homo sapiens
cagacctactgacactttgattttacagtctggcctctctaactatgagagaataaattactgttgttttatgccactgactttgttgtaatttattacagcagccatagaaaactaatacaattattaatgtgttttaaatccatggtgttttgagaatacaattcaaatacaggttcaatattaaccatctggcttccttgccagctagcttgaaattcatttgtttatcatggaggagtaggtcatttgtgttaattactagctcaactagtagttttgctaaaagtaattttcattttttaaataaacaaggacacattttttgaccaaggagaaaaatcaagcatagagaataatcataacctttgaatactattcaacaggagggatttttttgtctatgggaatacagaagaaaattggtaaacaagcagtctagaccagacataagctgtatgtcagtgattataaggcaagtaaataattgtgccttagaattgatcaattcagttagaagaagggggaggagtcagccaagcctctaactagatggtctgaccatttacttgactaaagagtcatttgatgagatgagtgagatgaatatttatgctcagcaagtgtctgacatagtatgtactcaaaatttaatttaatattattattattactatcattaattaactcacagccttgagttgacatggatactttttaaaaataatgaagaaggtgttaaagactgcatgctgccacttgaaaatgtccttgccaacaggcccttataattgaggtagagagacaacatatgtgggctgcgattacaaagtaataaatatttgctttaaaaaatcagtagttacatatgaaaattcatgctgtccctttccaaattggctactttaggaaacttacattattttcacaaaaccgatgttacttaaaagtgtttttgagatcatctccagaccctccagtatgttgcttagaacctactttgaaatgacagtcctttttcctttgagggtggagcagctatgtcatttggaactaagttcacattttctaggttaacgtctttaaagtagaatgcttatatgtatgcatgtacttgagtttgtcttcttttggggagaaactatatttattttgttatcaaggaatccacttctatgactcgtgaagcccaggctgagttaacagtgatgagttctagagggacctacttcccagtctgaattttctggtttcaattcatcttctctcttaacctgaactgaaaacccagacttatgaagcctcaatccttgccctcttattcctggaaaattgcaaagccaaatatgtaggaggctttttcagaagagaaaatgactttgtgttttcagaaaacaaacccttcactttgctttatgaggcagatagcagccccaaaccatgtacaggttgggtcctgcacagatcttaattggtttcttttctaaagatgaatttatgtcattacttaatgggcacaccccatatatcatcagcattaaaatgggacat

SEQ ID NO: 137932 - DNA, 1050 bp, Homo sapiens
ctgcgtcgctcacgctgggagctgtagaccggagctgttcctattcggccatcttggctccaccccaccacattttctttatccagtctatcattgatggatatttgggttggttccaagtctttgctattgtgaataggaattttcttagcaaatatgaaaatttgctgagagaggaagtgtgcaaaatggtttggcaggaaatcacacatggaagggcccaactgggtcactttgtgtttgaacactacatgggagactatgttgaaatcctagatttcaacaatcctagattagaccatcacggaaaagactcactactaggtggcagaggccctttcctgttgctcagagggacttctagtcgtgaaaacccataacctcctccttgactgtgtactagaagcactgctaagtgaaactggttaattctgcatctatttttgtaatgtggcaatttacatgctgattggagccaggctgtgggaatgtttttggtctaaggccatggttctcatggtggagaattttgccatttaggacatttggcaatgcctggagacatttttagtcacaagtgggttggggggtgctactggcttctaatgggtagaggacacagatgcttccaaacctcctaaaattcacagggcagctcttccctacaccacacatacaaaaagaagtacctgacccaagatgtcaacagtacctggattgagaaacactggtttaagtgaagaagcctgggtctcagagaattatttgtatttagtctctgcctttttcccctgtatttgctctgtgtgtgtgtgtgtgtgtgtgtgtgtgtgtgcatgtgtatgtgtgtgtgtgtgttggaatttatccatttaagtaaatgtaggaaagccctcagagtaccttaagagtatcactgtgctatgaagaaatgattgtgctttacagtgaacttgaggggagattcacttggggtaccaggctccccaaaggttgtaggtacagcacacatgcctgaaaacacagaaacatctgccaacactcacctgg

SEQ ID NO: 137933 - DNA, 1276 bp, Homo sapiens
ctctgtttaagtaataagtatatatgtatctataactcagtagtgaaacctttcagactgacaggagggcaaagcctctaagactatattagggtttacgggtataaaaatacgtgcctctcctgctttaccaggctgtggggagaatgaggaaaataatatctgtaaagtgacctgagcacccagaaagaaaaatttagatgttttattagacctacgcaagatctttggttagttccccagagccctgtaaagtcttggaagccctgtaacaaatttctcttttcccttgtcaggtttttgttttcccctggtgcccaggttaaagagaaattgatttctttccatcttgtgtttagcttttgtccctctgcattgaggctttgaattgagaatatttctttgggtctgtagggctgtccaatgatagttaggcttaaacattaaacaaccttacagaactaattaggctttattgcctgtggccaagtcaacgaattttgcttcatagaatttctgagagaaaaaaaaatacatatttaggacttggtaaaacttttcttaaaatgtctccttgtaaatgccagcgttgctgaccctgtgcaaatattttgtaatagcccggcttgagaacatcccccacatttctctgttgtattctttatgacttccctccaggttgagctgtgaaagggtgaggggaaaggagccatgtcggagaagtagaagagactgaatcaaatgtttagagaacatagcttgattaattcaaaactgaagccctggcctctctagtctcatgttccacagcaataatttctccttggccagaagcctaagcatctgtgtccaaatctcatactctttcctaaatggattcatcaagtcagaccttgagttgcttggttttttctgaaccaccccctaatttaagttaaacttaaaaatgggagccattaaatagcaaaacaaacaaatacaacaataataacaggacattatgtcctggccctcagaggtcaatttaatgtgattagcagcataaaacttcacaacgcctttcactggaagattaccagaagcaacatcattcagtatgttgccatgcactgccattctttcactttggcattatttattgattgtagcagaaacacaatatttgtacctcttaagcattttagtttcctttaggcttttctctagtaaatgtggaactgcatcattttgttaaactgttctgaagtctaaaaaaaaaaaaaaaccctcctgaata

SEQ ID NO: 137934 - DNA, 1046 bp, Homo sapiens
caggctggtcttgaactcctggactcaagtgatctgcctgccttagcctcccaaagttctgggatttcaagcgtgagccaccatagcctggctctttttatctcagttagtctggctaatggtttgtctattttgcttaatttttcaaaaagtcaactgttttggaaactggaactttttaattctccctcacccacaaaaggattattcattgtaaattgaattaacatactcttccctagatggggtatctcagttaatgggaaagccaggtcatgactccaggtccaaatggccctgtctgatcctggtggttgggcagctttgcataaatttaggatgctataatttctgcaaagcgtcttatgattccaatattagactttcagaaaaaccttccacatcatccatgcactgtgtgtacatgtgtgctgaatatttttaaaatcttacaacttgcctaaatagagtttttccatctccatcttgggtgcttaatcacctcatcttcttttatctcttctttctctcctatgtttgttgaggaaacaagattaaatataacaatttttacattgcacacaaaataaaatggcttgtttagctgtgactttaaggccacgcatgagacagtctgtacaggacttacctccctcatcagaggaaccctttgagtctttaaaaaaggtgaggatgaaaaacaagaaaactcttttagattttcagctctccatttgctctgcagcatgagaactaagaagcaggtggcaaagatagacagtaaactagaaggaaacaaaacaaggtcattttcctccttgtaccttagcttcttgaatgataatttaagataccttcaattttctgttatctgaagtagtctgctttatggattacttagactcttgtttcttcatcctttaactgtttggtgtcacttcttccaaagctttttaaaatatattttctgattctactggaagagcagtcatagggtgtaggcatgtaggaggaaacaaaattatagggacagaaatcagtctatt

SEQ ID NO: 137935 - DNA, 1031 bp, Homo sapiens
gtttccctgtgattctgaggcaacatttctatcactgctatcattggtgatgtggaattgcaaatatcattagccgtgatgtattgactactgccttaaaattatagtatggagttgttgattctgactaatgaattgaatgtactctgcaaaaagccagctgtccatctttgagtgagttgatttttaacccctatttggtagctttagcagttttctactatggttgctgtaacaaatttccaaaatcttagtggtttaaaacaacaaatttatatttctacagttttgaaggtcagagattgtctgaactaggcactgactaggctataatcaaggtgtaggcagggctatatttatttctggggtctctgggtggagactccattttcttgcttttctggcttctaggggctgctggaattttttagctcatggtccccttccatattcaagccagagatgggagattgtttcctcacactgcatcacttaaatcttgcttccatcattacatttccttttctgactctcactcttctacctccctcttctgtttataatgacccctctacttatatttggtctatctggatggataatctgggataatatttccatcccaagatttgttgattttcaaccataattctatctgcaattttaattcctcttgtgccatgtaacctaacatattcacaggttctaggagtaggatgtgaacatctttgaaggcctttattctgcctaccacagtgacttgacttttttgttgttactttttattttggaataattatagaatcactggaagttgcaaggacagagaggccctgtgtatccttctcccaatgccccaatggttacattttgcataatagttctgtgtagttctgtatcactttatcacatgtgtatatttgtgttttttatttatttttagttttgtagaaacatggttttactgtgttgcccaggctgatcttgaactcctggactcaagaaatcctcctgccttggcctcccaaatt

SEQ ID NO: 137936 - DNA, 1032 bp, Homo sapiens
attatggcagaagtggaagcaggcatgtcttacatggccagagcaggaggaagagaccaaaggaggtggtgctacacacttttaaacaaccagagctcatgagaactcactcactatcatgagaacagcaagggggaaatctgccccccatgacccaactacctcccaccaggcctgtcctccaacattggggattacaattcaacatgggatttgggcagggacacaaatccaaaccatatcaagtggtattcagattcatgaataaatgtttattgcttgttgtcttggtagtttagaatactgtagagcatgtgggttaatagaaccctaagactggaggggtccattaatgataattactgattcaattcagcaaacacttattgaacatctactctgtgctaagccctgagatattggggacagataaaagaataaaatgaatttttctgtctcatagggaattagctttgctcctggctgggtctttttaccatctgcatgaatttacccccctattttcctaattcaatgcattcttctattgtttctatgttctaccccttggtaaatgtcttagtctgtttcctgttgcttttaatggaatgcctgaaactgagtaatttataaagaaaaggaatttatttcttaaagttatggaggctgaaaagttcaaggtagaggggctgcatctggtgagggccttcttgctggtgaattctctgtagggtcctgaagcagtaccatggcatcacatggcaagggggctgaatgtgctagctcaggtctctctcttcctcttcttataaagctaccagtcccactcccgtgataacccatttatccattaacctattaatccattaatccatgaatggatcaatccattcaccttttaaaggctccacctctcaatactgccacatcagggattaaatttcaaaatgagttttggaggagacaaatcaaacctcagggagtttcttggcaaataggtatctctagctgggttgagacaagatttccagc

SEQ ID NO: 137937 - DNA, 1560 bp, Homo sapiens
atggaaaagattttgcttagccgcataaacaaacacataatactgaagtaaccatcagcaataattcattttgaggtgtgaatagtgttcaaagtaagttattttgtgatatgggaaacctttagtccaagaaggttaggaatgtttccaaggtgtggataattttcccactaagagatacaaagctatttttttttcgtatgattgtaagtggtccctacgccattgtcgtcattaaccattattttcaactaacaaaatcttaaattacttgaaaagcagttattgtagggtccataactaagtcttaaaggcatttcttttaaccacttcatattaaggtagttctatacagggaaataatagacaaattaagatgaaagaaaagcttcctaggatgattcattcagaggaaatgccaagaaaaagggcatttaattatagggtactaattttacattataatattatgtactcacacaaaaggataaagtgtataaatttctaaatcagtgttgcaacataatgttttttaatatattgagatgaatcaggtacagttttagaatatggaatctgaaaatggagcaagatgatagggttttattttttatgtctctttattttaaagattgaaaattttactttcttcctaagggacttccagtttacaaaaattaagttgaaaccaaggtaatttgggattgtaaaaactgggccagatgccttactgaaggttcttaacatagaaatatcttggtgagcagatgggctcatttggaaatttttaacagctcaagtctgagggtcacttttgaaaatcagaaagagaccttagcatttggacatgaacaagctcaagataagccttatgtttttcctctacagagatttgcaccttttataaaccttaagataaatattgtgtcattcctttggatgttgacaaagtagtttgtgaagatggctgtttttaaaaaagtttttgctttaaaggcaagatatttaaagattgtatgattccttatttctggatctctttgtccatactgccatcttgctcttatccttcctacttgctgaatgtgttgctgagtagcaacttttgccagtgtatattcacaattctcttaccttgtatctttagtactagatagtctgtcctggattaatagttgaaagcatttaaatatgtttgcaattgcagttttcttaaattgtaaacaaatccctttgaatatatagatttttaatgtaaattttatagtaaatgataataccaaatcaaatagattaaaactggtcagttaagacaaaataactcagtcagagaggcccttaacctcactgttattgtttatagcaatctatgtagataaacattactaaataacattatatttgtgacaagaaatgggtatcccattgaagcaactcttctctgcagtgtccagggaaaactgatattttgtcattcacatactgagaataaatacagataattaagagacactccgagggtatgaccttacagccttatgcagaaggtaaaaacttgga

SEQ ID NO: 137938 - DNA, 3115 bp, Homo sapiens
aattaattgtagatgagagtttggaatctataccaccaaatctttgcagtgttaagtttaataaccattgttaacaaaaatagccactggaagaagtaaacttttcattttcattaaatcttttttattttatgaaatcttttttatttcaaagtacacataaggatttaaggatattatttttaaatcttttaagtctctgtaaataacagtgcttttgatttgaatatttgctgattacagaaaatatcacctgtttacattttaaccttccctttcttcccttcaaaatgacaaatgaaacattacaattttatttcctttaaataaaatggtgtttatggtattagaaattttatagccttttgtttgttctggcactgggtagctcaacagggaggaaagcattcctacctaaatttttttcacttatactgtgtatgaggaattgggagaagtattttaatgaatgcaaatccttcaaactccttagttagaaagtatttggtattttcagttattatgctagttaaatgacctttctccgtgtttctcatgtgtttactttttagggtaaggtagccgaacgtggtacccaccatggtttgcttgctaaccctcatagtatctattcagaaatgtggcatacacagagcagccgtgtgcagaaccatgataaccccaaatgggaagcaaagaaagaaaatatatccaaagaggaggaaagaaagaaactacaagaagaaattgtcaatagtgtgaaaggctgtggaaactgttcgtgctaagtcacataagacattttctttttttgttgttttggactacatatttgcactgaagcagaattgttttattaaaaaaatcatacattcccattttctataatccttcttttagataagatttatttaaaaggggatttgagttttacatctttcatagtctatttaatgtggcatctgtatttatccccaaattattttcttgtcactgtcctggttgtgctcaatgcatactttttgctacctgtttgatattaccacattaccctcttgaggcctgacattcatttgatctatagccagatgaatcagattggtttcccaatttttatagtttttaaaacctttatgctgacaatttagagggaaagtgtctgtttcttaacatgaaagaaaaagaggatagtgtaggttcattgtttcttctccctccttcgtccaattgaaattgatgtgaaaatgaatttataaacttttaaaattagaatgtatcagaaatagacatgcatttatagtttgatgtcttacttgataggttacttacttttttcttttttgttttgttgttttttgttttttgttgttttttttttttgagacagattctcattctgtcacccaggctggagttcagtggcacatctcggctctctgcaacctctgtcttctgagttcaagcaattatcatgccttggcctcccaagtagctggaattacaggcgcatgacaccacacctggctaatttttctgtttttagtagagacagggttttgccatgttggccaggctggtcttgaactcctgacctcacatgatccgcccaccttggcctcccaaagttctgggattacaggtgtgagccatcatgcccagcctatacttagaatttttttttttttttttttgagacggagtctcgctctttctcccaggctggagtgcagtggcgcgatctcggctcactgcaagctccgcctcctgggttcacgccattctcctgcctcagcctcctgagtaggtgggactacaggcgcccgccaccatgcctggctaatttttttgtatttttagtagagatggggcttcaccgtgttagccaggatggtctcaatctcctgacctcgtgatctgcccgcctcggcctcccaaagtgctgggattacaggcttgagccaccgcacccggccgctagaatttttgaagtatttgcaactatgtactttttgaaggaaaaaaaccttcattctcatgtcgctatgtagaatattcttcatcattaagcagcaccataactatcatctagtgattagaattttatttttccataaaaatatgaggcactgtttttgttttggacaaaactacacatttttctttaaagatttacaaactcctatgtaatttgaaagttgctatactgggagtaatctgaaaagcttagaaagttcatttccttttatatttccatcttaaatgtgctgctttttctattcgaagtttacaaagaaacaagtaaatgggatgtcgtgcatgtatgcacatgctcacacgtgtataaatcagtgtccatttaaaaaatattaacatttaggtaaatagagtattacatattatactctttagatgatcaagactctaatctgtgttgacacttcagaatttattaaaagatcttcccttacttttcagtaatttaattagtttctttaagcctgacataacgaggaggagcccaaacaacataatcaagttttaccttgggaggaaaaaaagttttacctgctagaaagaattaataaaatattgctatacattcacttagaaagttcttctcttttccagtatgaacttgctttcatttgtttggtagtaatcattcaatttgaaaacatatgcacctcatgaatggccacataactatgtaataaggttttatttctcagaaaaggtcctaatattttattggtttatagttttaagaaatttttcatgataatttgatatgggagagattaattttagtattgttgacattggtgggtggatagctgaacttatctaacttaggtgtccactcttgctatataaaggtaatttgataagtaacatgaaaccagtatttcgtagtctttgctgccagagtaagtgatgcaagatcttgcttttaaagctagagttaatactgagatgcataatcaactgaaaagtggattagtttttttttttttttccttttcaacatttcttactctgaaaccatagttgttactgctcttctgggggtggggtgagtacttttaataaaccagttgcattactggaaatgtgg

SEQ ID NO: 137939 - DNA, 1085 bp, Homo sapiens
ccatgttgcccaggctggtcttaaactcctgagctcaggtgatccgcccaccttagactcccaaagtgcgctgggattacaggcgtgaaccatcacacctggtcacattttgaaaacctgtgtactaagagtttagagagaagcattctcatgtactgtctgtatattgagctatttaaagggactttttcactccactaacatttcttatagggtattcagtgttgtggtttgtatactattaccttcataagttgcttacatacttgtgaccctaggcctttctgttggtttgttcttaaatatttatattcattaccaaactgatttttccagtatggttgtaccagaatgtcttaaatgggaaattttgtaaataataccttattatatcattgatgttcaagaatcttaaataaaatctgctacttttttataagctttctgattctatgcagccaagtagtaatagccttttattacaaatagaagttgttaaaatacgttagcaggcatgtgattacctgcctcatgccatgtaattacctgcctcatgccatgtaattcacagtatctatacacttattttacaccattgccacttgggttttgggttataattggacctaatttattaatgatcatagcaactgtatctaaacaagaatctctttattattcataatttgatgattctatagttgtctgattatgaagataacagattttcattttctagtgaaactaatatgaccttagctttgactaataatctgtcacctcctgtgttctgtcagcaatttcttgtagtagtgttaatgttaagacggcatatctagggaacttctagttaaacatggaaggttggatacatttgtttatctcttcttcccctaaccatactaaaatgaaagtgaagaaataaaataagcataataagtatacagccgtaaggacaaagataataggagaaggagtaacagtggacaagagataccagcaaattgggggaaactggtaagtagacagattagcagagctaaaaagttgtgtgtcaaaagagagagacatcaatttaaaaaaaa

SEQ ID NO: 137940 - DNA, 1481 bp, Homo sapiens
gttatcattgtttccccttctgtccactgagtttgaactaaggaaaagcaaatgttcctatactctttgaatctccctatctctggattattttgaatttctctgtgtcctgtcacttaagtctctcctcattttagttttgttctcattggtaaacattatatgtggctatgttcctgatatcacaagagttgtttatttgtacttgtatagaaaatatctactttctcccagattttgtaacttggagaaatgttgcctaagaatttttttccacgataatgtgatcatagttgccttctctttttgctttctcctcttccttttagcagatattagattaggtctaatatttggtatcagtataaagttacatactaaaaaaaaactggcattttttatgttcctttaggaaatgtatgattattttaatttacatttgcctaatgtgtacttctttttattttctcctgttcttcatattaccaaacttgcagactattcttggtgccatgaaggatgtggtcaaacacagaacttctattttcattgcacacagattgtcaacagtggttgatgcagatgaaatcattgtcttggatcaggtaagacatttaactttaaagtttagtatttgaggaacactggaaattgttatagatacaagaagcttaaatattgtttcttacattatttggttgagactgaatcctgttacgattctgtttttagccccttttgattggaaataatgcatgtcacttccaagaaggaataaagtatattaactcactctttattaaagtattataagcaaaagtttaatcaggaaagcattaaatcttcacgatagaagcaggtttttcaatggtgcatatataaaataacttttctgccttcagttttgctctgaatagactctttgcttggtgtctttgctgtattatatgtttttgtttttctaatacctgcacatacccttgatggttaaaagaaaattaccataaaataaagtggtcattttcaaacatggtcatttttattttatgtttttccttttcgggaaagtaagaaaaaagatagcctgctttatctcttctaagggaattactatatgagtatactgtaaaagtctagacaaatcagagtaccactattgtgatgggtagatttgaaaattgcaataatttttcttttcttctttctgtaaggacctcttctccccacacccctctagtatttgattatttctaacattatgcagttttccaccctgcattcagccttttctgtaattatttttcccttctaataaatatatcttcaattctttatcattttggtttttttttttcctttttgaggcagggtcttactttgtcacccaggagtacagtggcgcgatctcggctcactgcagcctcgaactcctgggctcaagcaatcctcccacctcagccccccaagtagctgggactata

SEQ ID NO: 137941 - DNA, 1050 bp, Homo sapiens
atactggctgaatgctacttttttatcttaagagacgaattcagttattcatagtttaatgtcttcaagtttcaggtttcagatattgatttttttggcattgtcaattctgtcattgaaatttttctgagattgcagttcattgagaattatctgtaatataaagtaacatataatgagcatgcttctggtagaagaataatagtagaatcaaagttgttaccttactgcctcattctcattcttcccacctgctatgaagtcagaattcagtagtgcattcatgtttcagggaatataatttgtcaaaagatattgtatatgaacttcaactctacaactcagtaaaatgaactgtgatcaggagaataaggaaatgttcagtgtattacttggtggttgtaatcaatggaaacactaaaaacataaaatatgcatgcactatgcttccttaaagtaaaattttcctttaccaggaggagaaaagcaaagagtagcaattgcaagagccattttgaaggaccccccagtcatactctatgatgaagctacttcatcgttagattcgattactgaagaggtaagttatgattaaaatataaagctcttcaatgtttaacttttctacttggaagtttcagtaaaatggctgcattactttgtattttgaataaacttcaatagtaagtgctatagagcaaaatgcctatccccctttttccatatggcaagtgttgatggtaagaataccaggttgtattgaactagagataccacagtgttaagtccatttgcaaatgtgtctccttttggaactatgtgataccttatgctgttgttgtattgcccttgcatcttacaaagctgtaggaatcacctgatatgctgacaaaggaagaaagttttagtctctctcctattgccacttaacactcattaaaatagtcatggaagtgattgtgaaacctgtgacatggtacataccagaaagcctttcacttatcatggagcgactcatgagatgcaagtcaggcacacacaacctgcagt

SEQ ID NO: 137942 - DNA, 3327 bp, Homo sapiens
tatttccatttaacaaatagttactgaatgcctcttatgtgttctaagtgctttcacaggggagggtggtaaaaaaagattactttctgatccctgctatcccagaattttatactgtaccgagagaatttaagtatgcaggtgactaaataagaaggcataatgttgtgagggtagtgggaattgtcaattcagagtctcaggggaaggctttgtgaaggaagtgtcattgaagattttgttttaggtcgggttgcaattagataagcattcagtaaatattcgttgggtgaattttgtggacttttcaaatacaattcattatggaaaactgcagggatatcatagtccaatatattgagtcaatttttaaaatggaatctacagtacaaaattgtattcatacatgaagtctgatgaaaagtatactaatcacttaagagaataaattctaattatacttgcctatagttatttttatatattttgtagtattttaataatgaaagatatgaagcacagagatatgatggatttttgaagacgtatgagactgcttcattgaaaagtacctctactctggctatgctgaactttggtcaaagtgctattttcagtgtcggtttaacagctataatggtgctcgccagtcagggaattgtggcaggtaatgagtctgtggctatcacatttacaggctgttcaacttttataaataaagattaatgaaaggaatgtgcatgcttatcttaattataaaggatgttaaagtgctttcacatccttggagtacttttctctgtatcagaatgtatttacttgatggtttgataatggttttttaacttccttttgtttagcactgcctcactcactgattgggattactgtttggaactacctgttcttttaagaacaacttttttttttagtatctagcttttctaatttctcttgcagacctgtaaagcaatgtaattgatttagtgtttagttcaaagcactaaactgcactcttttttttaagaattaccaggaaccttttaatctttctcctcctttttttagttgcaaaacacttcaaaagtaaatgtctgtccctcctttctggaaaccctccccacccccactcagttagtattcattcattcactgtgacctaaatatgtggaaaatctgtggaaaacatatttaggtcacaacaacattttgttgttgttgttgttgtttcattttgtttccttcaacttgatgtacatcagaatggtttatcatccttaatcgtgatatctattttctccaatttttaatgtatactaatttttaaattcctgttttacactacaaagaaaccattgctagtgtcttagggaaaaaaacagaaaatttttagccttcaatttctatcctcacttaaaccattcttttttatatattatatatagtgtataggtgggtctttcccattcctaacgtatactaagttccctgtattacctaaatcgtggattaatgctttgaaattgagttgacataagagttgttgctgattaagaatattttgttccgtcgtaatagactataaacctatcgtaaattggaaaagtatgtaacatttatctaaaataccctttttttcttctgccttttaaggtacccttactgttggagatctagtaatggtgaatggactgctttttcagctttcattacccctgaactttctgggaactgtatatagagagactagacaagcactcatagatatgaacaccttgtttactctactcaaggtagacacccaaattaaagtaagtaatctatatagtaccttttcaaaagtatgtgaacatcatcctattagtaggattattctaggaatattcctacatcaccacattagcaaaccaatttattttacttgcaggaattgtcaggggtgggggtgctatcacctgtattaagaggttgttagagctttcacttctgtgtttaaaaacctggccacgcatggtggctcactcctgtaatcccagcattttgggaggctgaggcgggtggatcacctgagatcaagagttcgagaccagcctgaccaacatgaagaaaccctgtctctactaaaaatacaaaattagctgggcgtgatggcacatgcctgtaatcccagctactcgggaggctgagtcaggagaatcgcttgaacctgggaggtggaggttgtggtgagccgagatcctgccattgcactccagcctgagcaacaagggcgaactccgtctcaaaataaataaataaataaataaataaataaaatcttacaatgttaatgaagactattatactagaaagtaaattttgttaagttgaattatttgtacttacactgaatttacttatctaataatgacatggaatatatgattgcctctccttgcatcctcagcccctttcctcccctgcccattatcccttctccctccccaaccccacctcaaaaaaaagttgctcagaaaccaaaacattcagggtttgttttaccttagccatgaagcgtgagaaaacaaatctttaaatgcatgcttggaagtggtctaagtccacttataaacctccttcttttccattatatcctttttctttctgtgaattagaaaattgtcttcgtagctgtactctaggcagtgcgtaaagtggctttttttttctcttccctgctaggacaaagtgatggcatctccccttcagatcacaccacagacagctaccgtggcctttgataatgtgcattttgaatacattgagggccagaaagtccttagtggaatatcctttgaagtccctgcaggaaagaaagtggccattgtaggaggtagtgggtcagggtgggtaatttagttatttgtaaaattctgtattataggctgatgattcccaatgtaatatttctttctttatcaaaatgattactgtggtttaaaactggggtttcctaacattaataggagctaaataacctttcttcatctccaatttcaggaaaagcacaatagtgaggctattatttcgcttctatgagcctcaaaagggtagcatttatcttgctggtcaaaatatacaagatgtgagcctggaaagccttcggagggcagtgggagtggtacctcaggtatttaaaaacagaaaaaaacaaatttttggaggatttattgggttgatcaatccgtaactagaacagtttgaatcaagggatcaacatatgctactgaagtagtcagtattagaccctaccagtgaaattctggtatcaaaagggattttttaaaa

SEQ ID NO: 137943 - DNA, 2373 bp, Homo sapiens
gtatttggcaaggtagcccagaattcaatccgaagaatagccaaaaatgtctttctccatcttcacaacctggatctgggttttcacctgagcagacagacgggagctttatctaaggctattgacagaggaacaaggggtatcagttttgtcctgagtgctttggtatttaatcttcttcccatcatgtttgaagtgatgcttgtcagtggtgttttggtaagttaaacatttttcataacaagcttttatcttaaattctcattagtagcaattgaatatttgaagctgttgtactgttgcatgcccatgggcttgaaagcaaaattccatgatgccagaaatattatgcagtttaattattttgccacaagcttcaatggactgctcaaattctttatcgtgttgttattgtaaataactgttcaattctacacatagattagtcatcaactagtacttacaaggtttttttaaagcagagatttttgtatatgacattggactaatatgctcagaatatctaggtttctcatcaccattcataacattttaggcaatttcaccttttatttttttttctctgtttcaacttttagcttcagggggtacctgtgcaagtttgttacatgggtaaattatgtgtcactggggtgtggtgtacaaattatttcatcaccaggtagtgagcatagtacctaataggtagttttttgccttcactcatctgccaccctccaccctcaataggccccagtgtccattcccctcattgtgtctgtgtgtactcattgtttagctcccacttataagtgagaacatgtggtattttggttttctgttcctgagttaattcacttaagataatggtctccagatgcatccatgttgctgcaaaggacatgattttgtttttcatggctgcatagtattccatgatgtacatgggccacattttctttatttagtccaccattgattggcatccatgtgtttgctattgtgaatagtgctgcaatgaacatacgcatttgtatgtctttatggcagaatgatttatgttcttttgaatatatatacacccagtaatgggattgctggatcaaatggtaattctgttttaagttctttgagaaatctccaaactgcttacagtggctgaactaatttccattcccaccagcagtgtataagtgttcccttttctctgcaaccttgacaacatctgttattttttgactttttaataatagccattctgactcatctgagatgatatctcattgtggttttgatttgcatttctctaatgattagcaatttcaccttttatagttaaaaatatatgtatatattttttattcctctttaggctttttgtactatcttcctattagtatttgatggtactactgatgtagcaagtgcagtttgactttcttcccttgttgcctaaagtagattttctaaagtatttgatttttcacccatcattcacgtacataacttcacgccaccatatttttgttaaaatcttttgaccgagatttgctgttgtgtattacaaactgtttgggaagaacaataactgtttcacgtttcttctttggacttccttttctagtattacaaatgcggtgcccagtttgctttggtaacccttggaacacttggtacatacacagcattcacagttgcagtcacacggtggaggtaatttattccctagaagccacataaaatttagaaattgttttgcttttataacatgtatttcatgcctatgcaaatctttgtcttacagaactagatttagaatagaaatgaacaaagcagataatgatgcaggtaatgctgctatagactcactgctgaattatgaaactgtgaaggtaatatgtttaattatactttcctctgcctttcacactgcactaagatttgatctaccatttaatttaataggtactgtaaattagagcttcaggttaggatatgatctctaggcgtgatggaataatactattttattgtttgtctttagaaactatcctctttccttctcagtttttgtttggcactatcagatttttaccttctgaattaatttataagtgatcataaatacagtcatgcactgtataatgatgttttggcatctatgatgttggtcccataagataataatggaactgaaaagttcctgtcagcaagtgacattgtagccattgtaatgttgtagcacaattcattactctattactcatgtgtttctggtaatgctggtggaaacaaaccagctgcgcgacccatcatttaatatttgataatgataaactagtatgttaactagtatatgtatttttacacgtt

SEQ ID NO: 137944 - DNA, 1962 bp, Homo sapiens
tgagccgagatttccccactgcactccagcctgggtgacagagtgagactccatctcaaaaaaaaaaaaaaagcaaagaagaagcaagaacctaaggttatatggctacaggggaatcagatttgagaaatttatgctatttgagacctgccatatattctattagattttggaagtcagaaagcttaatgtttaagcactttatctcatgttacattcttaaaagcatcccaacatgtgctgtgtattttaatgatattgtcgaatactagaatgcctgcttggttggtaagactcttgtatacgttaccttggaatcttgataagagttacatagcttctatcagttatagctaaactttgcaaagatagatggcataataatggagcattaacaagatctgggatttcagtgtttttattaaggcttataaaattgttttcacatgttattaatgtgcatcaatttaatttcttcaaagaaactttgggagtctgacaaactttctgttcctaaatgatggttgatgttttggatactataactgcagaaaatatagaatgtgaatgatgaaacatttgccttgaatatatgaaaacatcatgcttctaattttctttttaagttttattttgatgtattctcatggagaaataggttcattattgaaagcttagttttgataataattgggctttgttttatgtggtattggggcaaagaagctttctgtaggacaaatggatttatcaatgttttttcaaatggtgaatcagccaacatatacttgtaattcatctgcttttgtgatctggcttgctgtgtaatttagtttaccattattttgatgaccaaattattttaaaaatatttattgaatgcctactgtataagagcattatattcagcatgggtgggacaaaaagtaaaatgacacagaccctcaaggatccagtaggaaagggaaatatatacacaaataactacagtgtaagacagtttgccatagtgtcatgagctttgtaggattttagataatggagacagcatttttgagtggcagatctgggatgatttcatggaagcagaagcatttgactaattcacatagcttataaatgaatattaacatggcagtgtgaagtatgaagcctgaaatgacagctctcccaatgtcaaagatgttgtctttatgaatggggaaaatcactctaataccagtaagtggtaaatatgtaaacattaccataagtactaatttaaggtaaatatttgtacttttataaataagtattttgtgtataatgggtaattgatgtttttatgtttttaggccatgaatattgtggttcccttcatgtttaaatatgctgtagacagcctcaaccagatgtcgggaaacatgctgaacctgagtgatgcaccaaatacagttgcaaccatggcaacagcagttctgattggctgtatgtgtgattctttaatctgtctacaggtgttgactttcttcaaggaggtttcatcatatttgagcagatgaccttttcactacaaacacaacttagcgttttggatgtttgttgttttatgtgagatgttttgtatgtgtttttaaaaactattctgtatgatacactttcaaaaaattccatgataacagtagcatttttacaagttctagaaaacaataatataaaataagacattaaattcataacaaccacttctaatagttaggctttttgtaacatccatttccacaaaggtcaattattttcttgctggcattgttagctattaaataggaaatagctaaataaaaatatatatgtacataaatgctttattaaaatatattcattagtaatgacacaaatctacaatttgaaaagaacagaatatgaatgctgtgtgtcccatgcattagaaaggacactatgagatttgggagacattagtag

SEQ ID NO: 137945 - DNA, 1059 bp, Homo sapiens
taattgagaacttatacacactactgttcttggcattgcagagtgttcagatatgaacaaagcaaatttctttcctcaaaccatatgggataaggcaagctttattttattgccctaataaaaggtaggtcataaatgatttaaagaagtgccagtcgggtgttgtggggtttcagaagaaagttaggaaccaccatcatggggagttaggaaaggtttcacagaggagatgacatctgagatagaccttgattgatgagtaggattattacaggtgtaggaataacatgaaaaatggcctagttgtgagagagcatagtatgtgtacagaagtgagtagtctatcctggttccagcgaggggaagatgtttcagagaattcggaaataagcttggaaagacagattagagctcgtaaatgtgaaatattgtgactgtgagacagaaaaatgtatttaattatgtgggaagtgggaacctgtattttgaatagatgagtaataaggttagaactgtgttttaggaaattaatctggccatgtgtaaaagatgaattcaagtggtgatagacctaaagtagggataccatttatttcacacattcattcagcaaatgtttactgaccagttataaggctcatatgatagtctagataagaagtaatagcaatttgtactgaaatagtagtagaaattgcaacatggaggaaaatacaagagatactgtgcagtaggggagatagagtcaacaatacttagcaatgggtcaactgttagaagttaaaaaaaaaaaaagtaggattccaggatgagagaataagaatgcctttaacaaaagtgggtataatcagaaggtcttgtttggggaaaatgaagatcttggttttggacatgttaagttttaggtactagcagaacacccagatagagatattcagctggtaatacaaaatgtgaaacaagctcaggaaggagcccaggtctagagagattgagatgacagttgaaacaatgcaaattagtgagttcaccaaggaaaagaacacaaatagaaggaaa

SEQ ID NO: 137946 - DNA, 1086 bp, Homo sapiens
acgttattgaattatggttatgtttgaaatgacatgttattcactgctttgttttctctctttcaatagttaaaagatgttgatactcggaaaatcataaaagcaatgctttcttatgtgtggcccaaagacaggccagatctacgagctagagttgccatttcgctgggatttttgggtggtgcaaaggtaagaaattatgcattgtttggttgctctaactaagaaatactacattttctagttatgaatcctgggcctggtgtaaatcacttttggggtagcatgaccaacttttaggaccctcatttagtttacataattattttatgcagtcattagaaattatatggtaatgtcctgtttatctctggatcagacttctcacagaattagtggaattcactccttgaaaccgttgtgagatataggagcattgattgtaacaaagcataagcacctttgtaaaagaagcttttcggagcctctttggctccgaaataatacatatttttggtaagcttggttcccagatcccagtaaattgaaaagaggatgaagccattttaggaacactgatagccataagtaataagcaacagcttaatatcaagagaaaagctaaaaaaacaaaacaaaacaaaagccacaaaacctgactgttttggtacgttcagtataggagccctctgcatttcagcagccttctcagtttgtcattgtactatataaggcaaagttataatgatgacctcgagttttcaagaaaataaaaaccttgtttcaaatttactcagatttttttttcttttttttttttttgatacagagtctcactctgttgcccagactggagtacagtggcacaatcttggctcactgcaatctctgcctcccgggttcaagcaattctcctgcctcagcctcccgagtagctgggattataggcgtgcgccaccatgcccagctaatttttgtatttttagtagagatggggtttcaccatgttgaccaggctggtctctaactcctgaccccaggtgatccacccgcctcgacctcccaaagtgctgggattacaggcat

SEQ ID NO: 137947 - DNA, 1155 bp, Homo sapiens
gtgactataattagcaataacgtgtatttcaaagtacctggaagagagaacttgaaatgttcccaacccatagaaatgataaatactcaaggagatagataccccaaatactccgatttgatcattacatattctgtacattcaacaaaatctcacgtgtaccccataaatatgtaaaatattatgaatcaataaaaactgtgcctcggactctgaaatgcctctttggtttggtctccagttaaaaaaatgcattatttttcaaactttatagtttatcaaaactaatggaattcatgtactttacagcttaatggactcataatgcatgattacataacttcagaacccattttgttaaatgaagtggtgacattttatgcactattaagccaactagaataattttcttgctcttagccataacttcactgtgtccttattgaaaaaattctgggatgtgttgtagaaggttttgatagaagagagtgtttctaaagatacgtgaaagcagggcctttttccattattccatcaagaaaagtaagacagacaaaactcatgaaatgagaaagtggttgaaatgccctagtttgtgttataatgctttaaattatatttatttcataatagttctattgggaaagggaattttaaaattactgccttaaaaggtcttaccagttataagagcatgcatatgtgtgtgtataaaataaaacattaagaactatactttcagcatttcatatttttgtcatcttatgtatttaaagcagttcaggaagataactcttgtgtttttacaatatgaacaattttatttctaatactctttatgcgataaactgcctaaaagactagaaaagtagtttgctgagtcctagagggataactataatatgaaactaacctgtattatataaggtactgtcctgggccttgacagtaccttatataatacaggttagttttatattatatgttgacaatttccccccgttccttgctttgcaaatctactcgaaattatataacttccctccctaacccctgctgaatatatgtgaattataaaaagtagaagctagccaacaacaacaacaaaaggccataaaaaagtatcaatgattccacccactcacagctactgtt

SEQ ID NO: 137948 - DNA, 1194 bp, Homo sapiens
aaattgtaaagcctttcctgacaactcatacatattttcttctcttatcccaaattcactatatgtatctctccaacaacacaataaaaattttccagttatactctggattttttagacatcgactgaactcgctagtttttgaccttctttttataaatccattgttatctttaatagtactgaagtggtttcttccttttattgcagttgttgggttgaggagacagttcttttctctggatagtttgcttatccctgaaattatggacacttccaaattttcttctagattggttctttagggagaaaaccttcagcctatagctcatatttttacaaaacagcattccaatttttttttatgttttttagttcctcactacaagttttgtccccaagtagtttctttcaaaatcagtcccttgattctatgaggtattacatttcttgcttttagaatttaggaatgtctgtaaaaccagaattcttagagaaattcctcatcggctaaggaaaaggtgattcttctacctttatcaaaagatcattttttttttcttactcttcattttcttatcaagggccactgggcttcactcccttgaaaagaacaagcaacggatagaaaaataggctcttgcttcagtgcttgacctttcctggcgagaaatagaaacttacttacctgagaaacagaatgtgtattcaatttattaatatacagttatctttaatatctgaaaattctaccaaatgagctgctccagctgttttggttttttattctcaggtcttgtctacatcgttattaggtatagctgttcacttgtagtacatttggccatgaggcagtgcttctcttcctcaaatcacactgtcaaattgagcactgtcaattcatgagaagtataatttgtggctttccagttacaccctactgagtttggtacttccagttttatttgtgtacttatttatttatgtatttgtttttgacccaccatactgtgattgtgctatttcattgtatagatgttcttttcattatttcttacctgtccagcctcatgaagcttatgaagctgtatgttaataccaaataagtaaatatttaaaaatctgtcagaagttgtggtgatttaattattaggtattgcctctaggatattaataagaatttcccatcatgtg

SEQ ID NO: 137949 - DNA, 1026 bp, Homo sapiens
gattggcaggaaacagttttcagtgcttttttccattctttgattcctagtacagttctttcaaggaactcaaaacacttcacattcatgtttctgtcccatttttgtacattatccttcatagctgatttttaaaactgcaaagtatcataaaataaattttaaaatattaacccaaatagtgagatttgtttgtctttgcattagtctttggtatgatatttgccagttttcaggatcatctgtcaccaaggcctcttaaggatagttgctaataatctaaacacaaccaaaaacatgttgacttaataaaggagaagcagctacttcttttaggctcaagcagtataaacttcaagacagtttctttctgctccagtaaaataaagcaacactcatcgtaatactttatagttagtctgtagccctttgtttgttttcccttgccatctttgtattagtttagcctttttatcgaattggaatcatagaatcatatagattggagaccatgtcagaaaatagtgtggagttgtagttaagagcttgagctctggagccagactgcctggatttgaattgtggctccatcacttgctagtagaatgaccttgagctagttacttaatctctgtgtacttcagtttcttcatctgtaaaatggagatgataattttgaaggggatttaaatgagttaactcctcacaccatgttaaagctcttaaatagtgcttgacacatagtaagtgctcaataaattttagctgctgttgttataatgtgagattgtaaggcctgtcctctaccataatccatttatttaaaaagtatatattgaataccttctttgtgctaaactctgtgttaagtactggagatatgcaagacaaaatctctgctgtctagaaacttaacaacatggcagaatatgtaaactgccatgtagaagttttatcactgtgacaaataatagattttaccttataaccaactgaaatctgtagtgctttactttttgtgtgctt

SEQ ID NO: 137950 - DNA, 2722 bp, Homo sapiens
catggaattttttaagtgtagttgaaaagaaaagtgggtacttttagaaaaaaaactgacaggttttcagggctcatgtagacctgaagaaaaatgagagggagcaaaattaaggcattttttgtgtgtgtatctttttggggggggattgggtagagtggctttaccatattttttgaaaaagtccctttttttcatttgaggagctaattcaattggtttgggcaaaagcagcattatcagaaatacacagttggattctgtatcatgcctctgtttagtaagaccacggggagataatggaataggaattagaaacctcaggcttgagtgcccgtagcagtattaaactaagaatttaaaaacaggcagaacaaaaagaaatcagtgaacacctgaaaagggagacacaaaaatggagtagcaaggagataaagagaagacatccatgctgaggggagcagtagattgctatcagaaattgtcccaaataactgtgtttccctacctctgaagtagaaattagcttttagcatgctagaaagagactagatatagataggccaaaaggaatttaaaatttacaaagccaaatacctttttcaaagtaccttttctatctagtttgttaagcaggaattcattagatatcatttgtcagccctagagttgggtttgtgttatatcaatgttctcttagcctacactttctgttataagcagattatgtctgatatatcctacttatggacggcttgtatcagactttgctggaatgcttataaagaaaaccagggggtttgggatatgacctgcatattgagccatacagaatggtccaagtaaatgaaaatgctatcttatatgagtttcaaataattttcgaggtaatttaatcaccagtggcaatctgacacatgcataaaaagtaacaaacgtaaaggagcattatagaaaaacataatgaaattgtccagctatggaatcgaaagttaagaaatgtgcttgagggttctcttccaagtccccattagtaaatataagagcaagcaatttcggtattaaattactgaaagttgaaactgtaaagaagcagaaaatattccaattctactttctcaacttcttttattacattatctcatcattccagctgttgtgtggaatgtgtgataatttctccattctgtccacaaacacaatagggttaggaatattagaagtactcagagattcgtaccaattttctaaagatcttgggttctaataagccagctcaatgaaattattgtgtctaaaatgtgtctttggtatattcactcttaatatgataaagaaattcctctttgtacattcgtccccaaatttcatgatttaaaaggaattggttctggagttttttcttaacttttaatattcagccattggttttaattgccctgattttggcaaatgctttgcaattctttgttactcttagtagcaagcagcttggaatctcacatcacttagctaaaacttatgaagcagtgtgcaattttcttgatgacaaaaatgttatgataaatgaacctatttgaatgggaacaatgaaacttcatagaagttgcttaaacaaacataaaaaaacttttgtcaggaccttttcttctgtcttttaaataggccttgctgttggtgttacgtacccagagatgtgaacatttggtagataaaggaaaaactattagaggtagaggggaatcccatacatattttttgtttgtgtgttgcttttttgtggtggtgctggtggagattttttggtcgttgtactttcttttgttttactctgtcattctcaaaatccttggaggttgaggggtgttagaaattatttagagcaggggtcagcaatcaatggctcttgggccaaatccagcatgccacctatttttgcaaggctcctgtgctaagaatacttgaaaacattttttaatggttggaaaaacaatcaagaagaatattttgtgatagatgacaattacatgaaattcagatttcattgttcatacataaagttttattggagcacagccacacttgttcacttgcttatcatgtatggttgctttcatgctacaatgacagagttgaattgttgtgacagaaacgatatgcctgtaaaccctaaaatatttactgtctggaaaagcgagctcaagaaaacaatctcatttaccatagcatcaaaaagaataaaatacttaggaataaatttaaccaaggaggtgaaagatctatatactcaaaactatgaagcactgatgaaaaaaattgaagaggacacaaataaatggaaagattttaatatctttggatttatggaaagatattttaatattataaaaatttccacactacccaacacaatccctataaaaatttcaacagcatttttcacagcaatagaaaaaagtcataacattaacatggaacaatcgaccccaaatagccaaagcaatcttgagagagaggaacaaagttggaggcatcacagttcctaatttcaaattacaaagctgtattaatcaaaacagtatggtactggcataaaaacagacacatagaccaatggaacagaatatagagcccagaaataaacccatccatatacattcaactaaacttctacaagggtgccaaaagtacaaaatgtggaaaagatagtcttttcaataaa

SEQ ID NO: 137951 - DNA, 1027 bp, Homo sapiens
tgtaaacctgtgccaagaatgccatcatgtttgaaacacaattaagttggatataaaactctaggctcaacattctttcctttcaatgctttgaaaatcctactccattttctttttgcatctagtattactcttaagaagtctgatgtccatctgatttctttttacttcatgttatttgtaatttttaaaataacttttctattttttctatgtccccatttgtctatgtgactcttagttatttgttttttttgagattcatttagaatatattattttacttacatgtttttaaattttactgtcaatatgtctaggaggtagttttttcttattctcttggcactctgtggactctttcagtatgaaatattttatctttaatttttgtacaatgaatctctttatttttgtaaatatttttatctccattttgattttttcttttcctttgcttcagtaaatagttgttaatatgtacacttttgtgttgctttatttatattattacttttcatacctaatatttccattctcttttcaaggtactgattctcccttgtatctcttttcccagggtctttcttcctaggctaagtttaactctttttgttgcttgcccatctgttatcccttgacccaggcatatgcctttatatgctttcaacagaggaccctatggaaagccacttcagccccaagagtgttctgataggtacaagataagcccctgagccagtccttcagggagctgccagacaagtcaaaaagtataaccataattcttcaaaaacaagtccatatttccttctctggtaccagcaagctataccaagaatgcaagctgccatccccattggggaatggaaggatggtatgtgagtgagcacaaatgtcataacactctcttctgatacttatttagcaacttcttttttcattatacactcccctggttgttgttagtttttcattagattccagagttctggaaaagttgattgagatctgacagtttttgcta

SEQ ID NO: 137952 - DNA, 1150 bp, Homo sapiens
tttgtagaaattttaactgcacactgtattttgggatgttcattagtcctctgattaagttttctttacaatatctagagagggatggatattaaagtagggaaaccgcatcctaagggtatagttccttaggtgctgatgttttgggagagcaacttttaaacttctgcttttcaaagcatattagaaaaagacaaggtgaagcttcgattttggtttacttataaaattgtttttactgatcttgagtaacttatactataatattgtaatatattcatatttttgagtgcatgaatgtttgctaagtatgaactctttcttcaactactctgactgtagtgacttaataactgtgcatgtacatgtgtgcttgcctgctacgtttgccataacaccacagattgggtggcttatacaacagaaatgtattttctcacagttctggaacccatgaagtccaagatgaaggtgtcagtagagttgatttcttctgaggtctctctccttggcatgtagatggccatcttatacctctgtcttcacactgtcttttccactgtttgtgtctgtgtcctgatatcctcttcttagaagtatactggtcatattggattaaggcccaccttaatgacctcattgaactttaattacctctttaagggccctgtttccaaatatagtcacattctgaagtattagaggttaggacttcaacatataaatttgtgggggtggggagtacacagttcagaccataacaatgtgtgtatgtgtttgtatgtgtgtgtatgtatatgcaaatacatagaaaattggaaagatatactccagtctggtaaaagtggttacctcgggggttgggggggggtttgggatgctaaaaaacaaacaaaaaaaatttaatttgctattatggatacacagacatagtttgatatactgtacttgtttttacaatgagaaaaatatttcatgtttaagcttttcaattgatgaactgacctttttgagtaggttatattatgttcatttatttgaagtccaatttgttttgtctgctagtagtaatgcattttatcatctctgtaacttttattttatttgtttattttttattttttatttttttgcgatggagttgtgctct

SEQ ID NO: 137953 - DNA, 1014 bp, Homo sapiens
cctcatctgtgctctcttgactcccttgtaggatttgccactagtgagtaaagatacttttcaagtctttatttaatgtcatttggtcttcacagtaatccggttaggtagatgaacatttctttgtagtagcaatggcctcttctgtccttttcagtcccttaacttctgccctagttttagacccttattactttatgcatgggttttgtccctgctttcagggacttgccctttcaatccatcctatacagcacatctagattattcttcctaaggcatgacttttatcccatcacttccctgcataaacttcagtgggctttatatcttagccttaaaaatttccacctaactagattgctagccatattgtaaactgtttctctacaaataccctgtccctccagtcaccctatattgttccctgttccttggaccatgtgcttttttgtgtctgttcttttttttatgccacaccctatgtctgaaatgccctctctctaactggtgcctatttttcaaatgttagttcaaaggtcagtccgttccctgaaaccattccttataagctaataagactttgatttctccctcctctgaactcctacaacactttttcctacaagtagttatgtatcttgtggaggagataagattttatgtgcctaaaatgctaatatattccaatcatctttttgtttttatcttccacagagctaggcacggtatgttacatgtaataggtaatcagaaaatatatgtaaaatgaatgattaaactctataaccaaaccaaagcaaaaatctaacataataattaataatatttgctccactgctatacatttggaattgaaagctaactttcttcagggcaacctcataagtttgtccgttgcatttctgtcattaggcatatggtaccgtggtggagtagcatcactgattgttgtcagttttagttcaataaccaaagcacacttactttttatcctaaaatttttgagttact

SEQ ID NO: 137954 - DNA, 1147 bp, Homo sapiens
agtttaatctttccttaattcagaagggagtgaagataagaatatgcatagggaaaatggagagaggggagcgtgacattgagttggaggaggtaagagagtattatgagagacaagatggggttgacagatttagcagatacaatatttgggacacacgcacgaagagatgattcgttgtttatgtaaaattgaaacttaactaggtaggcatcctgtatttcatctggcaactccaggaaaagagaaaaatacagtgttactccaatattcccggttgtgtaaggaaaacaatcaaagctcggccctaaggaaaaacaaataaaagaggctgtgcgaatgcatccgaatcttcaaacagaatccatttccggtctggggccctgggaaaacaagaagaggagagacaattaaggtagccgaattcagtccgccagtgtcccataatcctcttctctcggttcctctttcctcgctcaagatggcgctgctcgcgatgcattcttggcgctgggcggccgcggcggctgctttcgaaaagcgccggcactccgcgattctgatccggcctttagtctctgttagcggctcaggtccgcagtggaggccacatcaactcggcgccttgggaaccgctcgagcctaccaggtgagatgccactgacatggaagaatagggtgaagggcaaggggacctgtagggaaaaggttgccctcctgacctcggggcagagagagcaccaagaagaaagtcatggctaactgggagcagcagtaagtgaaggaaattaacgtcagtaatttgaggaaagggcgaagaagaaaacctttgagttcagcaaagggaaacggggcaggaggttctgggcagaggacacctggagcgctggaggctctcggagtcatagtttttctctcatattaagagttggggtagacaccattcccagcctgcttgcctttctaaagacgaggaagactggattattttccccaattagtaatggaatttgggacagtttatctgtggttcagattttactcagttggaattagcaattcggagagcactgtaatgacagcaagctatctataaacaggtggcgccagttaactcccttgctgacaggcgtgcttcttgataggc

SEQ ID NO: 137955 - DNA, 1090 bp, Homo sapiens
ataaaaattctgagctagaatggggaaagatgtaagtaaagcagtctaagtaaaataaatatgcaaaatgaagggctaggtggagctattcttttaaaatcttaaaaataaaactcaggcatttaggaaagaaatctgtgtagatgactttttgttaagggcttgcttgtcaattcaagttaaaggttaacaaatactcttcagcatgcacgtgttgcctctaatgatggcccattgagaccatagttaagaattgctggcagcttatcttcatctctatgggaaagctgctggtgagcacaaatgggcaagtctgttttggcactgaaattacatgttaaaaaaggatagaaagtaaaaaagaaaactaaaaatgataagaattggagaaggtgctttgttctatcctttaatagaaagtagccaaagatccctgtttcagggatttgaaattatgatttggttcagtaaataacgtaaaactgttctattcaaagggtttactttatgaaacttggggactgagtttgtagcatcataattgacacaaattcaggatgagaccaagagttgagcatgtcttaataactatttcagccactttcttctgcttttaaggcagaatggaggctcataaagaagaacagaggctcataaagaagaatggaatgaggaagctttctgctgtggctcacagtggggtcccagtttgaattgatggggtatatagcattctcagagtgcagtgattctctttgaattcagtttgaggaatgtgtatgtgaatatcgtgttataataagtcctattcccattcaatgaagtctgcctctcccaattatccccacaggtttcttatgaagaattaagaaataactgaaaaatcatgactcatctcattatttccacagggaatctcaggcattatacagtgtgtctgaacaagggttgctttgtgcccatctactttaaaccgtagacactttataaaatatgtaggttactccagtgatgaaagataaattctttggttttatttcctaacagggtacaagtatgaaggagtgaaatttgagaagggaaattgtgg

SEQ ID NO: 137956 - DNA, 2836 bp, Homo sapiens
tacagttcttccatggcaaatgttgctttcaagttgttactgaaattctcatctatacttgtcagttaactgtcttgatacagtgtggattttgtttactcctgactagcagaagttataactaaagcccgttaaagctagaatttctatctccctctcccagcacagatgtgaaccagcaaatttagatggagaacagatatgcttgagattggtgcatcaaactagttgaaaagatgatgcctaccactataggagttaatgcttctaaattattgcttatgttagggcttcagtatttcatttgaggtgactttccaaaacagcagacaaatttatattcaagtgtagatataaaaccatattttaagcaaattatttttgtattaccagccatttagatttaacatgtctttgttcctcgattgatatttagttgactacatttggttcccacatgaagggcctagaatgagcagtaggaagtattcaatgaggtcatagtcgcccctgatatttgtcttctatccctctctagatttcaagaaaattatacctatgggttttgaagtttgggtctttttagcaaatgaggcattatttgtagggttaatcacttgcaggactctgagcgtgggacattttttaagtattctaaatttaacacaagattaacagactattgaaaacaacattgtttttaagtaatatgaacttcagagtagtataaactttgtatattccttgctgaagaacacaccctagcacaataaaaagaacagtccaatcgtatatgcagtggttctcaaaacttgaatgtgcatcagaatcacctagagggccacagattgctgtggcctaacaagttcccacgagatgctaacattgttttggagaccatattttgatttaagacatttcttttataatagaagcatttaatgttataagttttcctataaatattgatttagctgtacctcacaaattttgatatagaatgtttcattttcatttatattaaaataattgctcatttttcatttcttctttgacccagggttatttagaaacatgtcatttaatttccaaatatgggattttccagatttctttctgttattgctttctaatttaatcccactgtggtgagagaatatacttcttattatttgaatccttttaaatttatggagacttgttttatggcccagaatatagtctcttctggtaaatcttccatgggtgcttgaaaactatgttttatcctgccatttttggatagagtgttctatgtcaattaggttaagttggttgatagtgttgttcaagtctactttactgattttctcttttttcatctgctccttctgaggcaactttattgactttctgtctacttattctatcagttgttgggagagatcgatgaaatctctgactaaaatttatatttgtttgtttctcctttcagttttatcagtttttgctttatgtattttgaagctttgttgttaggagtgtaaacttttaggattgttatgttctcttgataagctgactcattatcatgaaatattcccttttatccctgttattcttctgaaatctactttgcctgatgttaatgtaaatattctggctttcttttgaataatactaacatggcatatctttgttcatccttttactttttttttttttgagatggagtctcattcactctgtcacccatgctggagtgcaatggcgtgatcttggctcactgcaacctctgcctcctgggttcaagtgatgctcctgtctcagcctcccaagtagctgggactacagacgtatactgctatgcctggataatttgtatattcttagtggagacggggtttcaccacattggccaggctggactcgaactcctgacatcaagtgatctgcccgcctcaacttttcaaagtgctggcattacaggtgtgagccaccatgcctggcctcatccttttacttttaacttatgtgtggggtttttttgagacagggtctcagtccatcaccccggccggaatgcaatggcatgatcatagctcactgtaaccttgaactcctaggttaaagtgatcctcctgccccagcctcccaagtagccaggactacaggcatgcgtcactacacctggctaatttttaatttttctgtagagatggggtcttgctatgttgcccaggctgatcttgaactcttggcatcaagggatcctcccactttagcctcccaaagccatgagatcacatgtttgagccatcacacccagccctatttgtgtttttatagattttttaaattaaacatttcaaaattttatttctagagacagagtcttgcaatattgcccatgttggacttcaactcctatttcctgagtagctgggatgacaagcatgtgccaccacacctgaattgtttttatatttaatctgggtttcttataggtaacctagagttgggccttgctttatttttccaatttgacagtctctgccttctaatcaggatgtttagaccatttttatttaatgtgattattgatatgattggtttaaaatctaccatcttgctatttgccttctatttgttcattattcactttttcctctttttctaccttcttttgcattattatttattattccattttatccatttggattatattagatgcaatactttcttcttttagtggttcctttagggtttatagtatataactttaatttatcacagcccacttcaagcgtaagataagaacttcatgtacttctattcccccactcgagtctgt

SEQ ID NO: 137957 - DNA, 1187 bp, Homo sapiens
cagccaagagatagcgattgcaagagagcaccagctgtggtggtagtggtgagatttgtgcttgctttacattacccaggggaggtactttggtgtctcaggcaatggtgggaccatagagctcccaaaagtttctgcgttttgtgttaagctggtggaggagcaaaagcaggtgtgggctacatcagactggtctgtgctctgtcttccacatgctgggcaagaagtggccctcacagactatgtagacaaattggtacactgtgggtaaaagttccaagtatgcaaaacaatcttattagttagaacattccaagacctcaatttccagtagctggacaaggaccattcatgacaatagacccttctgaaaatgtacaagtttgagcaactcagacctactgagtcaactgtttcctgtacagtctaccttcctggccctaggctcaggctctcttaaaggaaaactactgtattttataatagatatattaataatattagcatgagaatgtccaacatttggaggagctggtgcaagatatagacttgaagaaacaattaattcaccgataaagccattgtatacatcttcatattttcttcatatttttgtagtaatttgattgcttcttcccttggtctaatgatacttgtgctttatgataaacttacctatagttatttagcatattaattagctggtggttaactagatctagttcctcaagccaataatttttcactgatatcagatcctgaggaggctttaattaaatttcacaatacatataattaccattatttgtattatatgacttattaacataaggtaatagaaccctaccagcaatgctaatgttataccatatcgtgcaatggcagtagtacagttctgtttcattccacaagtcagtaagagttattataccttacccaacataattggctcttgaccacttagcagatgttcttagggacagatgtcatcacaagggaccaggatgcctttatttccaggttccaagtaagatggcaactgatggctttaacacagactgggtggctttaacagcagaaatttattttctcatagttctggaggctagaagtccaatattaaggtgttgacaggcttagtgtcttctgagatctctctttggcttgcaggtacccaccttcttggt

SEQ ID NO: 137958 - DNA, 1032 bp, Homo sapiens
gtagctgggactacaggcgcccgctaccacgcccggctaattttttgtatttttagtagagacggggtttcaccgtgttagccaggatggtctcgatctcctgacctcgtgatccgcccgcctcggcctcccaaagtgctgggattacaggcgtgagccaccgcgcccggcgggaaacagtaacatttttaacccactttccacttgattgtcatttcccctaaactttgaggccttctattttctacttacgcattttcaatctataaaaattatggttttgttgagggtaaaattaatttacctcttctatgtctaccttattagctgaataataaccaagaaacaacttcagacatgcatttctaccattgcttcactctgactatcttaacagaaccacctggtgcacctattactgaacattatttttaaatactttcatttgtcatgaacttataaggtttctactctttattcacctgtaagttttggacaacctcagttcagccaaagtaatcagaaaccagtttgcgtctatgtggctatttacaaggggtgtagacactacagtcccagtttctaaattgaaaactgtatataatatggagtctctctcgtgttgcacaatctacattttaattctacttcttcataataattgtcactgccataggctatcatctttgttaacactgttaacaagaaagatagggaagatagtagaaaaggagagaaagggagagtgcctgaactcatttgaggttgcctaaaacattattttggtaatgcactgcttttggaatctgaaaaaagctatggacactctccacataaaaatacaagcatgtgcaggcacacatacacaaacgcacatgtgcacacataattttacaatttcagagtgttttaaacgactctgaaattacataacttacttaacttagttgataatttctaccttacattgtgtcccatctttatagaatcatcaaatcaaataagtgcactcgaatgtgaccctgtgctaca

SEQ ID NO: 137959 - DNA, 1024 bp, Homo sapiens
ttactttcactctgctggcttaatcagtgaaggaacataaaaggaaagctggcagtgggtcttggtaatatatgaactatattagagtgccagaaaaggagacctcagaagttaagcataggttgccaatctgctacaattatttttcccaccaatctgctcaaaatgattgtatatagtattcttaaaaccatgtgtcttggtgcagaaatattgacaaatgctggccagctttatcttcctatatccttcattaaaagtatatgcatataattgttggttttttttcctaaattgtggctttgttaaacaatgttgacaaaccctaaagtttcagactactctaaggaagtttctatacatctaatttcataggggtatagtgatgtttgttcactcaggttgattggtatgcgtggtatgtagacttctctgtaacatctcaccttctgaacagccccttccatgtgttcggtatttctgtcttatgttcctacatgaatatgaattgggaaattagctgcaatggcttttagatagaaagctgaccagtctagtgacacttaatcacattcagtctctactcagcctcacacatcttttgcctttcactctgccattgtgatgaaaggaaaaagaaagaacttttcttatgtgcctaagggtgaagtgaactctggtttgctttttcttacactgaaggctatgtgtactattctccagatgcatgtcacctgaaaaaagatacatagaggggaacaacagacactgggacctatcagagggtgaagggtgggaggagggagagaaccagaaaaaataactaatgggtactaggcttaatacctgggtgatgaaataatctgtacaacgaactcccatgacacaagtttacctatataacaaacctacacatgtacctctgaatttaaaagttaaaataagtataaacaaaacacactaaaaaagaaacacagtagcccacttactcctaactcatacattaccctcagagaaatatttg

SEQ ID NO: 137960 - DNA, 1091 bp, Homo sapiens
gtttgcaaaatgaagatactcattgttaggatcctactgctgaagggtgctatgtcactttctagtgctcttatatgtctttaattataggactggaatgaaaagcttaaccatacagtatttctaagcaaaataatgtactccattcttttgtccatgctctcattgctgatttgttcttgcaggacttagagcactttgttaatgttcttccattcactccaacagcgtcctcagaaagagacagaataaaaaaattgttccccatggtacagctggaaaaattaaggggaaaagagattaagtggtccccaatggaacacagctgtcttatgcagggctcacagttaccatgttcagtacattgttaaagtaacttggcttcccaggactggaattatcatggagcagttagaattttgagagtaattacaacaggatcacattctgaaagagtcacattttgtcaaaaatctgaaaagtatgcaatttgtacaactcttactttctatgtgataagaatgcaatatgtgcctctttcccctactagccccatgtgacacatatttttcacactatgtggcatcaaccagtgccattacctcctgtggcaccatagagcccaatctcagggcagacattgccaaggtaaagaatgcactccatgtttataccaaattgcacaaagtatagacattgaggttaatggagatttaagcacaatcctagcaagtaagttttaagaatactgaatattatacattattgtaacatgaacctaaaattaatttaacagggcccaaattcataggaatgtaacagtcattgaaagcctattcttttcacctctcatcacacatatctacatacatgtatgcacatgtacacacacacacacacacacacacacacacatacacattttctccaaagcaggctgcctcttcagcaggagcaaatactttaatttaaaagaatgattatctgttttctccttttagaaaaagagtctaagaaacacagcatgtgaagaacattagatttatacattccagaatctctgctctcagagtagctaagagattcggtac

SEQ ID NO: 137961 - DNA, 1032 bp, Homo sapiens
agaacaggttttacattgttgttcaaattccaatttgaggaccttggtcacagtgtactgattcaccctcccaaattttagatacttgatatagcgatgattcaaagtctagcaaatatttaagttgctatttagaggaaaagcataattaaacaaaggcttcaggtttttagccctgattttcacactatagcagaattttgtatagatatgctgtacgtgttcacaaatgcacacgcacacaagcagcaaatgtagtttgattcccttcaacaccaaaaaggccctatatatgtgattaataatctttgtgggggaattaaagactctaaggaaattttctgaatttccttttacctgataagatgaatgaaaagatatattttacatttaggctttcatggattgggggaggggaaatgaagaaacaaaaaaaattggcttgaattaactgctaccaaattccaaattggatttcagtcagtaaattaaataacataaagtccagaaacatttacacagcaagtatttgatggaattctttcaaattttgaagctttcaatccaacacggtgacttattttgaagattacaatgatttccaacattgaactctgtaagcctcatgggaggcagagatggtgagtcctgggaatgaagagaagaaattcacagatgagctgaacaactgtaaatattcatgtggtaacacccacttgacaataatatgcaaccattaaaattacatttatgaagagtatagatcagcactgaaaaatgttaagtgaaaaaggcaggatataaaattatatatacaatgctatatttttgacccccaaaattacatttggaataagagactgaggaaatacactgaactattgaaagtggtggattcatgggtaatttgttttcatttctctaccttctacttgcattttccacattttctttagtaaatatataatttgatacttcaaaaatactatttttgaaatccacatggaaataacaagagctttgaaattgggc

SEQ ID NO: 137962 - DNA, 1047 bp, Homo sapiens
ctgtatctattttttaaaatgagaacacatggacacaggaaggggaacatcacactctggggcctgttgtggggtggggggaggggggagggatagcattgggagatatacctaatgctagatgacaagttagtgggtgcagcacaccagcatggcacatgtatacatatgtaactaacctgcacattgtgcacatgtaccctaaaacttaaagtataataataataaatttaaaaaaaaagtatttgcacccattttcttaaccaaatatgtatgtagcccctagttgctagggtggtagattagcacatttggcttagagaccagctacgaagtggaaaaccactaaaagcttcatgataacagagtctgaaaacaaagaacaaatgagaaacagtcagatgcagctagagtccaacagtgaaatcatttacttaatgggataaatgtgtgtctaaaaataatgtgcactaacatggtcccattccttacagtctttgaagtgattatggctcaccaattgacattttagctgaagtaaaactcagtttcttacactgcaggcttcagcatgaacactttcatttttgaaatgtttcaaaaccaaatcaatgtcattaccatctctttatgtgtcattactttcttcccagctctaaagatggtggtcattcggctgttgttgccgcttagattcaaataaagtgctgttaaatctgttcctatattctaaattcagcagtacaaaatacatactacccccgtggctgcttaattatttctgccaccatgtgtttcccctgtcttttaaaaagagagttctaattctttatatgcagtaacaagtttagtttgtgtgaagtgattaaactggtttttactaagcaatttagcaatacctaaaaatgagaggtctgtgctaccacagcaaaaagatataatagaaccaagtcacatacatggagaaatgtaaaatcatgactatgctgaaatttgtttctttattgctttcttcctcttttcttcaactctcctgccctgccttag

SEQ ID NO: 137963 - DNA, 1059 bp, Homo sapiens
ttttatttacatatgtgtacaaggtctggcaaaagtatagtgaaatatgttctttttaaatgtcatactagtggactccaggagatatcccttccccacaactccagtacaattactaagacatccatgatgaaggctgtccaaactgaacctgaatatcaaaagacagatgtggacagagctactagttatttagggattgcacaaaagcctatataacatgaatatctcacctcaaatggagacataaagccgtagagaaagaacatgaattcagtgaccagaatatagactataataaactgaagaaaaaaggagaagggtaaggcaataggaacctaaatagccaagaatatttaaattattaatcagtgcattgatccctagtaatatagaaaagatagtgtagaaaattatagtgatgtgtgttttccatttccctttcaacttgcttaatcagttcagatatttaataactttaagaataaggaattatataatagatgccataatcattaactcagggatacaagcaaaactttatgcagaagtaaaactttttcataaatttttctacaaatataaaatgcttcatcatctcttcctttgtccctttccacagcacaggattattattaagttacaataattttaaaatatattataaaatccacatactgagctactaccctgaatgtgaagaaaatctactatgtccaatcagcagggaaagtgtcggccttgatcttcactatagacctttcttggttcttaacacagtaggctactgtttaggaaccactttttacccttgtaacaaaataaacaatattacatttcacacattttgcctttagcccacctagtcagccaataatcaaatgtcacaatgccagccaggtgctatatgcttttttcattcttgaaagataatatttggatatgaattaatcatcagtaatgtgccaatattcacaagtaataccaagagtgaacataaccttgttctctttctattccctcattttttttctccacagtaggctagctcatgcctca

SEQ ID NO: 137964 - DNA, 1047 bp, Homo sapiens
tgcctgtttctgccaccataattcactgggttttatatttctgtaggggacaggggaggggtaacattttaaataaagaaaaaatataacaccaaaggtatggtagtgaattcctggagttacaaagctaatggtctcatattcattaactttagcaattgagcatagtaatgaaatacagcacaaacatttctccttttaacattacacaattcagttctgtttctagttggcttgatgtttgaaatattctagaatgttaaattcagcaattttccaaattttgtatatcagaccctgcgggccagtctgaaatcacctaactacaaaaagaacatgccacaactgtaccaaatgtagctgctaaaactgtaatacatttttagcaaccaggatccaggtttgcttggatgtgtcacgaaccagtccagagctattaggcaggccaggtgtttctgtgcctgtaaatgaaagaataaacaagtgagacatgaacttgttttatccagtttgttcttattaagggacttctatctctattgggcttttacacgacacataatgaagcagcagaactagcattattccattgcttagttcacttatgtatcagtgtgctctcaatcaagaggtcctgatgtcaaattagtttttctttttttttagggttaataactgcattggattttccaactacaaattcttccttcaattcttagcttactctgttctctactgcctgtacattgctacgacagtcttcagctatttcatcaaatactggagagtaagttaaaaatatcctgaagggtcccctagaacaaatgcacacccactccaacttgtgacattgttcaccctctatctttttacatttttaaatagctaatactgttgaagtaactggaagagaaggcactaaaaacaggttttccatattgaatactctgagatttcggaagctgttatttaaagattctagttaaacaagtttctgtcatacacgagaatcttgctaaggcctttgggtacctaatctcttgactc

SEQ ID NO: 137965 - DNA, 1021 bp, Homo sapiens
agggcacaccttaagagtggaaacagaaaatccctaaagctgccaaatatttctgtcttgacctgataccttccccataccttgaacgctactgcctgacttcttgaggagccaaaccatgagagaaactcagagtgcattaataaagggcttaagtaaccataggaaaacataagcctgtgccagaaatgctgccaccaggaaatttaaatctctgcaggacttatggtacttgattggctccatgctctgtgggctgatgccaagcccaagaaccaaggtaactaattcttagggaagtccaagtagacaccagaagaggaaaccaaaccctcatggtaaataaaaatcattaccagaatattgtttccttgacacagcctctgacagccatgagtggctctccacatctcttaaactgtgacaggtggcagtaacccaaaaaagctcagacaatggtcccaaaagtagcatccccttgggttttcatccattttctgagtgtgtcaagttcctactggacttaacttaaatctacaactagggaagagaatgagtgccatgagcaagagaacaagtaggaaggggtaaagcagggaaaagacatatggaggtacagctgagactaatgtcttgagcaaaaaatatttgtgttcccttctagtcctattcatgcttgaccacccttccaaattccaccccaatgaacttagagtctcaaaaaccgcataaaaaattccaggttcagacactgaagcaaggaaagggacagccacttatacaaaattataaagtaaactagcagcagtatcacagaagcctcctgacttccagagcaaagatctttttacaaacatcccagcaagtaatttcacttattcaagcttccatttcctcatctagaatgagggaataataatattacctaccccaagaatctgctgtaataaactaatgcctggaaaacacttagcgaagtccctgaccactgtaaaagctcaatctatattaaccattatta

SEQ ID NO: 137966 - DNA, 1073 bp, Homo sapiens
atctgccaaccttatcctggagtagcatgtatattggtgcactttccactagcagcaacactggcatacctgtctaatgctaaattcttgttatgtagcccaccatttgagaagaaaaatgcaatcacttgtcccagttgagcccattagattggtgatgacaagtgccttcaatcctagcacatccatattctctgccggaaaaagaagctgtgaggttatctactgagtcttttcacaaaaatgattatctttgtttattttcatcttacatgtcttgtattaatgagaatctgtgaaacttttcttgcatctttctctagcctgatcagcttgactcaaccctctcaatttttgccttcttatttatttatatccagagcaagtcctagtaggcaccaactactgtatcaaaaacaaagaggtcatttgacttataaatactttcttctccacccttttactacctgggaagtgtctcctattcagtttagcaatacgtgtatgtaaatagttttatatcacatcctggctttaaatcacttcaggtatgtttctttctcattttctgtcctttagctttgttattcaagacaagcctgatttatcagcctaatcagtcaaggtacagcttatctttgccttgccctccatcatcattaaactcgttctggaatttagctgcatgtctcctgattcacatgtggtgtagatttcactttgtattggaattaccttggaattttttttctgaaatatgtggctcatgaacttgaagtacttgagcatcttgcttttattctaaattcttcttttagtttgggcgatccatctcacaccttagctctgggcaagaactaatatgcatctctctacaacattccaaattactacccagtttgcaaaaagaataaaaaaggtgaactcagacaaaggttttctaagtgactcagcagcaatactttggggaggttttgttttggactgaatttttatattccatcaacatttatatgctaaaatctaattctcagtctaacggcatttgtaggtggagtctttgggaggtaaat

SEQ ID NO: 137967 - DNA, 1050 bp, Homo sapiens
tttcctcctttctaggtttccggggagttggtgtctgtggcacatgcgctttctctcccagcagagtcgtatggcaacgatgtgagtatgactcacccacagctcccacccactcagctagcctgggatctctgcaggacctgcctgccactaagttataacttcacgtcctgataatctactgcagaccctctccacttacaccagaaactgcaccttcgttcagttcgttttaatcttggtccacaaacgcaggactaacgcctgtggaagtggttccccaagttggccacgctttagaattactggggagcttttaaacatcccgctgcctagattgcagttcataccacctaaatcagaatgtctgggtaatgagagccaagaatcagtatttttaaagggtctctgagggattccattgtgcagcttatggtgtgtctggtttagaaaattactgagaaagtatatgaggtattttccaaaacaagacaagaggatgtgagaatagtaaaaacacccaaataagagtgtgatacatataatgagtgggtcaggccataagatccaaataatttagctgaaggagaaatccctaaggggccaaggcagtggaagacttgactgaggaaatggagctttacctgtatcctcaaagtgtaggtggacaaaggacatggattggcacgtgggaaaagtgcatggtctaaggcatggaggtaacaaatgcaaatggctttttctggagtcagtgaaatagctcggtctcgttggaatgggagattccagtggaacctccagtggggtgcttggtaagacttattataaccttgacctgtttcatgtgctaattcatttctaggtgttacagtatggggaattggctgtttggtaaacaaaaatgattatgacatgcttcagtcttaaaagtgaaaagtaattttcattttgattctttgttctcccaacaactcagtggaattgatgggtatattatttcagttttacaatgatttaactcaatcctgagaaggtgatttatctcctgct

SEQ ID NO: 137968 - DNA, 2440 bp, Homo sapiens
gcttatcactattctcagcaagttaaacagttgtgttttggagatcgtttttattaatgtaagttcttacccacagacaacagaggagcgaaggcaaatttgtttctacaatgagttctgctgctttgcccagcgttataatgctaactgacaaaagggcgtctggcccatacatagtaggcacttaataaatgtttgttgaatgaatgaacaatccacggagggcaatagccaggcagtactgtggttaagtaagccaactgccaaattggtggaagggattgtaataatatattatggccttaaactgtgtcatgatttcatctaggatgtagactgtcgacacttcctgaagagatcttctgccctgagaaccataaaggttttctggtggggatggggaagatagaagtatagtaaattacagactagcatctgtatgttgtcttactgtttcgcagctgatttcatcagttgacccacagttcctgaaactcaccaaagtagatgaccaaatttactctgagttccggaaaaattttgagacccttaggatagatgtgttggacccagaagaactcaagtcagaatcagccaaagaggtaaaaattctctttcttaaatattacttagcatttaaccaacaatttttgattgcgaatgtttttttacatttaagctctttttttgtttgagaaaaatatgtaaagaaccagaacttcttttctagttgtaatcaactaagttaggaaatgaatgtttttccagtttatggacttttcatgttgttgagtctatttttttctcctttttgtcttggacattttaaatctccacccatcagccctttcagaggaggatggatcagtttatttaggtagtatagccagaaggcttggatggggagtggcaaatagggtataggaaggtgttttgattctctggatttaagttcatgtgattacaggccatgggtaactggaaaacttttgtttttcattgcttatgtgattatcctatactttgataggaaactaacacatttacagttaggaaaaaaatgttttccttgagagtaaacccttggctaatgaagaatctaaagtttttgtttgtttgtttgttttgttttgttttttgttttttggttttttttttttgatacagggtctcactctgttgcccaggctggagtgcggtggtgccatctcagctcactgcaacctccgcctctcaagctcaaacagtcctcctgcttcagcctccctagtaggtgggactgcaggtgcatgctaccatgcccagctaatattttgtatttttggtagagacagggtttcaccatgttgaccaggctggtcttaaactcctgagctcaagcgatccgcccgcctcggtctttcaaagtgctgggattgcaggcgtgagccaccacacccagccaagaaactacacttttaactcctagcaggcagttagtgatctttgtctttggaaaactgtcactactgaatggacttctttattaaaatcatttgtgttttagtggggatagatgaccattttgggctgaactgaccaataacttcaaaacaaaacaattgacttaagaaataatattttaattctgcagtaaaggatttatatatttttcagagtaaaatattgttcatcttgggaaatggcagtctaaagacacaataggtagcacagaaacgcattgctagtttcactgtgaaaccaacaatcacctcaatcccagtctcactatgattattttccttactgggaaaatggaagtccctctcctggccttagtacgtcagcctcttgcatttgtcagctaaagcatcgtttttgcctttatagaagtggaggccattctgcttgaagtttaatgggattgttgaagacttcaactatggtactttgctgcgactagattgttctcagggctacactgaggaaaacaccatctttggtgagtttcttccctctggaattgtttctgtgtaaggagactgaacagtctggctttactgatgaatcagtgatgtgtatagttaggtcaccttatcttgtttcatctttaaagatcttgttgctatttttatgtaacttgaagatagttaagtattttcaatctcattaatatgagattggaattaaagatctctgaagtttatgactatactggaatggtttgcatgttatttcaattttgtcagtagatttccagcatatttagggaacaggccaggcacagtgtctcatgccttgtaataccagcactttgggaggctgacatgggaggatcacttgagctgaggattttgagaccagcctgggcaacatagggagaccccatctctacaaaaatgtttaaaaaattagccaggtatagtggtgagtgtttgtagttccagctattcaggagatt

SEQ ID NO: 137969 - DNA, 1051 bp, Homo sapiens
taaggtatacagggaacagcactctagaagctatgactcaattgagactacaagtaccacggtgctacttgcacagacccctttggttaaatgtaaattcttgtacaattgaaggatacgcagaaggacatctttctagtctaacagtcaggagctgctctggtcattcccttgtatgaactggtctaaagactgttagtggggtgttagttgatttttcctggtatactgtttcttggctgacactactggtcaagtaagaaatttgtaaataaatttcttttggttcttattatctatatctgtgactgactttaaaaaggtatttgacacttgaaatttttttcaaatatgtaatctcatcaccatgtcttatataagataatttactcctgtttcttactgcttctcactgtttcctgtagtgaagttctctaaacttgttaagttatacctggtgttgggattagaagtccttacataagaattgactcttaatctctgagtgactataactccctgatttctttgctatatatgacaaaatatttgataaatagcagcaacctgaacctgtcaaactagtgaatgcagcccagttcatattagaagagcaagagactggacatgcttcagtatttgcttttcttttggtagccagaatgttacctgaaagctagcaaaaaaaaaaaaaaaaaaaagggaaaaccagacagagtagctacccccttttttttttttttggagatggagtcttactctgactcccaggctggagtgtagtggcacaatcttggctcactgcaaccttggcctcctgggttcaagtgattctcctgcctcagcctcccaagtagctgggactacaggtgcgtgccaccatgcccagctaattttttgtatttttagtagagacggggattctgtgaagaaagtcaatggtagcttgatggggatagcattatatctataaattactttgggcagtatggccattttcactatattgatttttttctctccatgagcatggaatgtttttccatctgtt

SEQ ID NO: 137970 - DNA, 1661 bp, Homo sapiens
cctgcagctagcttggtatctgcccaaaaggtattccagttttgtgcttgaaaccaggtccctggtagcataggcaccatagggactctcctggtctgcaggttgcgaagaccatgtgaaaagcatagtatcttggcctgagtgtcctcagggcacagtccctcatggcttcccttggctaggggagggagttccccatccctttcccttcccaggtgaggcaacgccccaccttgcttcagtttgcccaccgtgggctgcacccactgtctaaccagtcccaatgagatgagctgggtacctcagttggaaatgcagaaatcacctgccttctgtgttgatctcgcttagagctgcagaccggagctgttcttatttggccatcttgccagccaccgtctaatggcttttcagagtacgtgcttcagttatctccacatgtatataaaagtttattcattacctcatagacacactgaacttgactgctgaaactggttagaagaaaccacaatgtttatagtacatacagtaaatacaaggctaaccacagcatgatgatgcaagaaaggatttaccaaagcagagaaggggaaaatgaggctttttttattccagtggacacagggaaaaaataaaattaaaactaattgacaagttatgccctaggcaagagctgaactgtagatgcatacatctagcagcaacaattgtgcacaaagcaaataggtttctccatgaattgtctttggcaaattcttagaaatatttaaaacatttgttacagtcttcgttttataaaaatgtcatttttaaaaggggtaagagaatgttaaatacttcatactagacagactttgttattaagaacttttactgtattaactttttctagttcatatcttattaaatattaacaaaagtgcattcatatacattgcctcaggctgaggaagaataaagattattggccacatacaattgtgcccctgatggccttttccaggtagctcaccagtaagaaaatgtgcttaatgacttctctctgattggttttagagaataagaaacatgcagttgaaagtcagagtactttaaagcaagaggcatctgtccaaagactggttgatgaaatctggggaaagggagggaaatacaaagaatactgtggctgccctataagggaacaggaattcaaggcagtatccaaagttagaggtaaaggagcgggcagaatggtgctctggtgcggtaagcaattcttaagatggacttaaggtaaccaccacttggcatacatgtcctttataattcccatctgtttcagtgtgggcatgacttgtgaatatgaagaaattttattcctgtgattaagttactgatcattttattttgagttaatcaaaggggagattatcctgagtggatcttgcctaatcaagtgagctcttagacaagtggccacagcagatgttctcatgttggccttgaggaagcaaacagccatgttgtgagaggagggtactttgtggtaaggacatgagagtggctttctaggacctgagattgttccctgtccgacagcaagaaaacaggatttcactcttaagttgcaagtaattgaattctgccaacaaccagtgagcttgtagaagacctca

SEQ ID NO: 137971 - DNA, 1989 bp, Homo sapiens
ctctttggtatttttgaatagttttagtagaattggtactagagcctgcatgtacatccggcaaaatttggctatgaatctgtttagtcctggtcttctttgttgaaaaattttactactgatttgatttaattgctcattattggtctgttcaggatttctgcttctagttttaattatctatttaaatttttgtgagtacatagtaggtgtatatatttgtgaagtaaattagatgttttggtacaggcacataatgcataataatcacattatagaaaatggagcatccattccctgaaatatatatcttttgtgttacaaacaatccaattataactctttttagttattctaaaatgtgcaattaaattattgtgttagactgttctcacatggttataaagaaatacctgagactgggtaatttataaagaaggttttgacagagctgacattgtctcctccacacgctgttacagcactttccagagccttctctctcctgtgcaaaatagcaactcttaaggaaaaactcattgtaccagttgcggaagaagaggcaacagtccaaaacaataagatcactgtagtgagtgttggacaagttggtatggcgtgtgctatcagcattctgggaaaatctctggctgatgaatttgcttttgtggatgttttggaagataagcttaaaggagaaatgatggatctgcagcatgggagcttatttctcaagaagcttaaaattgtggcagataaagattattctgtgactgccagttataagattgtagtggtaacttcaggagtccttcagcaagagggggagaggcgtctcaatttggtgcagaaaaaatgttaatgtcttcaaattcattattcctcaaattgtcaagcacacttctgattgcacataattgtggtttccaacctaggggacattcttacgtatgttacctggaaaataagtggattactcaaacaccatgtgattggaagtggatgtaatccggattctgctagatttcactgccttatggatgaaaaatttggcattcatcccagcagctgccatggaaggattttgggggaacatagtgactcaagtgtggctgtgtggattggcatgaatgtgacaggtttttctctccaggaattgaatccagaaataggaactgacaatgatagtgaaaattggaaagaagtgcataagatggtggttgaaaatgcctatgaagtcaacaagctaaatggatatacccactgggatattggattaagtgtggctgatctcattgaatccatgttgaaaaatctatccaggattcatctcgtgtcaacaatggtaaaggggatgtatggcatcgagaatgaagtcttcctgagccttccatatatcctcaatgcccggggattaaccagcgttatcaaccagaagctaaaggatgatgaggttgctcagttcaagaaaagtacagataccccgtgggacatccagaaggacctaaaagacctgtgactactgagctctaggctgtagaaatttaaaaactacaatgtgattaactctgagcctttagttttcatccatttactggatcccagtttgctttgatcttcttcaacgtgaatttgggctcacagaatcaaagactatgcttggtttaatgcttgcagtatgagttcttgaacaaataaaattaactattgtagtgtgtttctgaaaaaaaaaagggaaagcaagaaggtttaattggctcatgattctgcaggttgtacagaaagcatagcatcatctgcttctgaggaagcctcaggaagcttctcatcatggcagaaggcaaagggagagccgtaacatcacatggtgaaagcaggagcaagatactgagacgagaggtgctatacactttaaaatgactagctctcacaagaattcactcactattatgagagtaccaagggggaatactgctaaaccattcatga

SEQ ID NO: 137972 - DNA, 1325 bp, Homo sapiens
tcaggcctccacttaagcatgaacctcgagatgaataaaagaggttatagagatccttaaggaacaaagggggacccaaattggaagaactctgataaatgaacaattacagtacctgttagggttagtggacaatcttcagcaggcttctccttcagatgcagtcttaactttcaggcctgcctctaatttccacctgtggcagggttctgcccacatgaaaattcagtggtagatgaagtaggacttttccaacacaaagtagtttgagtgccagaaaatataaaatatcagaggtgcttcctggagccttggacccaatggactggtaaatatacacccataggtttttggtataagtggctagatctgttggacaggggtacgcaaatctccctaatcccagaaagtatccatgctttaaaggaacgccctcacgggatgactggctttggaggaggataataaattgggtaattacctgcttaactattaaaattggaatggacatcctcaggaagcaggtaacctcatggaaaaatgatttttgctattgatggacactgactgatagaattcagctaaccttgccctattggtattggtggtaaacatgccacagtactggataaggcaagacactgaagcatagaatccctcatagacaacttaactaaaaaaaggagtattaattcctactacctcacttgtcaagttttcatgatggcctgtgcttaaagtcactacatggtggtgggtaactgtagactatagagatttaacaaggctgtttcctttattagagtacttctaccagatattgtcaccttaatgaatgccattcaaaagaacacgtgtaaatagtttggagttatagacttgacttacatgttctatttagtaaaaatttcaaagagtcaaccacagcttctcttcaaatttgaaggtcaacagtacacattttcctaatttcttatggaaaactcaagtaacctaggaattgcgtgtaagctttgccaacagggcctaaatgcctgccccacacccctatcagaagcttagttttgccattatattaatggcaacttagtcgctgaacctggccaaaaatctgtctcacaggacatcacaaccctgaagaaatactgagaagacatgggcaattgttctgcaggatgtagaagactcttcccttgggtatccctgtccaacagatctagccacttataccaaaaacccatgggtgtacatttaccagtccattgggtccaaggctccagaaagcacctctgatattttatattttctggcactcaaactacttt

SEQ ID NO: 137973 - DNA, 1959 bp, Homo sapiens
ttaggccatttacattcaatgttagtattgagatgtgaagtactaatacattcatcgtgctgttggttgctgtataccttggggatttttaaattgtatttttataggtcctgtgagatttatgtgttaaagaggttctgttttaatttgtttccaggatttgtttcaagagttagagctccttttagcactacaagaactgcttattgactaatttcaattggtactttcaccatgtcctagatattgcaaggatcttagaacatttaaactacattttttccacatcttaatgctattgtatcttttatataaataagccaaagatgtcctctgtgttttgctcctgttgtgtacctcttcagagcaggtcaggttccattagctcaaaaccccattggtgaaaaaaatcaaagttttatatatccagttatttcaaatataactcaaataagcatatcttaaccatttagaggctagatgctttacaggccctatgaaactacaccaaacatctgctagtcataagtaagaaaaaccctagtgcaagaagactccaagccactgctgcccttcagagctctgtaacccagagatttcccatcacgtttctgagtaacatcacctagggacataagcagccttttaaattcccatcttccccaggacttcccttgccctttccccttctagttggttcccttcctcttccttcactgacagcctctagaacaggcttgtctaacctgtggcccatgggctgcctgcagcccaagatggctttgaatgaagcccaatacaaattcataaactttcttaaaacattatgagtttttttttagatcatcagctatcattaatgttagtgtattttatgtgtggcccaagacaattcttctgtttccaatgttgcccaaggaagtgaaaagattggacacccctgcttagaagatctcatggtataacaaacatttccttttacccctctaatctttgcacttcctgcataaaaacttggcaaagtttgcccaaataaagcttattatgtgctactaccatctcatgttcatttttttcttgatatctctaatattccctgaatctcactataagtgatggagagaaaaggggaggatttggtgatgaggttcagtcagtagaacaattatttggcaaaatgatcttggaaagacttaagtagttgggactgaaatttgagaattagttggatgtggtggctcatgcctgtagtcctcactacttgggaggctgaagcagaaggatcgcttgagcccaggagttggaagctgcaatgatccatgatcatgccactacataattcagcctgagcagcaaagtgacaccctgtttcaaaagaaaactcagaatgcctcaatattaatttgacatagcatcctcagtgctgtactgctttctatatttttatggtctttccattagcctagccaagttgtagcaccagaatatgtattaacccacactgttggaactgattttgggggatcagagacacgtagattcctgggaaggtcagcctgcctgtctgaatctcccactaggcaggcactggacattataaaacctgtaggcctaaataaaaaagggatggagtacacacctctgaataatgggctatgggtgaagaaactctctgcattagggatggtcatttgaggtactacaaggtgagaggagatccttattcctgtggacttctgtggtaggtaaacaagacaataagtctgagatgtaaggctgaggctagcctcctaagtgcaattgggaaaaaaaattttgtaaatagttagcttgcctctgctactgttgtacttggaccttctgtcccagatagcatcattctagtcctatatccccaagggatattgagcccccagtgctagggctcggccagctaaaatgttacttataataacaaaa

SEQ ID NO: 137974 - DNA, 1069 bp, Homo sapiens
agttggaatgattttctcatccttgtccttttggtaaatatctacccactcatctttttaaacatctcctcttttatgaagccttttctgcatctacaggtagaactgaccctgccatcccctgcattctttacaaacttctagaaaatttagctttactttttctctgactcccatttttacatcgggtgctccttgatgacaaagagattaactgtaacttcgggatagatgaccagtgtttgttgagtgaatgaataaagggatcagggttggatctgctcaaaagtgctagagtaatagagcaaaacagagcaggtaacacatcccttaacactcggtatctcaactgactttcacaaaagctctattaaatgagcaggtgattgtggagtgaaagaattaaacaaattttcaagagttttagtggctttcccactaaagcctgggtgactgggaaagtttgggctgggaatgttgggcttttcaagcgtgttcgaagctccctaattggtactaaatttcaggcattcagaccctctaggaaagagttctttctagctcacaacattaggggaggagttagacacataaatggagaaagtgatagaagagacatggtcagggatgggggttctacccttccagagacaatgcacattttctttgaaacagcttcgggaaaactgcaaatctcaatgatatttaccaattttgagaatctattaagtgcctggcactctgtgtagaagccctccaatcgtaccctaaatctgagaagtatttattattatttccatttttactccctaatgcatctactctaagctccttgcttcaccctaccaaagtttcccttctgctagtgctctcctttggtgcagaaccaccgcatccactttctcaggcccaggggaggggcggggcggggcgatttcgccttgccgcagagccagtctgcgcctgcgcggactgcggcagagggcggggtgtgagaagcagagtacagtgagactagcattcactgctggccagtgcctgcctttttcaccacctctaatttcagctt

SEQ ID NO: 137975 - DNA, 1106 bp, Homo sapiens
aatatgagtttgtatggggtcctagagcccgtttggaaacctctaagatgaaagccttgcgatatgtggccagaatccacagaaaggaaccacaggactggccacagcagtacagggaggcaatggaagatgaggccaatagagctgatgttgggcacaggcaaatctttgttcacaacttcaggtagaggaatgcatggcagtcagaggggccttgcaaggaggggcctttgagcctcagttctcatgtattggggggtgggggtgggtacatattgtatttggtatttgtgttccagttatatttatgtcttttcatatttagttctggtgtggtgtctggaaatgtttcaactgttttaatatattgtctgattgggtaaatgtgattgaccacttgctgtctctgttgtattttggtatgagttttgatagctctataaaatgttttggaaatctttccatcttgttgcattatctagaaaagaatatagcatatagctatagatataggcttttccttgaaagcttgaaaaaaattcgccagtaaaataatctagcttaaagtgataaactaacaaacaaatataacaacaactgaaaaggcactctaaattgtggctggcttccctttctgtctgctattgtatgaagaatactgatgtttacctgtatttgctttgctgtactaaaatgtaatgaaaaataaaagattaataaatgaaacataatgctaatacactgacttattcaactgctttcatacagtgagcacagtggtgtgccctagttatagaagtataaaagtttacaagatatagtacctgcccaagaattcagaggctggatagggtacagggggaggtcatttaaatcaccaatttattatggtgtactatgtgctacaatagaaaaatagagagtgctatggtagttaaaaagaggcacaactgaccaattcctggggtgttcagggtggtccttaaggaagctgttgggtatgtggggtggggacaagatggggtcttttttttttttttttttttgagacagagtctcgctctgttgcccaggctagagtgcagtggcatgatctcagctcactg

SEQ ID NO: 137976 - DNA, 3843 bp, Homo sapiens
tctgtggcatatattttacttagaaagcactgcagggttatgtggttttacaatatattagtacatttgagatattcctggtcagaattattcctactgcaagtgcctttccctttggtgtttgtcactaaaatgtttgtctgtcatcatgtgaaatattcaaaagaatgacaaagaaaggagtcttaacaaaaagtgttgtaactaatacttgagactaatcacagtacagaacacattactatggcaactaagctaaatgctgcttgcaatataatagtcaagacattaagagaatttagccctaaatgatcttactaactggtttctacagtaatggtcctgtgaatgccatcacattagtaatggtgttaacaataatgtgttttccttttggtatggtacccccttaacaaattgattttaagtcaaaacttgatacctcttttgagacaggtcatgcacttgtaatgactcccattttttctctatagttaatcagctgtgttcagcgaatacttatgaacagaaggctccagcagcagtacaatcagcagcaacagcaacaaatgacttatcaacaagcaacactgggtcacctcatgatgccaaagcccccaaatttgatcatgaatccttctaactaccagcagattgatatgagaggaatgtatcagccagtggctggtggtatgcagccaccaccattacagcgtgcaccacccccaatgagaagcaaaaatccaggaccttcccaagggaaatcaatgtgattttgcactaaaagcttaatggattgttaaaatcatagaaagatcttttatttttttaggaatcaatgacttaacagaactcaactgtataaatagtttggtccccttaaatgccaatcttccatattagttttactttttttttttttaaatagggcataccatttcttcctgacatttgtcagtgatgttgcctagaatcttcttacacacgctgagtacagaagatatttcaaattgttttcagtgaaaacaagtccttccataatagtaacaactccacagatttcctctctaaatttttatgcctgcttttagcaaccataaaattgtcataaaattaataaatttaggaaagaataaagatttatatattcattctttacatataaaaacacacagctgagttcttagagttgattcctcaagttatgaaatacttttgtacttaatccatttcttgattaaagtgattgaaatggttttaatgttcttttgactgaagtctgaaactgggctcctgctttattgtctctgtgactgaaagttagaaactgagggttatctttgacacagaattgtgtgcaatattcttaaatactactgctctaaaagttggagaagtcttgcagttatcttagcattgtataaacagccttaagtatagcctaagaagagaattcctttttcttctttagtccttctgccattttttattttcagttatatgtgctgaaataattactggtaaaatttcagggttgtggattatcttccacacatgaattttctctctcctggcacgaatataaagcacatctcttaactgcatggtgccagtgctaatgcttcatcctgttgctggcagtgggatgtggacttagaaaatcaagttctagcattttagtaggttaacactgaagttgtggttgttaggttcacaccctgttttataaacaacatcaaaatggcagaaccattgctgactttaggttcacatgaggaatgtacttttaacaattcccagtactatcagtattgtgaaataattcctctgaaagataagaatcactggcttctatgcgcttcttttctctcatcatcatgttcttttaccccagtttccttacatttttttaaattgtttcagagtttgttttttttttagtttagattgtgaggcaattattaaatcaaaattaattcatccaatacccctttactagaagttttactagaaaatgtattacattttattttttcttaatccagttctgcaaaaatgacctataaatttattcatgtacaattttggttacttgaattgttaaagaaaacattgtttttgactatgggagtcaactcaacatggcagaaccatttttgagatgatgatacaacaggtagtgaaacagcttaagaattccaaaaaaaaaaaaaaaaaaaaaaaaaagaaaactgggtttgggctttgctttaggtatcactggattagaatgagtttaacattagctaaaactgctttgagttgtttggatgattaagagattgccatttttatcttggaagaactagtggtaaaacatccaagagcactaggattgtgatacagaatttgtgaggtttggtggatccacgcccctctcccccactttcccatgatgaaatatcactaataaatcctgtatatttagatattatgctagccatgtaatcagatttatttaattgggtggggcaggtgtgtatttactttagaaaaaatgaaaaagacaagatttatgagaaatatttgaaggcagtacactctggccaactgttaccagttggtatttctacaagttcagaatattttaaacctgatttactagacctgggaattttcaacatggtctaattatttactcaaagacatagatgtgaaaattttaggcaaccttctaaatctttttcaccatggatgaaactataacttaaagaataatacttagaagggttaattggaaatcagagtttgaaataaaacttggaccactttgtatacactcttctcacttgacattttagctatataatatgtactttgagtataacatcaagctttaacaaatatttaaagacaaaaaaatcacgtcagtaaaatactaaaaggctcatttttatatttgttttagatgttttaaatagttgcaatggattaaaaatgatgatttaaaatgttgcttgtaatacagttttgcctgctaaattctccacattttgtaacctgttttatttctttgggtgtaaagcgtttttgcttagtattgtgatattgtatatgttttgtcccagttgtatagtaatgtttcagtccatcatccagctttggctgctgaaatcatacagctgtgaagacttgcctttgtttctgttagactgcttttcagttctgtattgagtatcttaagtactgtagaaaagatgtcacttcttcctttaaggctgttttgtaatatatataaggactggaattgtgtttttaaagaaaagcattcaagtatgacaatatactatctgtgttttcaccattcaaagtgctgtttagtagttgaaacttaaactatttaatgtcatttaataaagtgaccaaaatgtgttgtgctctttattgtattttcacagctttgaaaatctgtgcacatactgtttcatagaaaatgtatagcttttgttgtcctatataatggtggttcttttgcacatttagttatttaatattgagaggtcacgaagtttggttattgaatctgttatatactaaattctgtaaagggagatctctcatctcaaaaagaatttacataccaggaagtccatgtgtgtttgtgttagttttggatgtctttgtgtaatccagccccatttcctgtttcccaacagctgtaacactcattttaagtcaagcagggctaccaacccacacttgatagaaaagctgcttaccattcagaagcttccttattacctggcctccaaatgagctgaatattttgtagccttcccttagctatgttcattttccctccat

SEQ ID NO: 137977 - DNA, 1108 bp, Homo sapiens
aaatagcaccttcttcagttataaaatagttataataaattgctatcttactgtttgaaagtaagataaatatactcattaacttctattctagtgcattatagatgcacaattaaatatataatgcccaatattatgaaataaatgatttaaagctagaatcaattgtaaattaaataggaaagactgggtttttattataccaataatgacttaattgaatctgaaacacattataaaatgtgcttatggattcttctgcattattaaattattggtgtgataaaactcaaacttttttaatcttcctaacaagactctttgagcattgatatggtttactccactttattgatactgaattttgctgttctcttcaattatttaaagagttttaaaaccgactgctctaagttggcaaatggaaggattccctatactttaacactatgctgtctttctgccttatataacttatttcttgcattcttctaggacctcattaatcaaggaagagaaaaagttgtagaagcaacaaacagtgtgacagcagtgaggattcaacctcttgaggatataatttcagctgtagtaagctaattggcaattgtcttattccaacctccaatttgtaccctccaccccctactgccatttttttaaatttttaattgttccttcttataaattgatttgcaatagtaaaatactggtaaaatggatggataatgccaaaccgtaacccagcaattttacatagatgttggcacaagagagaaatgggtaaaatgtaagaattgagaaatcaaacatggaaatgtatgcattgtttatataaacattttaattaccagttgtacaaattaaatctaaattattgtttcattccagagatagccagcccaggtacagcagtgaacaacttagtaccctgttttgcatcatgtttttcttcagaaaagaataaaggaaaaggggggtttgaaaccttgggaaatcccgaatatcttaaaataccttaattatttttcctcaattgtacagtaataaggagtaaatagaaaatttttcttttagtggaaggagaacatgaatctctcagaggccc

SEQ ID NO: 137978 - DNA, 1324 bp, Homo sapiens
cccaatttttaagcttttaattttttaatcttaaaagactggcttaagataccatgatttctttaaactatatatactatgataataaattgaaaaatgtatatcaatttaaatttgacccatgggtctttacagtgtaatttaacatttacattcctgcagttggaatataagggctatatgtttcagttaaactctcctataactgtttagattaatttagattagttttttgttaatatagtggttggcagttgaaatgattgtgaaaataaagttgtttatgatgtataaataggagtagccttgatttctagcacaggcatccaatatagtcactaatttaagcagacttatgttagcatttatcaactcagaattaagcacaaaataaaatgcatataaaaaatgttaagttggtggaaagaccttgaaatctgaaaagtggtaattaaaaaacaatggaatgcctaaaccatactgtataaacatgaaagtcttacataagaggctggtgttacatgttttgctgctgttttttaggtaatctgtcatatatatcagaaatatatatagcaatcaggttttagtttctagtacagttgaccatagaactatggagatattatactgtccagaggggaaaaataattgtctcttatttcaacccctctaaacaggataccatacttgcagagctccttcagatacataaagaacacattgtaggataccatgaacatgattctcttttggaccacaaagaagaagaagagttgactgaagaagaaagaaaagcagcttgggctgagtatgaagcagagaagaaggtagttgatgcaaaatgtgtttttgtttttgttatgttagtgatttgaaagagcaatgaagaagaaaagggtcacatttgaaacaggtaataataatatagtgggttttaggaacacattccccaattacaagaatctctttatgggttggtttcagctacctttagtggtagagtaggaggagaagacagaagaaaacagtttacacttaaagagtagtaatcccatttctgcctagtatttgttgaattgagaaatgagtgggaagccatatatttagcatcactaacctcccatcagtaccctctctgtagtaacaaacatacaggagcttagtgtttggaggttgtagtaaatgtagctttgcatgtataccatgaaatctaaattttggctgaatatcagaacacaaaaatatttcattattagacattaatgccatttgctccagcagcaactttatttaagatcattctatgtctgttttaaacatc

SEQ ID NO: 137979 - DNA, 2115 bp, Homo sapiens
aagtgtctcctgaagatgaaaatggtaaaatagtgcgtggtattattttcaggcatagtataagcctgaactggcctttcacaagtttgtcttgagacttgtcattgtttcagtttttatgttttcttttattaaattaacatgcttgttttaaaaagttcaaaaagtacaaaagtacttttaggttcagtggctcatgcctgaaatcccagcactttgggaagccgaggcaggtggatcacttgaggtcaggagttcgagaccagcctggccagcttggtgaaactccatctctactaaaaatacagaaattagccatgcgtggtagcgagtacctgtagttccagctactcaggaggctgaggcaggagaatcgctggaacctgggaggtggaggttgcagtgagcactgtattccagcctgggcaatagtgagactctgtctctaaataaataaataaaagttaaaaagtgctaaaagtaagaaaatagacataagttccccctcccctggaatctttcattgaattacctttttttttctaagggaatagttctgggaagtagaggaactgtatctcaataaaacagacattctttgtggtgtgatagaatcatcactgcataggagccaggaaatttagtttccagtcccaggtagtccttagctgtataatcggaaaaagttactttgcctctttgggcctcaatttctactaattctatgatgacacagttggacttagaaattttaggatgctaaggactgacttaataaagctttcctggtatctcagacattttttaaaaggctgtatatgagtttgtgtatatgtgtatgtgcacatgcatttctggaaaggcttcccctccaaccattaaatatataattaatgttataaattgtgttgtttataattgagaaataaataccacacttgacaatgtctatttccaaagaattgggtatttttgtgcttttgtttattcctggtattttcatatcatcctgttacacacgtgagcagagaatgtgtgtatcatccatatttaatttacagtcatagctagactaagttattatccaatgttattgaaagaatcagtagcacagatagaaatgaattagttcctagtatacagttttcttggcctttctcttaaccagtttgctttcttagagaaatgaactgatctgactatgattaagatcatttattgctagacagaagtaaaattagagattatccatagaacattttaatcttgtaatttatttggtgtgttgtagaacacctgacttttctcattgtatttggtaaatgtgttaaaaatgttaagtcagtgttatctggttttattttatctcttgagtcatgtttggcatgtatgtgttgggggggtgggcataggagttacacatttaagaaagccctatcttttagtagaataaattaatgcagattggcctgtcttcctgcctgcctggtcagtaacagtggactttggagattgatctagtgatgataaacctattgtatgtggcataagccagagaagtcagcttcgatagcaagtttctacattggcgtgagagagaagcatttagttaacatttcaaagtaactaagcctgttagcatccatgtattctatcagtagactttattgagtcctgtcatttgtatggtcttttattgttttttgttttcaacaaaggaaatagcacacacatacatctcaaaatggattatacctgttgtaatctcagtattttgggagatcaaggtgggaggatcacttgaggccaggaatttgaaaccagcctgggaaacatactgagatcctatgtctacaaaatttttaaaattagccaggtacagtggtatgcacctgtagtcctagctactcgggaggctgaggcaggagaatcacttgagcccaggagttcaaggcagcagtgatctgtgatcaaaccactgcactccaacttgggtgacaacatgggaccctatcttaaaaaaaaaaaaaaaagaattataaagtctctattatggttgtatctattaagaatatcagttctgttaagaaaggaaataattgtttcaaatgttta

SEQ ID NO: 137980 - DNA, 2040 bp, Homo sapiens
taacatagcgagcccctgtctcttaaaaaacaaaagatgtggccaggcatggtggctcacacctgtaatcccagcactttgggaggctgaggtgggcggatcacttgaggtcaggggttcaagaccagcctggacaacatggtaaaaccctgtatctacaaaaatacaaaaaaaaaaaaacacaaaaaaattagccaggcatgtggtggtggcaggcgcctgtaatcccagctacttgggaggctgagccaagataattgcttgtacccaggaggcagaggttgcaatgagctgagattgcgccactgcactccagcctgggtgacagagtgagactctgtctcaaaaaaaaaagacataatttaaactgctaaatagctgctttcattcctatttcatatcttctgtttcctttttacattgtacctataattgagttagagaatgtaacaatgtttgtgaaatgttaactcaagattgtgtagaatgaaaattgagtttcgattcaggctatacttggaaagctgcaacctctagaatgtcactgcagtcatataaaatctagaatgatgactttctacctcacagtggcatgtggcatatgtaatagttgtaatggatatccaatttttaaaggtaaattgctaaatatagtatctagttctttaagtgttaaggagaaaacattcttatcaaaggaggcttttaccttccacctaagtcattttggcaggcctgccttttctttcatttaaagtgataagttctgtagttgtcactatcttattcataccaacaatttgggaatctggatatatttataaatgctctttggcaaaggttatgtgctcgtgaccaaaaaatctgatacaaggtgttatgtgaatttcattcaataagctctctagttacttatcaaattcactgcattttttccagcgtagtttgggaagaaagaaccttcaaatttgaaagtagaggctttttgaccaggaatattaaatttctttactaagaagctagatttatttaagcaataaaaggaatttttcatagctttttgagtgggtcatgtggcagttaagtattctggtgattttatttccagatattacaaaactcaaattgaaagtaatggcaagcaaaatatttttgaaacgtggcaaaccccctcccttacccccaggcaaagccttgattatttttttagatattttattttcaaggttgaatttcagaattaattagatgggaatttttgtcagcttgccaaatactttaaacttctaagtaaattaacttaaacttataatttatcattaattttgttttattaattgaactagtcgttttaaaagcttaaactaatttagattgtgagctagaatatagaccttgcttttccctgtgtataagctttttcacttatttaaggaaaaaaaagtttagacaaagaaaagtaaaggtacacatttggatgtaatttaaatctcattttgatgactgttggcttagtgattatagattctgctccactattgttttcaataatagtgttactctagcaactaatataaatgcatgcttttacaggataaaacaaaaacctttccaccagttgtgttgtgtattgggatgaaattttctttattaacttttataacttgctctggactttgcaaaactgttttttcccaaagaaataatctgaagatcctgttacaaatacttttttgtccccttaatttcattatttgtttcttatattgatagtatgctgctattaatttaaaaggggaagatttagaaacagtttgtatcagaaatcctatgtcttttttttctcttattcatgtcttacatagcactctggaggaaagaaagacttctgccttcctgcttatgaactacataaatgattttcaatttaaaaaaccagttaacttacttgcacggtcttttctttgttaaaatgaaaattatggaaagcatgcttatctttagtctttgaattttttggcataatcatataaagaagtg

SEQ ID NO: 137981 - DNA, 1161 bp, Homo sapiens
gaaattctagttgtctttatagtgttccttagtgatccatatatcattgaaaagcagtgttggaattagacttacttttcaagcagtaaaattgagatgaagattggttagtctgtcacagtgggtttgtggaaggaagagaattcgagctttaatttatatcttcagttagattcttaatttgctatcttagcttcattcaccactctactcattactttattatttttattttattttatttcatttcatttcatttcatttcatttcatttttgagacaaggtctcgttctattgcctaggctggtcctgaactcctggcatcatgtgatcctcctgccttggcctcccaaagtgttaggattacaggcatgagccactatgcctgtccactttattattttaaatcccctcattggattcttactgttgctgcttttcccttttggaaatataatagccttgacgtcctgtgaacctattttttaataagttgatttaagggcctcctgaatcatctctaccaagtatctgtgcatctttttagttgttcaggataatgtttctcagccattttgaaactgtagcatgatctagacttataagtagtttaacacaagtttctagcaataccgatttgttaacttattcttaatggcttgtgtttaaaatgttaaattaatagctaacctctgttaacgtttatgtaaatgttaaattgatagctaacctgttaacatttatgtaaattatgttagagaaagtaccttttctggtaataaacttattaattatacagatatcagagatgaaaattttggtcaaggtcatgttttattttattttgagacagtctcactctgtcacccaggatggagtgcagtgctgcaatctcagttcactgcaacctccgcctctggggttcaagtgattctcgtgcctcagccacctgagtagctgggattacaggcatgcgccaccacgcctggctaatttttgtatttttcatagagatgggctttctccatgttggccaggctggtctcgaactcctggcctcaagtgatcgacccacctcggtctcctaaagtgctgggattacaggcatgagtcaccacctgcagccaaggttatattttataatatgcttaagtgggtgt

SEQ ID NO: 137982 - DNA, 1197 bp, Homo sapiens
ccagccaaaaaattttatcttaaataatgaagcttagttattcattcattgatttaaactttttggggtgcctatgatatgccaattgtactggtctctaaggatacactcataaataagtctaggattctgttcccaagaagctatagtcttaaaagcttaccttaagcaagtaatatagtaagagttacagatcctataatagaaatctgtgcaggtgccaaggaaggaatattcatttctttcttggaaagtttgggatggatattgatgtgcttgaacagatgttgaaagtagaactgggtaactgtttgcattgctaagacggcagaagagcaaaaggcctttcaagatggggaatagaaaaaaagaagcacatgcataacatggcatgataagtttgaagaacctcaagtagttaaaaataaataagagtataaggagatactggtagagtaagggtgagtgtgggaagaggtaaaagtaaagactggaaaggtaggtgggaatcaaatcatagaaattagtttgtaagttgtgttataggttgtggtatctatttaacaattttaagcaagagactaccgtcacattttcattttagaaaaaaatcattttatgtatcagtgtggaggatggatcagagaaaagaaaatggatattaagatacttgttaggatgctactaaaatgattcaggtgggagaggtaatacaggcctgatatgagatgttagcagtggagacagagaagtactgggcataatatagatactcagtaattattaatgttcccttgatttataattagaatttcatgtaagatttccactagtttaatagaatttgaaaactggtcatctgaaatgggtacgttttgatattcatggcgagggatttcttggtacgtttggatattcatggtgatggattttttggtatttgaagctgcttttattcaaggtattttgaagttggttcctgttattatagtacaattgcaaacaccttccttcttgtccatgatttttaagatgaaagactgctaaaaatgatacattttcatcctttcaattgctgttatctaagtaataattaaattccatgcttttatgaggtttttttgtcttttggtagtcccgaaagcacttctttttaacttacttgatatgtgattactgtatctctttctgcttcat

SEQ ID NO: 137983 - DNA, 2303 bp, Homo sapiens
gtctgtcttcttgcttctgttttatctacctcagtaccttgcatctgtctaacgcctctccttacattctttatgctgtattataaatgttgagtcacccctacatattcacctacttttgcattttccttcattttgatgtacttagtgcccctagctgtacccaatacaatatagactttcaggttacatataaattctctaaatttattcagaaatctgtagataaaaccttgactacattgtaaatatttgatttttcatttcatctttattcttaaatcagacgattttattttccaacaataggattcttcctgggcatatgtattatcatcctgactccttagataatatattattttcttcagtaagtaagaaatgaattctctgaactcttgatagttaaaaaaaaactaagtatcaaaaagtcatattgtaattaaaatatttgtaaagtactaattactgaagcatttattctatattttcattttcagaggacgattatttatcatttctactaaagcaggatctctaggaattaatctggtagctgctaatcgagtaattatattcgacgcttcttggaatccatcttatgacatccagagtatattcagagtttatcgctttggacaaactaagcctgtttatgtatataggttcttagctcaggtaggtttataattctctttttcatattgaaagtttatgtgaaactgataatattttagagatatggaacatatgtgtattacagagagggaaacaaagttggaaataccatttctgtacataaagcagcagaagtcagttttggcttttcttgattttctgttttgtagtgtatccatttctgtgatgtcatctttctcaggttgagattgttttgcatgaacacatttagcagatgctacccccagcagatgcaacccctctcagcctgcctccaaatctgggcttcttaaccagaaactgggttttttttggtagatccttgcttatttgatcttctttagtacataagttgattgacaactttatgtaaactctttcctgttatttgtttatttattcaattttcttttatttttttctttcctgttaagtttaaaacttctgtacattctcatttataatttgtattatatttaatatacatttaatataatgtatacatttaattaatgtagtttatatgtaatggatatggtattttatatttgttttctgtcttgaaattatagaaaataaaacgatataaaggcattttatggtgtttgttgatagcttattatattacattgaaaaggaatcaaactgctctcttgcattctaacttcaatatttacctaaatgttttttgtgtctgtccctttatttctgtttactctggtatctgcctgctgtcctcctcctacagagtacagaaataaataaagcaacacttgaatgcattttggtcagttaatatagaataattatcagtaatgtaattttatttattatggtaaactatgctaaacagatgaaatctttcatgaattaagcaaaattgctgatgagtttttctttatggcaatatactaccataaagttttaccatttcatattaaccagtaaccgtatttatccttgattaagtttcatgcttacaaaattttatttttttgtatattcttccttctttttacaaagggaaccatggaagataagatttatgatcggcaagtaactaagcagtcactgtcttttcgagttgttgatcagcagcaggtggagcgtcattttactatgaatgagcttactgaactttatacttttgagccagacttattagatgaccctaattcagaaaagaagaagaagagggatactcccatgctgccaaaggtaaacatatttagattattggcttaacaaaccaacgtggactaaggaaattttactactgatatcaaatttagtcatctgattaaggctatatttcagaatttttcaaggataataaaatgatatttaatgaattttgtctagaaaattataaatgatagggtgcttgatctgttctccatatagcaccacaaaaagatagtatattctgaaacacatattttatgccacatataatatatctaattagcatattttctaatatactttacacttcaacttttataagaagtagcagacaaattttccaattagaaaaggggaaattacttcgaatttattcatatggtgaatttcgggttgcaggaaaccagttaattttataaacgtgtattatttgctgactt

SEQ ID NO: 137984 - DNA, 1575 bp, Homo sapiens
cactgaaatttgcagctaccccatagaataatttttggcacatagtaggcattcagtaaagatttgttcagtgaatgaataaaggcattctttatctctcatttttatttgatcattatcaagttgttgataaggagaaaaacgtggccatttacagatataacttaaaacatgcctcatgagcgaaatgtaagtttaatcatattcttttgacagttttaaggattctaatcaaggaaacccttttaagaaattctcatgtagatgaaataggctttaaaaatacctgtgctcatcactatctatttgaatgaaatctgtggttaatttatttataatgtaatgactccttgattaagaaaagtatataatgtattttgctatacaaatagaatatatataacccacttttaaatgatgagcaaggtggaaaatctgttcttaccagtaagcagagcgatatatcaaattccttttgtgttcttttgttaaattttcaggtgaggggaagtggcttcgaaacattgactattaccgtttagatggttccactactgcacagtcaaggaagaagtgggctgaagaatttaatgatgaaactaatgtgaggtaggaaaaattttctgtatatgtagaaacattaaaataattaattttaaaatttacataaagttcactatttttattgtgtatttgaatgtttttagcaaatgcaaggtacagtcaggttgcaaaacagtgtcatcactccctaaccactgaattcacttatggaatcatataatttgtagccttttgagtctcacttctttcacttagtgagatttatttgagaatcatttacattgttgcatataccaataatttttaaaaattgttgtatagtcttccattatagggctatatcacagtttgttcagctacttccacttgagggacatttgagttgtttccaggttttggaattaaaatcaaagctgctctaagctttcatgttcaagtttttgtgtgaacataagtatttacttaaatgaaacaaaagcctaggattgtgattgctgggtcatatagtaagtgtacatttatctttgtaagaaactatcaagcagttttccaaagtgactgtacaatttttcattcccacccgcagttgtatgagagttccagtttccttacattcttgtctgtacatggtattgtcattttttaaaaaaattattttactcattctaatgtatgtgtagtggcatctcttgtgattttaatttgctattccctaatgataaattatgttgagcatcttttcatgtgcttattgaccattttaatatcattaactgtagatacaaggcaatttgtgtgtgtattgatattgttttaagctgttagtaattgacaaaatcaagctacatttggaaagaaaaagttttatatatagtcatatgttgcttaacaaccagtatacattctgagaaatgcatcattaggcaattttgtcactatgcaaatatcatagagtgtactgtacatcagtaggctttctgtgatatagcttattgctcctaggctgcaaaa

SEQ ID NO: 137985 - DNA, 1312 bp, Homo sapiens
aagaccattgtgtaggtttttttttttttttttttgagacagagtctcgctctgtcacccaagctggagtgcagtggtgcgatctccactcactgcaagctccgcctcctgggttcacgccattctcctacctcagcctcccgagtagctgggactacgggcgcccaccacagtgcccagcttattttttttgtatttttagtagagacggaatttcaccgtgttagccaggatggtctcgatctcctgacctcgtgatccacccgtctcggtctcccaaaatgctgggattacaggcgtgagccactgcgcccggctaccaagaccattggttaaaagactatccttttaccattgaaatgcctgggccctacaattaattatcctatgtggctctctatctggactctattctgttctattgatctgtgcctgtccctttactacactgtcttggttactgtaactttgtaagtaatgaaatcatgaagagtcagccctccaactttgtttttctttttcagaattgtcttccctcctctgaggtggcattctcatatacattttacaatcaccttgtaatttctacaaaaaaatcctgctgggatttttgttacaattgtgttaaatttgtagatcgatttaggaagaagtgatatctttactaggaatcttctaatccataaacactaatctgtttttttagccttgttttcagccagtccctcatatctctggacttgattgaagattttcttgaattagctagtagggagaagacagaagataaagataaaccccttatttataaaggtgagctacaaatatttctgtgtcgtaattttaaaaatactgatttaaacataccatacaaacattttagcaacaaaagaaacaaaactacccagtctcacaactctatcatatcaaaatttttttgcaatgtctatttgtccttatccatatatatgtatagtctttttcaaaataaaattgtattgtttatatttgaggtttacaacatggtgttatgggatacatatagatagtaaaatggctactgtagtgaagcagatgaacatatctatcatctcacatagttttttttggtgacaagagcagctaatatcaacttaagaaaaattcctaatacagcagtctttgttgttgaaattgttggataaattaaaactttttggtttctaaagcagttttattgagagataattcacatcctgtacaattcacccatttaaagtgtagaactcaatggttttaatatattcacagagatgtacaaacatcactagag

SEQ ID NO: 137986 - DNA, 1977 bp, Homo sapiens
catgattagattctcaagaacttctgataatagaagtatttgataaagactataagtatgtctaaaatgatatttttaaaattcctaatcataactttatgccagaaaatttaaaacttaaaatacacaatatttaagaaaaatatactcagcaatgagcattcgttgcagttatttcatattagccaaaaacaagaaacaatctagatgtctatgaggagaactaataaatgatagtgtattcatgcagtggaatactacatggtagttagaatgattgaacgggagctccatgtcaagcatgagtaaatctcgctttgagtgaaaaagtaatttgtaggattttacaaacagtatagccatttgtacagtttagtgatacacatgcagtaaaaaacataaaacactgcaaaaaatggtaaatatataatttaggggtttagttacctattggaaaggaaggaaggaaagagaatgggatcatgtaggatcatatattaggcttcagcttcatccgaagttttaacagtgttaaaatttgatgaagatggaatgtggaagcacatttgtttcttatatcttacatacttttctgagcatttaaatttttgtaacaaaaatatattttaaaatactttgcattaaaaagcaattgagaaagtgtataaacatgctaaacctgcatatttcttattttgaatcaaactatgtttaaatcttttaataaattattttatgctactttctccttccacctttcatagtcaaagtttgtggggaaaatatataagaacgaaatcatttaatatgatatgctgattctggggtcaattcttgttggcggtttccagatcctagtagcacagtgaaatgttttctacccccaaggtcttttctctcgtggtaactgagcctttccatctctgttgattcctgtctcatggagtatgtttgggggcattttactctcttagggcctggtgggaaggggatggtttctcttctctttgggtctctgtctttctgagctccactcctaccccgagggtttgtctcttacacttgcactctctcagagtcaatctcttgcttgttctcttatttggcatctccttcctttctctttttctatctagagctcactcttctgggatagtctctgtccttctgtgctgtatgtgcgtgtgcctgcctttctcttttttccctcccctctcccaagtccccatcagtttctttcttactctccccatgggtaggtctttttctgtctctcttgctctctttccatttcttttctaatttacctacttatgttccatttgtcttatttaggtaaagctacttcttcttctaatccaagcagcccagctccagactggtacaaagattttgttacagatgctgatgctgaggttttagagcattctgggaaaatggtacttctctttgaaattcttcgaatggcagaggaaattggggataaagtgtaagtgctttaccatatttattatataaattaaccttttgattatgtttttattgcttaaacaatgtatttgaacaaatctgttgcttttccttccttcctaaagatgtgatttatttggtcattgtagtgctaggccaatacaagcaactatcttttttgtaagccactagttctgattgcatattcaggttatttcttcagtgtaaatttctgcttctacctgttgcaacttgaacttatttccttgggtagagctcttagttgaaatttgtgtttctccatcttcaaaatcatttttcggtttatgtagtgtgacttctaccgtgttgctttactgagatttccccctgtaaagtcactagtgaccttctaatcctcaaatctagtggacatctctcaggctttattttattttacctgcttgattattctttcttcttcttcttcttttttttttttttttcattatgagacagggtcttgct

SEQ ID NO: 137987 - DNA, 1509 bp, Homo sapiens
ttgtgagtattttctctcattctgtaagttgtctgtttactctgttgatagttttttttttgttattttgtgtttttgtttttttgtttgtttgtttgttttttgtttttgctgtgcagaagctctttagtttaattaggtcccagttgtcaatttttgtttctgttgcaattgtttttgaggaattagtcataaattctttctgactcggtgatttctttataaacatttctctcttcagtacctccatggaatagacagatggcagtctaacagtagactctgacttctcttaagaaatcaggggaatagtaaaaattaaactacaaaatttctcttctcattcttctcttctgttaccccataaaacagtttactatcaatgttcatcttctggatagatataaagaatatttttatcagaataataaattattatagtgtaatttaaggcaatgagaagttcctgtatctccttccctgctgctgctgccccaatctgccttttccacataaattcctcagtctctcatctcataattaaaaatatataaagtttacatgttcctggaaattattttcttaaaatactcttgttgaattttttctcataacttatggctaacaggagcagaagagtagaccagtcagtgtgcatcatcctgtgctataaatgggttacgtaagagtatactgagattttttttttaaagtgtactgagatattgatcctttgtcacttgggaatacaattagaatctgaggcagctggtttgcctccgtaaatgagtagtctcttctctttttcctggtatgctatataagcattaacgttttttacatatgccataatgtgaatgggttggaaagcactgggggcagaatgtaggaggctacatgttgtgagcccaaaaacacacagggaaggccatcagttccaaaagacaaattttgaccacttgtctaggatttttgtttcattttagttgtgtgcagtcaaatataagtcatttgtatatggatatattttatatatttttgtagcttatatacgtgtatagtatattagaagcattctccagaactaatagataataaaatttatttttttctttgcatctaaattaactccatataaaatggagtatatcataatgtatggacatacgtagctggtattgtataactttaaaaaaaatgactttcttacagtaaatataagaaaatctgaataggaagtattaaggggctagtctgcctccttagcgcagtaggcagcacatcggtctcataatctgaaggaagtattaaagggttaacaatgttgtacctggaatttgaaatggatattaaataattaattacctataattgagctacaatatgatttttgccacatattttattttcacgtcaaagagttactgtttgctttaatccttttgtagtagctgtctcgtttttctgagaagcagcatcttgaatgagtcatttaagtttagcttacat

SEQ ID NO: 137988 - DNA, 2724 bp, Homo sapiens
tcaaactcctgggctcaagtgattctcccacttcagcctcccaagtatctagggtatctagggctataggtgtgtgccatcatacctggctaatgtttttgtttttcttggtggagacagagtctcgctgtgttgtccaggcctgtcttgaactcctggcctcaagcggtcctcctgcctcggcctcccaaagtgctgtgattacaggtgtgagctactgtcacttgcctagaagtaatttttttgagtgagcatagttggcgagagtcagtaaaggactatctgcatggagcaaagtttatttataacaggagtttgtaatctagggtccatggatagaatttaggggattatatgtacctggataagaaaaaaattatatattgatttcccttaacctctagctaaagcagcagcatttttcccagtgatgaatagaggcaacaatctatagtagtgttagtgataaccatgactttgttaccaatagaaatcagaaatatttttacatgttgttcctgatacctcaaaatcatttatgtttatcaatacttcagaattttaggtatttattaaacctgtgcatattttgttacttaatgcattaattttaaaaagcacatatttctgtagtacaaattctttaatattttgataatttctatatgatgggtttcttttgtaatcctatttgttttatgtgtttcaaaacgatattccaagagaatttataagcttctctacactgccaaaagtgtttatgtcacaagtaagattaaaactcctaatctagaaacttggttgatatagacaatttttgtgtctttaaccatatttcttttgatcaggtgtgggcaataatagtgaaggtggaagaggaaaggcaggtgcaaagcttttccaagattttcagatgttaagtagaatatggactcatccttggtgtttgcagctagactacattagcaaagaaaataaggtaagtcaggtaacttagtttaaaagcatctattggaagcagaataaacttagacaaaaaattgacctacagactgtatattcaaattttctattgctttgttctattctatgtcttatttctaatttctatatgtcttgcatgtattatgattataggagtgttaaatgttattttattgagcccattttaaaaaactttttattttgaaataattttatacttatagaaaagttgcaaaaatagttctgagaattcccctatacctttgacccagtttcttctaatatcagcatgttgcattagtatagtaaagttatcaaaactaagaaattaactttggtacaatactattaactaaatggcagactttatttggatttcttcaatgtttttacttatgtcttttttgttttccatgatccaatctaggacctcccattgcatttagtaagcatatctgtcctgtcttctttgtctactaaaatctgtaatagttcctcagtccttcctcagctcgtgccaattaacttattcttaaatgaacatcaatataatttccagtgtaagttgagatattctattaaaatagtggtcatttttttttctctagggttattttgatgaagacagtatggatgaatttatagcctcagattctgatgaaacctccatgagtttaagctccgatgattatacaaagtaaatcgaatactttttcgtgccatcctgtattgacaaagttaaaacccctacttgctgattgacctcttataattgacgtttacatctttcctatgcttttctaacaatctgaatgtgtttttttgtttgtttgtttgtttgtttttagaaagaagaaaaaagggaaaaaggggaaaaaagatagtagctcaagtggaagtggcagtgacaatgatgttgaagtgattaaggtctggaattcaagatctcggggaggtggtgaaggaaatgtggatgaaacaggaaacaatccttctgtttctttaaaactggaagaaagtgagtctaatgaatgttgcctttatcatggaacagtaatttggaaaatgtcatgtcgttagtccttttttcagtcacttacctgactaattgactcaaaggaatctttcctcaattgatgagtctaatcaagtactcataattacagtaaatatctgatgaatctttaattataagcaagctactctgtgctctctggtatttgggggaaaggtaaaaagaaaaactaatgtttatttacttgtatatacctaaactctattattttcactacatgtgttagctaactgaattcttgagcaggcttgcaatgtagttgatagttttaaaaatgagtaggagaactggtattcagacctaaaaatgtctaatctcaaagccaccatgatattttcacttaactgtatgggaataaatggaaacatttcagataatcaagtgtgattgtagttaatttttagtcagtaatatacagtaaaactaattttaatcatttagtgtttttcctttgtgattcttcataatctgcaattatctactttaggtttcctgtgtattatgtacagtttctatcacctcttttgttttctttctgtctctcttgtgcatgaaagtgaagtcttagattgaactctgcagtggtttaagttgtctttacctatatgtaagttgaaggattagtgttgagacactgtatcctactagtgcagcctgtatgccta

SEQ ID NO: 137989 - DNA, 1025 bp, Homo sapiens
tcacactacctactacatcccctccataccttttgttatttttttttctgtacagagaagactattttgaaaacttaaattgctcacttggtaatgtgattgcttcaatttaaaacctacctggtgtgttgcagtgtctttttaccagtgtaccatattgtatagtcatatgaaatacattgtgtagataattgtgggtttagaaagggtaaatatatttaagaaaatgttttcttatatgtttagtgcctatttatttatgtgtatatttcagttataagcaatgagaacttgtagttcattcctgttaaatatttagattaattttcattctctttcttgttaattacagaggaaagattatacagcattaacaaaattcttgcctccaaaacacgaatatgtgttagctgtgagaatgacttctattcagtgcaagctctatcagtactacttagatcacttaacaggtaaacaatacaccttgttgatttcatcttctctataaagacattctttttccaaagaagattatttcagtcatcttactatgtctgttgttctttttcagttttgcatttgaataaaatgggtatgcttaaaagcataaaatatttctaattaaaacactgatgctgtcaaaattaaaatcaagaagcaaattgatgaaaaagatatacagcacatatgaataatgcccttaatttgtaaagagcttttatttcagaaaaattatgaatgtgaataaatccataaaagaagatatacaaaattccagagtatttttttaaaaagtatttacccacattaataataaaaggtgtataagttaaattcatgagtttgtttctcagttatttaattaacaaaggttgaaggcaaaagtaaaatagaaggcaaggcatgtagtatgcctaaaatacaccaaaatgctaacagaagttgttttctgggtgcttttgttatgaagaccttctagtttatttcttgtatttttctatgctttaaaataatacaatgaatag

SEQ ID NO: 137990 - DNA, 1825 bp, Homo sapiens
cctttagtgtatttatggtaactttttgctattttattatttgtaatactagtcatttcactttagcctatactttatgtttgtttttatctgttccagttttcctcttttctattctgttaccctatttatagaaatgctgtttcatattgtggtcctatatagtatgggacaagtgatggctctgttaatttttacaaaatgggttagtcttacaaaatacattagtaattaattttttttttttactatttgtgtagccccaactgaatactgaataacagttgttattatttgatctctcaaatattatttggttattctggaaatgaatcagttaatataaattaacttgcttagtagcttattacctcctatttattgttttgacttagtatctcctttcttcacaagatagcctcactgaccataaaatcatggttagattaatggaccacttgttttatacttcatatctcttataaagaataatagtgagtttgaataaactgtccttaggtatttttaaaaaacgttcatgtctagtatttagggatggtttttacttcaattttctctctcgttttggtaattcacttgtagatcagacttataaccatgtttattctatacttagcttgatattctttctttatagcttaattctaatgcatgtgtttttgacatgagcatttcattggggaatttttctaagtctttttaacgattgttaatgttgttaatgaataatgtcttctctcttagatcattgtatggttaattttatcaaggaaaatttacttggatccattaaggagttcaggaatagatttataaatccaattcaaaatggtcagtgtgcagattctaccatggtagatgtcagagtgatgaaaaaacgtgctcacattctctatgagatgttagctggatgtgttcaggtacaaatatgttccatagtaataaaatattcttacttttttatataacaatcccaacatattttctgagcttaaagtttaataattttgtgttttctttcccgctctttcagtagatagttttacagttatatctccttgcgttgtcttaaaaaatttctgctgcattcaacttttaaaaaagaagttccgctgagtttaaaacatagttgattcatttgccaggtgtaaagcctcatatcttattatgttaatgtttagatttttcatccttaagatagggagttccttaagaggaacatagctactatgatgaagttcctatgctcaccctaattctgtagtacagtattataaatctcacttttttgaaatggttataggagaggccagtatgaattaagagaggagccacttttaaagtaatcctggagaaacagttttgttactttcaagtatatataataacctgaacagactagtggtgtcgtttacatacagattttcagtgaatctatattaatgaatggataagtgtctagagactgagctggcagttaatagatctcaagatacgcactttctctgtagatgttaggtactgatgatagcctcaaagatgttttaacaaatgagacaggctattcttttggttggatatacagtttgccctccatatctgcaggttctgcatccatggattcaacctaccatggatcaaaaatatttttttaaaaaatagataaaatggacagaggctaggtacagtggtgcacacctgtaattccagcactttaagaggccaaggtgggaggatcacttgagcccaggagttcaaggctgcagtgagctaaaatcatgccactacactccaggctgggtga

SEQ ID NO: 137991 - DNA, 1100 bp, Homo sapiens
aagtattatatggtctgttgtgacatatattattcttaaagtgtaacttttgaaatttgtcttttcatgtatatatacattgctcttagtctttgctgatagtttaagttgatatactaatgctgaaatagctttaaagacttttcaattttaaaagacatttttaaaaataggctatgtctgttgggggaactttttccctcttgttgtttttatttttgcttatttttgtaaactcagaggaccctgactaccatttatagtggtatttcaatgctctaccatttggatataattaatatagttagtgctgtattaaccaaatacgggagcagataaaatatgtttatacttacaacgatgtcattttatcttcctgtaagatcagcactttaaagggattaactttatttacttaaatggatcacattttcagttttattatatattaattgtgttatttttctgtttatttttgtaggccctgattttgttgtttgtgatgaaggccatattctaaaaaatgaagcatctgctgtttctaaagctatgaattctatacgatcaaggaggaggattattttaacaggaacaccacttcaaaataacctaattgagtgtgagttaatatctctgattatgcagtagaatattggtatttcctcagatatatttttgtaacgttaccatttacctttcttctacttattctagtatagtcctagaccatgatctacataggttcatcttagtctgctgtgaaagaataacatacttttcaaatgagatgctttataaatgagtggtaaaatacagttaagagatacgctattgtgaatgttcatatataaatatggaatgtgaattattgcaagagtatcagaagtcttaatgattgctttagaaagtacataagcatatgtgattactccagataattttaaggggatattccagttttggggcatgtactgtcaagaaatcagaaagaaatgggaactgtgaacattttagtaaagtggagatgggagaaggagaggtttgctgaatccatggcaggacagtttgctgaggctaaaggtagttgatgtgaacctagg

SEQ ID NO: 137992 - DNA, 1071 bp, Homo sapiens
ctctacttttattttcttttccagagtatatataagtattagagatagttcctctgccatagctgggtaaccatctgcaacaagaatattctaatatccatcatgtataacatggaatatattaaaactgttgttaagttttaaggtttagtgatagtatctagatataattttctttgccacctaagtctaaagtgtcaggatctgttcagtacttctaaatttattagaagggatctgttcagtataacacttaattttccagtacatgttttccattttatgcccaatttatcttctctgatttggaacaaattagtgatagtgaagaatcatataaatggcagcagagtatgtgaagactgaagtttgggtgtaatgttaaagaaaagtctaaattgaagttcaagatggaaacaaaatgtcagaaccagacagttttgggtatgagattcttaaggatgagctgaggttgtaaacttataaggtaggctattagatcagaagcctggaaaattgggagtatgtattaggattggaaacagtgtttagagctgaccagagttaagatagtagtgttcatctttcaacttagctgctctggttatctcttcctgcgtaacaattatcccaagccttagtagcttaaagtgacaagaatcagctgggtgcaatggctcatacctgtaataacaatactttgggaggccaaggcaggaggattgcttgaggctgggagtttgaggccagcctgggcaacatagtgagaccccatatctacaaaaaaataaaagaattaaccaggtgtggtggcacacacctgtagtctcagctattcaggaagctgacatgggatgattgcttgagtccaggagttcaaggaagcagtgaactatgatcactgagatcataatcatcacagagtgtgagacccagtttcttaaaaaagaaagtgacaacattttgttaactttcctagttttactgggtcagggatttaatagaggtttacttggacagttctaaacattttatcaacttttctctctaatatctttatggttttttatg

SEQ ID NO: 137993 - DNA, 3879 bp, Homo sapiens
cctgggctctgtcctggctttattgaagcaaaatagtagtgtattagttctgagattgggtaatttataaagaaaagagttttcattgactcacggttttgcaggctgtgcaggaaatatagtggcttctgcttccggggaggcctcaggaagcttccaatcatggcagaaagcaaagggggagtgaggcacctcacatggtgggagcaggagcaagagagtgagggagaggtgctgcacagttttaaacaactggatcttgtgagaactcgctcactgtcacaagaatagcaccaaaggggatggtgttaaaccattcatgagaaatccaccttcatgatccagccacctcccaccaggccccacctccaacattggggattacaattaacatgagatttggtggggacacagatccaaatcataccaattggatttgtggtgtgggagtaaatgtgtctatattttggaaaatctcccttggtaagactgaccattgcttgaatgatttctttgagcttaactatcaacaactccttttcttgtaggtgatagaaattgaagatgcttcacccaccaagtgtccaataacaaccaagttggttttagatgaagatgaagaaaccaaagaacctttagtgcaggttcatagaaatatggttatcaaattgaaaccccatcaagtagatggtaagaaactattagatgattcaataatttttagttaaatttttaccaatatttgggtgtgaggcagctgcctcacatcctgctaagtcctggaggtaaattggtgagtggggtggggaatccacaattcccctgcctttatggagctcataaacaaatgaggaagaacaaaattgggtgatttcaaacacaatgagcgttataaaaagagaaagaagtgctacttacaaatgggtagatatagcaagtaggtttcacctaattagcaaagactggcctaagggcagctaggggttgggaagagctgtagctagctaaaagcctttttcagaaaatgctatttcagcatttttaggtatgttttctttattagagttgaatcagtaagtcagttttgagtgtttatgtgaattaatcataagggaggttctgtagttcctaccttttgagttgctagtcccctttcttgctcagtgtttactatcgaataaaggaaaagatgatgaaattatctcatgggtttttttttcctgattgactcaataaactcaaaggtatttttgataggaagccattctctttttggataaagttgctctctttttacaaaaattattattattattttttgagatggagtctcgctctgtcactcaggctggagtacagtggtgctataacagctcactgcaatctctgcctcctggcctcaagtgattctcccaactcagcctcctgagtatctgggactacaggtgcacaccaccaccacgcccagctaattttttgtattttagtagagacggggtttcaccatgttggccaggctggtctcgaactcctgacctcaagtgatctacccgcctcggccttccaaagtgcttggattacaggcgtgagccactgtgcccggccacgtttctcttttagagtattcttatgtttctttgaaccatctcagggaatacagaacatctactgtggatagcttagagaagatgaaggaaagtccccctgttctatgtttgtgttaacttgtttctgctttagtttggtgggaaaaaatcccatttagatgtaagaaattatttagctaagtgtttttttaatgctgtttcttagaagttttggttatgtttttgatgtgtttatgtaaaggaagtttttaacttggacctttaaatttaacttaatgaagctgttatttttaggtgttcagtttatgtgggattgctgctgtgagtctgtgaaaaaaacaaagaaatctccaggttcaggatgcattcttgcccactgtatgggccttggtaagactttacaggtaagagctgaagaatatgaaggtatcctgtttttgtggattcattaatatatattggattctattatgtttcaggcacagtcgtaggggctgaagataaagcagtgaacaagaataacaagatctgtctccaaggagcttatattctagtggaggagagagctgctaatcaaataagaaatatgtactttcagaaaatgaatgttaagggaggatattgagttaggaaaggcatcttttaggaggtaatgtttgagcagaggtcctaatgaagcgaggctgtggggtttcaggtatggccaacaacaactgcaaagattctaaggtagaaattacctttttttttttttttttttttttttttacaacttttaacggtttatgatgttaaagtaatgacaaagtaaagtatcttttactattaaaattgctgcatttctaaatggcaggagttgtagcagagatgtaaaattggtgaatgtatttgtacttttaaaccataaagtaattatagatttaatgggtcagaacacattaaagtggaaaaatattatgtaacatgattctcttctaaatgagcgatggtattttttgaaagactatagggacattctgtggagacctaggacttagtattggtatgggatcattttatactattcacattgatcatagaatcatggagctttagagttggaagagcctgatacatcatctagttgaactttggcattttactatctctttccctgtgccttgcctggtttggaaattctggccgtttattgtttaagcaaaacaaagctataatattgtaagattgcttaatttattaaatttttttgtggatatttaaacgaaggtgacaatctgttttcttataggtggtaagttttcttcatacagttcttttgtgtgacaaactggatttcagcacggcgttagtggtttgtcctcttaatactgctttgaattggatgaatgaatttgagaagtggcaagagggattaaaagatgatgagaagcttgaggtaacttattttaaatgttttctattattaaaatagtcacatgaaattcatatagtaaactatttttaattttttttaatttttaatgttttttaaccagtgatgcatatttcagtgggaatatttaatattcacatgtttttagtagctacttaaaaaaatctttatttccccacaaaaggtttctgaattagcaactgtgaaacgtcctcaggagagaagctacatgctgcagaggtggcaagaagatggtggtgttatgatcataggctatgagatgtatagaaatcttgctcaaggaaggaatgtgaagagtcggaaacttaaagaaatatttaacaaagctttggttgatccaggtaaggtattaatagacagtgacataaagaagcaagttgaataaaaaatgtgtttatattttaacaaatagtaattgcacagctactaagtatctggtctttgttgtggttatccttcaggtttttgccttttagaaaattcttagtatttcaatagaataaaatcacccttaatgtcgccagctgttcagaatttatttgctgagtctgaaagtgtttagggttttaggggataccttgtaaacacttaaaaatgcatcaaatgcctgtgttgcaatcaaagattcttccagctatccaaatattaggtgataacaagagctctctccatatcctgaaaacagtttgtgtctttccaaacttcatgtcattagaagaattgctgcttgcttatctccttttaaggggccatcagtatgaaaggttaatattttcaatactgttgatccttatgtgatagtaatctgatgtgagagcc

SEQ ID NO: 137994 - DNA, 1325 bp, Homo sapiens
acctaatccaccattcatggtcacctaggctgattacatgtctttgctattgtgaatagcatggcaatgaacttatgagtacttgtgtcttttttggaagaattatttattttcctttgggtatatacccagtattattagttaaataaagtttccttatattatagcttgagtgcataaacacatctacttagtcactaataggcagatgatttctttttaacttatctcctcctacatttaggatgaagatacactaatcctcaatcctgaagacaacacttaataacaaaagtatcatcaagtcactgatgaacatatggttcagaaatcttaattaaagccttgtatattagttttttttattgtggcattaaaatgtaccacacacttaacctcttaagacaaacttatttgtctcacgggtcaggaagttgggaatagcttagtgagcgtggctctactgggttttctgcttagtttcccaccaagccgaaattaagatgttaactagagttttgctttcatctaagactttgtatccttttccaactcacttgttggtagaatttagttcctttcagttattacacttaggtccttagctactagagttctctctccacaacatggcagattgtttcatctttgagatcaatagaaaagcatttcagtcatttaaagggctcactttaattaggtcaggctcacctagaatatctcccttttgattaaatcagagtcagcttattagtgggccaattatgcgaatgatagcccaatcatatttacaggtctcaaccatactcagaaggtgaggggattatgcagggtgtttatatcagatgacggtaattctggggccattttaggattctgtgtaccacaccttgtaaacaggacaagacatttagggaattttccatttttatataatggctttaccccagtgatatgaagctactacatatccaggctaggacacagtaataatttagtgaatacttagcctatgccagatactttgcatacattgccttattcagtctccagaacaaccttgtggaaactattgataatcattcccagtttgcagattcagacacagaagctaagagggtttaggtagcttgatgaaatggaatttgggtctgaatggcctatgctatttttacttcaccacactgtttctcagcgttaatcttggtttgtatatcacaattttatgtaagtacaatatctattcagataatttactgcaaatctgtgacttatttgtagttttttggatgtgacaatgatcgtatggttttacaaagaggaag

SEQ ID NO: 137995 - DNA, 1718 bp, Homo sapiens
tatatcagaatttcattccctttttaaggtgaataatattccattgtaagtgtgtgccacattttgttagcccagtcatctgttgatggacatttgggttgtttctacctttcggctattttgaataatactgctatgaatatgggtgtttacatatctgagtccctgtttttaattattctaggtatatatggaaaaatggaattgctacatcatatagtagttgtatgtttaacttttggaaaactccacactgtttttctctggtatctgtaacatttgacgttcccgttagcaatgtaccaagattccaatttgtctgcatctttgccaacacttcctttgtttctttctttttttctttttttctttttttttttttttttaacaagaaacatcctaatgagtgggaagtggcatttctttgtggttttgttttgtattttcctaatgactggtgatattcaacatcttttcatatgcttatatcttcttttgagaaatgtttattctagttggtagcccatttttaattgagttgtttgttttttttaataggtgttgaagagttgttttttttttttgagacagagtctcgctctgtcgcccaggctggagtctgatggcacgatctcggctccctgcgagctccgcctcctgggttcacaccatcttcctgcctcagcctcctgagtagctgggactacaggcgcacactgccatgcccggctaattttttttttttgtatttttagtagagacggggtttcaccgtgttagccaggatggtctctatctcctgaccttgtgatccacccgcctcggcctcccaaagtgctgggattataggtgtgagccaccgtgcccggccgaagagttgtttttttttttttaatactactctattgctgaatataattctaaaggttttcagcatgttttcttccaccttttcctgctgtgttaattaatggaatatgaaatggataaattaaatgactttgtactgtttacctctaattgtttaaattctgtagagtaattctgaggaagaagaggaggaaaaagaagaggaggaggaagaggaggaggaggaggaagaggaggaggaagatgaaaatgatgattccaagtctcctggaaaaggcagaaagaaaattcggaagattcttaaagatgataaactgagaacagaaacacaaaatgctcttaaggaagaggaagagagacgaaaacgtattgctgagagggagcgtgagcgagaaaaattgagagaggtaactaatttctttcttcttctttttcttttgtagctacagggtcttgctctgttgcccaggctggcctcgaactcttgggctcaagtgatcctcctaccttggcctcctaaacttctgggattacaggcgtgagtcaacacacccagccttaatttatttctattaatgatttattttatttggtatatgacttcaatatatttcagcattttaagagtagaatgttgtaatctaccacagatttcttttttttagacggagtctggctctgttacccaggctggattgcagtggcatgatctcagctcactgcaacctttgcctcctgggttcatgtgattcttgtgcctcagcctcccaagtggccgggactacaggcatgcactaccacacccagctaatttttgtattttttagtagagttggggtttcaccatg

SEQ ID NO: 137996 - DNA, 1082 bp, Homo sapiens
cacatccttactgacagtggttattttgtctggattaatgtagctttgtgtaccaatttctaagcccagaaatatttttctcaccaaaagttgttacttttttttttaaatctctgtgacctgttatgaagaaaacagtattcaaatttgtaatctgcttttttttagtgatgatgaatgttttttagtatgtctattggctgtttgtattttatactagaagaatagtcttaatgtccttttatgcatcttcttactcatataacaaacctcccctcaggatactgtaaaatgttgatcattggattaaaatgaagggttaggctgctgctggaatatccattttgaacctattgattttttttctgtttgtttttaggaatgcatacagaggtagaacagttttaaaatagtacataacttattgatggaagtttatcatgaaatattttattttgtgttttaaattttcgtcaggtctgcaaagaaagcagagttggaagaaaatcagcggagctataaacagaaaaagaaaaggcgacgtattaaggttcaagaagattcatccagtgaaaacaaggtaataatgacatttaccacatgcttgaattataaccagtacagtagactatggtaattatgctgttacctctctgttccattcattcattgtattgtactggcttatttacattttacacttgtggaaggattggttattgaatatatatatgtaaaagtattgatttgacattatcatttttttctattccttaatttctaatggaattttatttaagccattctaattcattattttacatttgtagtgatgtgagtgttctattttctgaagacaaaatactatcctgaatgatgactcatatatgaataaatttcttctcatagtgaaatcagccaatttgaatttttgtatttaagcaggcttacataaagtaaaaggtgtctgtaatatgtttgattctgtcaacacaatgctcttcagagggatatttgtcttttgaaaattaacttttaaaatattttaaaatgtacagttcagtggccttaattatattcac

SEQ ID NO: 137997 - DNA, 1066 bp, Homo sapiens
tgctaattttgtatttttagtagagacggggtttctccatgttgatcaggctggtcttgaactcccgaactcaggtgatctgcccacctcggcctcccaaagagctgggattacaggtgtgagccactgcacccggccctaaacagatgattttcaaagcaaaatattttataccttacaaagggttctataaatatataggtgatatttagtcaatatttaataatagtaatatgtcaagtctgatgtgtgagattacctgataacaccaatgataccaaagtatgtgtctaactctgatttttttcataagttgcagtagttgtcaacaggcaaaatagatatacgaggcattttaaaggctgaagaaggttttattgatttatttccttcatttagaagcaaaaaatcaagtcaattctgaatcagattcagattctgaagaatctaagaagccaagatacagacataggcttttgcggcacaaattgactgtgagtgacggagaatctggagaagaaaaaaagacaaagcctaaagagcataaagaagtcaaaggcagaaacagaagaaagggtaagatgttttaattctgaatgtaaagaacatattggaccagacagtggcttatgcctgtaatcctagcactttgggaagctgaggtgggcagattgcttgagcccaggagtttaagaccagcctgggcaacatagggaaacctcatctttatgaaaaatagaagaaatagctgggtgtggtggtgtgcacctgtagtcccagctacttgggaggctgaggtgggaggatcacctgagccccggaggtcaaggctgtagtgagcagcgattgcaccactgcattgcagcctgggcgacagagtgagaccctgtctcaaaaacaaaagcaaaaacaaaaaaaatactggttttgtaaactaattatagtaatgaaatttaagtgtatggccaggcacggtggctcatacctgtaatcccagcactttgggaggccaagtcgggtggatcacaaggtcaggagattgagaccatcctggctaacacggtga

SEQ ID NO: 137998 - DNA, 2430 bp, Homo sapiens
tgaaattttttttaaaaagatgattttagagaatttttccagaaagatgtatatcttcaatttaaagggtttccctttattctgaaactgtttcctaatttggggagggtatgttgtaaatagtctttattttataaatgatgaaagtaaatggaatttgggtttaaatttctttttttggcaaaatgaaaagttggcaaccctgtatttgtcccattttaagaaagcttacagtgtgcaaaccattgatctagaaatgtaagagcaaaactttatagctcaactttagtaagatttaaattggtgtgatctaatcttcactttattgaaatacaaatcagggcagaaatcctcagaaaagcaaacccatctgtggcttcctttagcaattgatgattctgtgtgttgtctaaatattcctgatccatctgtttgagggagaaagcaccaaaaggcatataataaacatttatggaagtgattgcctattttgcttcagtctatttagatgcctttgctatgcatctttgaatatgaatagtaatgaacaatctatctgtcaaataaaatttaggaggcagctaacatgcattaatatctcctgccattgaatgaattcttcattgaaatgtgggtgcgtgctaagaagtgtaaagaggggtttcaaatccagaaataacaaatgttccatcatctcagctacaagtttttgacttagagagtcagtcttgattgcagagaacatgtttatcccatacagattagctcatggcagactgtcaggatcatgccatcttctttttgaacttttctataagctattttcttgttaccgtgatttgtgaatttatattgaaaggatacccagacttatcaaaacatcttgtcttgcacaaaagctgtatgattgctttaatcttacattttcagttatttttcttgagtataaacatggagatttcctaggaatatattttattttaacatatgatggtaggagtaaaagtagtgttttcttatgcttttagtaattgatttttccattagcaaattggtctttgaggagcatcttgagaaattttgttgtgagtgaagcaactgcactattttttttaaagtaacccatttatggtaattcgtgttctttttaccatgtatgtaattaatagcactcatgtcccttctttcccctgtcttgaatattattagagattatttattgctgtaatacttaacatttgtgtatgctttcatctggttcacagcatttatgtagtacattgaaattaaggtccaaaactatcatcctctagtttgaagcaaggtgtcattatatagtggtttattacacattggttttccaagaatatattttgctgttgaataaaacctctcgtggagttttatcttggaatgccatttatctgaacaagttcatttactgttgttgacctgtctgactttgtagttgtaggatggtgtcagcaaagcaaatagaggattggaaggttatgcagcatcaaattgcaattggtaaaaatagtcaatagaatatgtccttcagagttttcaatatattgcagaattgtatagaattgagaaataataagtgtaaagaacatttttaaaagtttttgtttatagcttaggttaaaacatggttttgctagttgtttatttacaatataaaatctattggcacatttatttctattttgattcaaagaagtctgtttttatttttaatttggtgtatttcacccccagatatatagttctttttttattgttttttactctcaagaattgccaagaagatgcttttagaagaaattaaagccaatctttcctctgatgaggatggatcttcagatgatgagccagaagaagggaaaaaaagaactggaaaacaaaatgaagaaaacccaggagatgagggtgagctccccagagagaagtttataatgtcataatttgattccttgactaattcagtctttgaagaatatctgaccaagaaatatcttaatatggcccggcgtggtggctcacgcctataatctcaggactttgggaggccaaagcaggtggatcacttgaggttaagagtttgagaccagcctgaccaacatggtgaaaccctgtctctactaaaagtagctgggcgtgatagtgcgtgcctgtagtcccagctactcaggaggctgaggcaggagaatcacttgaacctgggaggcagaggttgcagtgagccgagatcacgctgctgcactccagcctgggtgacaaagcgagactccatctcaaaaagaagaagaagaagaagaagaaaaaaaatctcttaatacttgtatttagagttcatggaaatgtttaaaactttattaccatgacttctcttgaatatcttgtaataattatggaagttac

SEQ ID NO: 137999 - DNA, 2621 bp, Homo sapiens
tacacttatttttaaaaatgggggtcagcgcggtggctcatgcctgtaatcccagcactttgggaggctgaggtggatggatcacctgaggtcaggagtttgagaccatcctggtcaacatggtgaaagcctgtttctaataaaactacaacaattagctgggtgtggtggcacacacctgtagtcctacgtactcgggaggctgaggcaggagaattgcttgaacctgggaagcagaggttgcagtgagcctccctcactccaggttgagattgtgctactgcacttcagcctgggtgacagaacaagactttgtctggaaaaaaaaaaaaaaggcatcatctgtatttgcccaggcactcattagcatacaagtattaacaagtagagggtatagtgctggcacagtaaaattaatagcagattgggatttaggatcttaggttctactcctgactttgccactagttagctttgtttctttggctgagtcatttcctatatctaagcctgtttcctcatctgtagaatgacaaagctgtactctgaggtttgtccttctggctctaacattttgtattgcttttgttaatggctcgaaagctccctggtgcaggaggtccttctcttgattgcattttaagaaactcaacatttcgaattattgatttacctatcagcaagaggtggtttactttcctttcctgtttgagcgtttaaacaagcgacattactcatttcctttctagataggattggagttaataaaggctttcttggctttctcctatgtttttttttttttttccccgattgcttgtttgtcattgtgttgttgggctcacttcttattattttatttgtgctttcttttagtaatggtgttatcttggtgttcattatgtactttggaagacttagtatatgtgggttttggggtcctatttattttctcatgcgccagttccgatcattgtttgtttgtgggtttttacccttcctcccatattgttttgctttctccccctctcccttccctccctttcaggaaaatggaggagtggctccattacttctggctctgcccaggttttctgccacaagagtggcacggcctgtgcctctaatgcttctgatagagtcgtgactgctttggatgctacacctgccccaagatgtaatattgagcattgagattccaggggcagtacatcgtcctggaaagcctcaagaaaggaaacttcagagcaaacagaatcaactagggatcatgactatacatccagcatgatccagcatgggtccagccgaggcctccaaaatgatgctttgccagcctcagctggttctcaagtgatgatatccttgaagtctctgtggcccgtgactccagagttaaggtagtggagtttccctttaaagcatctcacagcaggctttgtagatgggacacatctcacttcaacatgcttgctgactactcaggttgaaggtcagcctcagcccttaggtccgttaaattaagttctaattttgaaatgtaggttattatgttataggctaggtttatggtagactgggtctttgacatattggacttcagtaataacttatgcaaaatgattcaacttattctttttagggcttaatttacatagctataaattaggttttcctttggacaaaaggtgttagagggcaaaaataaaacctttagccaggtagtctccatcactctgtatataatttgtgatttggagaaaaatgacctgaagtttgtaattttttggcttctgaatgtactatgattgttctatatgttatgatcttactgaaagttgtcgctaagttgtacttctacagtatgtggatctgatttcactttatatgatttattaataggtatacaattgtattttatctcatgtacatcatatttcttagtctaatgacaatccagaacttgagaatgcattaagtaggtttatgtattgtgactttccgttttttagtagacatattctttggagactgggatttgaaagaagaaaaattgtgtgatttcctacaattaacaaccaaatctttatagttaataggaattttttaaagactttttttgaacttgtaaacacaaactgaaatcaggttgttgaactaggctttcaagtaactagattaggaattgtatttttgttggctgtttagtgttcaacccaaatgatggtatgagatcttgtacttgcaagtaaactgtgtttttccatttctaatccagtattcaatgcttcacatattttatacacacacacacacacacacacacacacacacacacacacatatttattcgtcccaaaattcattattcagattagtttgaggaagtttttctggtccatgagaaatgacagtgtagtattactaaagatggttttaatatataccaacagaaaaaaaaagtgctgtgccagacatagaaatttgctgctaacattttattttagtatcttctagtcttttttagggacatacaaattttagaagttttttttttttaaatagaactatattgtggtttataaattactttttcactgaatattaataaatattttcta

SEQ ID NO: 138000 - DNA, 1753 bp, Homo sapiens
tgctaatgatttttttttttcctactggcttggtgtgggtatgctgttgatgacggctctgtattgttaatccagcatattttcggaggaaactaatgatttctggatgttatttatgcctaagaagatatttaatgattgtttacctgatttcagcacaattaatggcatggatgtatcacaagtcccttaatcgtttgatgttcactttgctttcattttaaacactttttcaaatgtctgtctcctacacatgttgtctattctctatgcaaatttgctaaatttggaataatttttttctgtgattttttttttgtggtagttctgtttcgttagcaaaactgctttgattctcctttattgtacttgaaaaacaaaggtggcgttttaaattaagtattttacttgtttttccatttgagtaagggttttaaatatctagcaattttacggtaatttttttttcaatttcctttgtctgtatagcacaggtaagtattgcaagtcatttaagtataacacaggtgtccagccagtagataggatctacttgtagatatctgaactggctgtagttgttactggctttcttttttctactagaattcccagtcaggaaagacatatgatgtgtagtggtgacctttgtccttctatggtcaagatttaaacattataaccagtgtttctttcttgttctctgttctttggtgatattgggactttcagaaaataagaaataggtcttcctcaaaaaagaaaaaaaagaaaaagagaaaaaggaagagtttggatttctagtgttaggaaaagtgattcatttttctgacttaatatcctttgtctttaactttgaaatttcaaaataaaattttgaaatttgagatgagtaaattctgtgttttcatttttcaagtataaaaatattgaactagttatttaatatgatcaaatttcccatattaatttgaatatattttttcttgttaaaatgcctctaaaactggtttagatttttgtataaaattagggaatacacatgtaataattcaggcctattgaaacataagtctgtatgaattattaataactgtgggttcttaatttcatagtttttattgttctacctccaagatttttttaaaaagtcatttgatattaattttcctggtaccctcaccaaaaaggatacagagctacttttcattaactacccacattgtaggatttgcgactaaaaaaaaatatttcaaaccattgtttagctttttgattatttggtgacttcattattatctcgtgaattccaccattttggggtacagatcattatgccttagttttatatatatatatatatatatatatatatatatatttttttttttttttttttttttgagacagagtctcactctgtcacccaggctggagtgcagaggcatgatctcggctcactgcagcctccacttccctgtttcaagcaattctcctgcctcagcctcctgagtagctgagattacaggcacccgccagcacacctggctaatttttgaatttttagtagagatgagatttcaccatgttggccaggctgctctcgaactcctgacctcaagtgatccacccgcctcagcctcccaaagtgctgggattacaggcatgagccaccgtgcctggccagtcatattttttaatagaaaacttaagatactaattttgaacctgagttgaaatatatactaatatg

SEQ ID NO: 138001 - DNA, 2214 bp, Homo sapiens
agttttactgtactgaactgtatctctgggtaactcaggtcacaaataccatacacattcaactgcattttaaaattacttgctactaccaaaatattaatactgtttttgctattcctcgaagatacagcaccagttaacgtcaaaattaaaatggaccagtacgaaggttattgtggcaagaaacttatgctaatatgatggctgttgatacagaattgttactgagaagggtggactttaaaagccttgtgccctgggaaggaactctgaaatatataaggtccagctatttatcattttactgctggcacttcacaaataacctgttatgttttctataagaatgctttttactcatattttggagtccagagtttagaccccacttagtttgctttaaagtttttggctttcagttttattttacatggttttaattatatagcttatttaaagctaattttaagtacacttttttccctcaaggagatgaagccttatctaaatcagtgcctgtcacagtggatgatgatgatgacgacaatgatcctgagaataggtatgattccatctgtaaggactttaaaaagattataacacaccctaggcatgggcacaaacagcagcaacggaacagcaagcaggttgtaaaaaccaggagtgcctgccttagaaagactcgctcacagtcttcctgcaagtttgaaagaaaggccagaaaatgggctaaaactcagaaaccttaagagaaagtaatatcattatttacacacctagcatagggtgtgttataaatacagaactgtcaattttatgttgctatgtaaactgcagtaatttttttggaataatttattttgacagattattgatgaaagtaaatcatatctcagtaaattggtaacaacagacatctcctctatatttgactattgttaattgccatccaatatggtggtcctatttattaaggcctgttgagaagaaacaaaaagagagattactcagatatttaagattaagaaattgctttcaaaataagtgtcagtttacaaggtatctagactgagttagagtttaaccagttttcaaataaaatagaaatacacggtatgagagcatttactttaataagacttaataggtttaaatgtcaacagtgtagcctatacagatatacttaagtaaggggtggctgggtgaagaaaaaaaaagacactatcagtgtagtgaagaataaggaaaacaacagtattaaagactatagctataatgtttcaacataacttttaaacacttcctggacaatagcataccccatgctcataatcttcaacaagaagacagcatggtatagtgcatggaattttggaataatgggcataagggtatctgatttctaacatttttaacaactgtctgtgtcatcatgggcaagtgactttactttttgtcaaaaatttactatatttaagaagaaaaagttgggcgaaattttctgtaattctagtaccaaaaaatccatgatagatttgagatgatttcattaaagagcactacattaaccattcatttattcctaatagtaagttctaacattaagaaaacataaaaatatacatgtaattttctgtcataattttgtaagaaattaactgacttagtaaatgccctgggttcagctgttagtttcgctcttttatatcttgctgatgctgttaggtttctctgtttcaaaggtcagcattctgctaattaacagaagaatgtttttattaaggtgaatgaacagttttattttacagttttgaatagagcttaattgtggacacaaatattcagattctgcttgcctacttttttaaattaaaaaatgtatatccatttattttatgggataggtggtaggttccagaatggagtgataagggcatacaatttattcatcagggattttacattatatcatcacagccagatactgaaagcatttaaaattttactcttttttaagatgctttaatttttcttcatttatatttgctatttgattttctatacatcatgaggcctcagatgttactcaaaggctaataatgttttaaacattctatatcttaatttaactgtgaatgatttactttaatttcatatttaaccaccaaataagagtgttgttaaggtataatttttttgtgtgtgttagagctt

SEQ ID NO: 138002 - DNA, 2433 bp, Homo sapiens
attgtgtttaaaaattagttaaaatccattaaaaattatatgtcactgagctaattttatttctggttttatttatttggatcttctctctttttttcttagtctggctatttttaaactttggaaaattggtttctgtgattaaacagtttcactggtgaaatcagtatgtttgatttcaagtattttactacttttcttaagatctcacttgatttattgatacctatgaaagtttctgttatgcacctctcatgttgagaattattaatatttagtgtaataattaatatgaattcattaggccttaagaagggatggtgatatatggcaaatactcaattgatgcatctcttgataattacttatctcagcactgatctagatcactgtgttccattttgatttatttaactttgatctgaaggacaaataggctgatggggagtaaactttttctcaggtgtgtatcaagagaaactttgagaattcgtcacttcagcaaattccaatccttcaactgcttggtgaaataagccttgttgagattttctttaccctggatatttttgggggctaagctgattatttgggatgaaataagaaagaagataaatttgttagggaatttaacctgtgaaaaattgggccttgtcaatagaaacaagtagaatagaatatgagtgccttgaaaataagcgctgtaaaaagttctgtttttaaagataagtttgcgtgtgagccagtgttatgatattccttcagaatttacttacatgcttatgtaagcatgctgaatttatgtactcctctgtctaacttaattttaggtcacagttttagaaggttaaaagaaaaaccctgccccctattgagtttagaggattccagtttattcgcagtatttgggtatcatattacagctacagtattttcctagaaattggggcttggtaatggcatgaataaccaagatgaagaacatggtcctaggagattgcagtttaatgcaagacagacatagagaaatcattaaaaaaagtaacagaagaaagatataaaactagaatggggcctgtaatcccagcactttgggaggccaaggtgggtggattatctgaggtcagtagttcaaaaccagcctggccaacatggtgaaaccccatctctactaaaaatacaaaaaaattagccaggtgtagtggcgcacacctgtaatcccagctacttgggaggctgaggcaggagaatcgcttgaacccaggagatggagattgcagtgagccacgatcgcgccactgcacttgagcctgggcgacagagcgagactccgtctcaaaacagaaacagcaacaaacacaacaaactataatggggctacacaataaatggcaagtgaactacttaaatatttggggaaatatttagaagaatagttggcatttgaacttcaaaggataggtcaaattttgaaaggtgtagtaaagagggagtgacagtactgttactaattatatttcatttgaagattggtctgtttgaatgagatatttattgtgagtttgctgggatattatgaaatctcttctctctctctgtctcttttttttttttttgagttgaagtctcactctgccacccaggctggagtgcagtggtgcaatctcggctcactgcaatccctgctcactgcaacctctgccttccgggttcaagcgattctcatgcctcaggctcctgggtagctgagattacaggtgcatgccaccacattggctaatttttgtattttcagtagagacagggtttctccatgttggccaggctggcctcgagctcctgacctcaagtgatccgcctgcctcagcctctcaaaatgctggcattacaagcttgagccaccacgcctggccttatttagtgtatttctatcctgagcctgtaggtgtctgtttcctttatagattttttcctccatttcccttcaacattttattgtgaaaaacatttaagtatacaccaaagcatctaccattaatattatactgtattttcttgataacatatctatatatccttctgtctatccatcagtatatcttttttttgcctttttagctttttattttgcataattataaatccacagaaatttgtaaaaaaaaaaaaaaaatacagggaggtctcagataacctttacttagtttccctcaagggtaatatcttgtaactctagtacagtgtcaaaaccagaaaactgaagatttattcagatttcaccagtttcacatgcactcatttgtgtgtgtataagtatagttcagtgcagttgtaccacgtgtgtatctttgtataatcaccaccacaaccgatatatcaaaccagttccattatcacaaggctcccttgtgatactgctgtccttacctccat

SEQ ID NO: 138003 - DNA, 4589 bp, Homo sapiens
ttaacatttctctgataatcaatgatggtgagcagcttttcatatgcctgtttgtcatttgtatgtcttctttggagaaatgtccagtctaatcttttgcccattttttgattggattatttgattttttcctatagaattgttggagctctttatatattgtggttattaatccattgtcagatgggcactttgcaaaatgttctcccattctgtgggttgtcttttcattttgttgattgtatcctttgctgtgcagaagctttttaacttgatgtgatctcatttgccaatttttgctttggttgcctgagcttgtgtaatatgctcaataaatctttgcccacaccagtgtcctggagattttccccagtgtttttaattacttaaaaaaataaagtttttgtcctttatgaatgttatcaattttgaattaaatttccccttcctcttttcttttaatagaattgctttaagtattacatgagtgatgatattagccgtgactcagatggaatggatgaacaatgtaggtaggtaatatagatgagctaacattcagtgtttcctacttttgggaggaattgttacataatcatttatgaggtttgtctttcatagtatcgtcattgatgtctttaatgaaaggttgttcttttccataaaaccctggatttatgtctagtttaagtttctaataaagagtaagcagatgacctaaattaccactaaaattactggcagtaaaatttaaattgcattataacaaagagattaaaatgagttttgttgggaataatgtttatttttatttttttacatatcttttcagtttcctgaaagaagggaataatgttttaatctttaaaacatttcaggtggtgtgcggaaggtggaaacttgatttgttgtgacttttgccataatgctttctgcaagaaatgcattctacgcaaccttggtcgaaaggagttgtccacaataatggatgaaaacaaccaatggtattgctacatttgtcacccagagcctttgttggacttggtcactgcatgtaacagcgtatttgagaatttagaacagttgttgcagcaaaataagaagaagataaaagttgacagtgaaaagagtaataaagtatatgaacatacatccagattttctccaaagaagactagttcaaattgtaatggagaagaaaagaaattagatgattcctgttctggctctgtaacctactcttattccgcactaattgtgcccaaagagatgattaagaaggcaaaaaaactgattgagaccacagccaacatgaactccagttatgttaaatttttaaagcaggcaacagataattcagaaatcagttctgctacaaaattacgtcagcttaaggcttttaagtctgtgttggctgatattaagaaggctcatcttgcattggaagaagacttaaattccgagtttcgagcgatggatgctgtaaacaaagagaaaaataccaaagagcataaagtcatagatgctaagtttgaaacaaaagcacgaaaaggagaaaaaccttgtgctttggaaaagaaggatatttcaaagtcagaagctaaactttcaagaaaacaggtagatagtgagcacatgcatcagaatgttccaacagaggaacaaagaacaaataaaagtaccggtggtgaacataagaaatctgatagaaaagaagaacctcaatatgaacctgccaacacttctgaagatttagacatggatattgtgtctgttccttcctcagttccagaagacatttttgagaatcttgagactgctatggaagttcagagttcagttgatcatcaaggggatggcagcagtggaactgaacaagaagtggagagttcatctgtaaaattaaatatttcttcaaaagacaacagaggaggtattaaatcaaaaactacagctaaagtaacaaaagaattatatgttaaactcactcctgtttccctttctaattccccaattaaaggtgctgattgtcaggaagttccacaagataaagatggctataaaagttgtggtctgaaccccaagttagagaaatgtggacttggacaggaaaacagtgataatgagcatttggttgaaaatgaagtttcattacttttagaggaatctgatcttcgaagatccccacgtgtaaagactacacccttgaggcgaccgacagaaactaaccctgtaacatctaattcagatgaagaatgtaatgaaacagttaaggagaaacaaaaactatcagttccagtgagaaaaaaggataagcgtaattcttctgacagtgctatagataatcctaagcctaataaattgccaaaatctaagcaatcagagactgtggatcaaaattcagattctgatgaaatgctagcaatcctcaaagaggtgagcaggatgagtcacagttcttcttcagatactgatattaatgaaattcatacaaaccataagactttgtatgatttaaagactcaggcggggaaagatgataaaggaaaaaggaaacgaaaaagttctacatctggctcagattttgatactaaaaagggcaaatcagctaagagctctataatttctaaaaagaaacgacaaacccagtctgagtcttctaattatgactcagaattagaaaaagagataaagagcatgagtaaaattggtgctgccagaaccaccaaaaaaagaattccaaatacaaaagattttgactcttctgaagatgagaaacacagcaaaaaaggaatggataatcaagggcacaaaaatttgaagacctcacaagaaggatcatctgatgatgctgaaagaaaacaagagagagagactttctcttcagcagaaggcacagttgataaagacacgaccatcatggaattaagagatcgacttcctaagaagcagcaagcaagtgcttccactgatggtgtcgataagctttctgggaaagagcagagttttacttctttggaagttagaaaagttgctgaaactaaagaaaagagcaagcatctcaaaaccaaaacatgtaaaaaagtacaggatggcttatctgatattgcagagaaattcctaaagaaagaccagagcgatgaaacttctgaagatgataaaaagcagagcaaaaagggaactgaagaaaaaaagaaaccttcagactttaagaaaaaagtaattaaaatggaacaacagtatgaatcttcatctgatggcactgaaaagttacctgagcgagaagaaatttgtcattttcctaagggcataaaacaaattaagaatggaacaactgatggagaaaagaaaagtaaaaaaataagagataaaacttctaaaaagaaggatgaattatctgattatgctgagaagtcaacagggaaaggagatagttgtgactcttcagaggataaaaagagtaagaatggagcatatggtagagagaagaaaaggtgcaagttgcttggaaagagttcaaggaagagacaagattgttcatcatctgatactgagaaatattccatgaaagaagatggttgtaactcttctgataagagactgaaaagaatagaattgagggaaagaagaaatttaagttcaaagagaaatactaaggaaatacaaagtggctcatcatcatctgatgctgaggaaagttctgaagataataaaaagaagaagcaaagaacttcatctaaaaagaaggcagtcattgtcaaggagaaaaagagaaactccctaagaacaagcactaaaaggaagcaagctgacattacatcctcatcttcttctgatatagaagatgatgatcagaattctataggtgagggaagcagcgatgaacagaaaattaagcctgtgactgaaaatttagtgctgtcttcacatactggattttgccaatcttcaggtatgcaaaaataaataaaaaattcataatttgtacttccccctcttgagttactacattgtttaatttcctctgaagctaatcaaatttagggttactacttaggagaataccacttaaaaattatttaggagtttattaaaaaaagtttccctatttatttttatgctgccattggaagatattttgaacattgctagtattcagtatcagggatctcaaatttgttgagtaaatgacaaaatttctttatcaatgtttagtgcttttctctggagtaatgagcagaaggaaaagcggactggtgccagtggttcagtagctatttagttatataatggaagtgagtgcttggtactggtatgacatggtgtgtcaaaattttaactgccatgcatatggctttttaagtttgaacatataactttgtgtctcatgaaatcccctttaattatttttaatttacctcattaaaaccctttgttgatgcttattaactagtttctaatgacatgaacagatgtttttcttttaaaaacactgtcaaaatgaaggaagaaaatccaaacattagctggattagcctaccctgatgaggtagagtactaggaacattaaagtttgggtcagctggtga

SEQ ID NO: 138004 - DNA, 1294 bp, Homo sapiens
attggtaatatcataaaattaccaagtttttacataccatattgataggatctgtgcagacaattccaatgagaataaaaacctttatggcatacttaagtgtaggattgcaaaagaatctgttccgtatatgttacttacttccccattctttaaggactgatactgaatttatttgcaaagcaataacaaaataagagctcttggcccctagttttagaactttttatgggttctcttaatgttatttcaagttgtaaaaaatggcatttgcatctgtaaaaggaaacaattaggatttgtaacttggaatttgccaaggttgtcatgtgcttagtaagtcgataaaatattaaccttttttacttgtgtccaatatgccatttttctaaggattatgaggtatttcatgtctaatacaaaagttacaaaatgctgactaaagtaagtatctttttctgtgtataaatgtgtgaataatagccactcctttctcctagaagatgggcttcatgggattgtgagctgcactgcttgtggacaacaggtcaatcattttcaaaaagattccatttatagacacccttcattgcaagttcttatttgtaaggtatgtaatgatctgttgatatttcataccgtaaatatttgaatgcttaccatataccaggcctttgagggcacagtcttgaagaaagatgaaaatggtatctgcccttggaagacttctactatagtggggaaaatagacgtacaaagcctaagtgtcatgataggggagatactgtgattatgggagcacaccggaagcctgtgtaaataggatttggatggctttctagtggaaagctgtatgtgaaatatgaataagaatcagcctggtaagtgagattggttcatcatgttctgggaagaggcaacatagtattcagatactggtagttgagggagagcttggtgtgtttgaaaatctcaagagtggatgtgtgtaatgtttgtgttttataatctttccccttatatatcctacttccccaaatgtaaactatctatgtggagcagggttttgacataacttggagatgatagaattaaaaatgttttttatgtgttgattataattttaacagtctgtgccacttttttgttagtaataccttggagttaattttaaatatctataaatgtgggcctggcatggtggctcatgcttgtaatcctagcactttgggatgctgaggcaggtggatctcctgaggtcaggagttcgagaccagcctggctaacatggtga

SEQ ID NO: 138005 - DNA, 1875 bp, Homo sapiens
tttaaatatatttcataattaaaaataaaaaatttaaacatgtatacagcaacaagtacataaagtaacatttcaacattttaccatatttgcttcagatctcacttaagtaaaatattggttcagtcctactctcatccatttccccttcttcccaccccacaggtaatgattatattgaagttttatgcatgtgcatgtgtgtgcatgtttttctatgttttttatatatgtattcataaaacatttttcatttaaaagtataacaaaataatatgctgtatatatcatttgggaacgtttttcatttaacattgtttttgaattgtattcatgtcagtaaatgtacatctagtttgtttatttttcactgctctatagaattatgttatatcaataagccactattcatttcccacataggaagttattcccaatttttcattttctaattttctaattagtgctgtggtgaatatccttatatttgattccttgtgcacatgtgggagaaaatctccaaagaattacctagttttgtttaattcttgagcgatgtatgcaccaaagcacatagaagatacttagtaagtattacttaacactggatgaacattcagattctacattttatttatcttgttagtttatctgaatgaaatcattgtttgaaatgaaaaagtatggtgtggtgtatttgtttctgttaaaacaaatacagaatatatgaatacccaagatcaaactggtgtttgtaaataatgtgattataatacattaggcttgtaatgcctgctattaggtaggttgagataggaggattgcttgaactcaggcgtttgaggctacagtgatttataattgtgccattgtactccagtctgggtgatggattgagaccccatctttaaaattaaaaaaataaataaataaaaatattagcaacataaatagtaaaccttcaagtttacttttctaaaaaagtatgatggtgttcttatacattaacgtttttagcttctggctaggtgtggtggctcacacctgtaatcccagcattttgggaggctgatgccagaagattgcttgagcccaggagttggagaccagcctgggcaacacagtgagacccagtctttaaaaagaattagctgggtgtagtggtgtatgcctatagtcccagctactcaggaggctgaggtaggaggattgcttgagcctgggaggtagaggctgcagtgagctgaatttgcaccattgcattccagcctaggtgacagagtgagactctagctcttaaaaatttttttaaagtttctacaaataaaaatattcatgataatatttgggtccatggcgctttggaccttaaacctaacagaaacccaaaagagaaaattaaaagggtgaaaaatatatgtgatgttttgttttttatttaaggatggagccaatttgttttttagttgtctcctttttatttgtgaatgtaagcattttgagtgacttctgaattataatctaccatcttattttgatcaaggtcttggttgcacatcaggatcatctttgaaactttaagaaaatgcctgagagattttaattcagtggtttaggggtgggaatggctgtttttaaaaagattcttcagatgactctaatgtttagctcagggtgtgaaacactgccttagcagaactagggacaagagggaggctggagaggtttctgtaggttttcttcagtctgtttatcaggagacagtacagaatgggactctgcctttttcccccagtcgttctgatgttttgctgccaaaatagatatacctgcaatgtcttgtttgtctttatttggaaatagtagacagtattg

SEQ ID NO: 138006 - DNA, 1707 bp, Homo sapiens
ggggagtggtggctcacacctgtaataccagcactttaggaagccaaggcaggagaattacttgagtcctggagttcgagaccagcttgggcaatatggtgagaccccatatctacaaaaaataaaaatatcagctggacatagcggcgcatgcctgtagtcctagctattctggaggctgaggtgggaggatcacttgagcccaggtgatcgaggctgcagtgagccgtgattgcaccactgcactgcagcctggatgacagagtgagaccctgtctcaaaaaaattaaaacacacacacacacacacacacacacacacacacacacacactctaatattggctaaccatctataaaaagtttgcatcagaaggattcatttagaaataatagtggactatgtgtcccacttgtttgtgtgtgattcttaaatggtgcctatatatattttggggcagcttaataaagccagaattcataactataaaaggaatgaatctccaaatgatagaacatgacactaaatttctaagtagaagtgtagtgaaagcatatccatttaatattgatcagattatataattgtgaaattatagtgaagttcttatattggtgaaattttgtgtggatttttattttaatgctatgattatcttgctggaaccagtaaaatatatctatttttataacatattttatatattcattttccgattaaataatttgtaaggttgttggcaaaaataaaggaaatattatatagtcttttgtccacaaaggggtagtcaactccttttgagcataaggaatctttctgagaatctagttcatggtagggaaactgccattgcagcaacagagctcattaaagctaaggtagtagtcttaaaatttaagagaatcctcaattataaagtgatggtaaagatcagtagtaagagtttctttcctctgatcataggttctctagagaagacaaataactaagtgttctgcattgtgtacacttagtgtacagagtgtctaaatggtgttatttttgggaagggaccctgtagcagtcagtgtctgaaatgtggataagggctgaaagaataaaagaaccactgttgttgacgagggtattcctagtgccactttggtatgctgctgacatttggtctcagctgataagtttcaggaacattttattgaatgatctgtgtaggaatgttttggtatcacgcttaagggaatacatgcatttatagccatcagtagcacttaaatctttcacatctattttcatcttaatgatttgttacatttttaagctgtcagaaatcacacaggaaatttaacactaggtttactttatatacacatatatagataaattggtgatctgaaatactgaattggtgtagttaatatttaaactttttaagaaagctggttccaaattgaagcctaacttaggaaactgtcaagaatgtaaactttcttgtattacaagaaatgtaagacattacaagaatgtaagacaatatataaagtcttatattgatttggaataatattataacacaaagatacggttaaagttaacatttcaggagctgattttttaaaaaattttcagtatcataccctattttgacattctcttcccagtttaattgttagaaagtatattttacacctaacttttttacatgacacaata

SEQ ID NO: 138007 - DNA, 1780 bp, Homo sapiens
tttttttgtcgttgttgttaatttaaaatctttagttcttttcaaatgctggggcttctctgagtgtctacatgcaatgattgctgtgaataacttttttttggtggggattatttaattttactacaatctgtaaaatctcaatcatctgtgtcctccccccccccaccctttcagagactcagaaactcatttaacaactagatgctataacttgtcaaaatttgcttgttgaataacatagagccatatttcagagaaagcccctggtgactacctgcttttttttccttaattgttgccaatgatagccagttactaagcccagcaatgtaggtaaacattgaaacctaaaccctttttactatgcctgtcttatttgctcttgagagaactaatgaaaacttaaattgacagcctctctcttcaattcacatgttttatagttaaggaaggacattctttctaaaatattaacatagggatcaacaaatgatctcattctacaatttattgttagggtacttcagctaaagtatcttaatctgttaaaactctttaaggactttacagagtagtgaaactttgacataccagttgggaaatgctgcagtatagatacaggagtaatagaatgaacttcatttcccccaccaatacccctcccttgcaatataaaactacccttaaaaatctttctgagtttatgatttggattatgaaaataggatgtctttaaaaattttttccctctgaaccacacatattttatgaattctttatggaacttagcatagatgttcatattcataacagcttttgtgataggcactataaaaattcagaactgggttgaggctttctgtttgattcacacatttgttttgtaatcactccataatacctccctttcctgtttttatgaactatatttcaacaaataaactgttgacacctggcccttttactatttccctgttttatttacttttgtgaggtccttacaccaatatctaaagcttgaaagaaacaaactatgtaccagcaatgttggctttatctgaactgaagtcttgtacttcacttgcacatttaatatgtgtaatggttttttaaatgaaatcattctaggtacagtgattgtacagccagagccagtgctgaatgaagacaaagatgattttaaagggcctgaatttagaagcagaagtaaaatgaaaactgaaaatctcaaaaaacgcggaggtaaatacaagtgaaaatgaaacatgaatttaaattgctgtttatgaccatattggaaaatcggatgtgcttactaaaaatacctccacttttctgccttttgtttattaaaagcactacttaaatataacttctgtttctctctgagctctgaagcagaaaaggttaagcaccatttatcgaaacacctttgccttcagtggctattaagttatctcaagaagcgtagcatttccttcttccacatgttctataatacatatatgccataatactatgttttccccccaaccctaaaataattttagattcatgcaaaatcttgtctgtggcctacaggtaactttatatatatttagagttggatagagtgacgtacatctgcattagtattagttggggtattataaatgcaagtcccttgactccactcctcacaaattagaatttctgttgatgaggtcaagaatgtactccagtttgttcttgtgtacactgaagtttcaaatccactaatctaagaatggcaacatgg

SEQ ID NO: 138008 - DNA, 1634 bp, Homo sapiens
tgtaagttataaggagaaaaaagagtggtaaaaaacacttttttctgctaaattgtcaactcaagtcatacataaaaactgaaacttttctaacataatgtagtacccaatatactatgcagtataattgttattagaagtttgccgcttagtctattggactttcattgtttctaaccagtgggaatgtctcttaaaaaccaagcttgtttgatattaatttattctctgaagtagtgattcttaaagaagagtgtcctccagggtctccctggtagctttttcagaatgcgtatgccttggtcctgctccagacctactgaatcataatcttcagtgatatggtatagacatacatgcttccctaggtgattctgatgtgcttccttgttgagacccactgctcaatctcaacatgttatttatgttctttgggtattgttccagttgtcagaaacattcataattctatgaacttaattctttcataggaaaccttcaattgtaacaaagtatgtagaatcagatgatgaaaaacctttggatgatgaaactgtaaatgaagatgcgtctaatgaaaattcagaaaatgatattactatgcagagcttgccaaaaggtaatgtgtgttaatttttcatgaagttaaagttgaaatgaatttttaaacatcatttttataaaattggaacttgattactgttaactatgtacaaacgaccaaacatggcattttcctagtggttgtctagaaatatatttgtatgccaatgataatatgtgttattgaagttaaaaatttggaatattcagttggttttgtaaagaatgaaatctatttttttctttcctttgagttttagacaaggggctttagtttccaaattatacttcagtgtgtaagcaggtttaaaaatttaatatattaggttttggttcagtcaatgttaatgtgcttgctttatacaaaaatgtaatgactgttcctgaaaacttaaaaatcatgtacagtctagtttagtcttattgcattcttaaattccctaaggctaaaagctgaagttaactatcatagatagatttagttgtatttcttgctgttatcttttttaaaaaactttgtcacatacctctcaactgttgaagttctaaccataaaaccttgttaataagaatagggaacaatagccaaatgaatatcttggactcttcatagctcaagtctgagagcaatataattggatgatgagaatgacagggaacttggttcaaagagtcaaattttagattttttttctttgttaaataatatgttgtagtctcttggcacatttttcaaattcattctcatagatcttttacagcagtgcttattaaaccttgttccctgtctatgtttttatgacatattttcaaattatggaagtttaaaaaatacagtaggtaggagggatgggactttccttgactaggataaattagaagttacaaaaggtgataaatgaaatgaggaaaggaaattaatgaaagaagagagataggggcctaccgcttacttagttttgcaaatcatttatgacaattttatgtaatggttttggtggccaagggcagaaacaactaacatgggagtc

SEQ ID NO: 138009 - DNA, 1044 bp, Homo sapiens
tttttcttggtcagtctaccctaaagtttgttcatcttttcttcccccacaggtaagttgttacacaatccctagcagattccaactttcatggccaaggtcctctttgatcatctttttaaaaaattagtttttggccaggtgcctgtggctcacgcctgcaatctcagcactttgggaggccaaggtgggcagaccacttgaacccaggagttagagaccaggctgggcaacatgacaaaaccccatctccacaaaaaattagccaggtgtggtggtgcgcgcctgtagtcccagctacctgggaggcttagaggggaggatcacctgaacccgggaggttgaggctaaagtgaaccatgatagcacctctgcactccagtatggacaatggagtgagaccctatctctaaaaaaaaaggaggaaaaggaaaagaactactctttggttttattgattttttttttctattgcttttctatttcctatttcattagtttcatgaatttctgccataatctttattatttccttctccttgattttggtttagtttgctcttattttcccagtattttatggtaaaatgaaatatactttattggtagtatgttttttatttttagtgtaatagtttaaattttcttctgctgggaaatgtcttgcaatatttataaactacaacaggaaatgtttttataccaaagtaatctttacagagatttcatgctttataaggaggggttagtatgcaaaaggagagtgattctagtgaaagaacacttctaggaatattttaatgtgagtagtatgttaacaatactgccagacttcatagtgtgagaatgggtttgtggagttataggtattgatgttctgtttgataatgcatcgaagagataaataatgttctttatttcttcttttttagataaaatcagtggttctggaagtaactctgatatgatggaaaacagcaaggaagaggtaaggataattatttagagatatttgttagttacgattaaccaagtagagcatat

SEQ ID NO: 138010 - DNA, 1011 bp, Homo sapiens
tttatttatttatttttatttttatttttttgagatggagtctcgctgtgtcacacaggctggagtgcagtggcgccatctcagctcactgcaacctccgcctcctgggttcaagcgattctcctgtctcagcctcttaagtagctggaactacaggtgcacaccaccgtgcccagctaatttttgtatttttagtggagacggcgttttgccatctctggatggcaggctggtctggaactcctgaccttaggtgatccacctgcctcagcctcccaaagtgctctgattacaggcgtgagccaccaagcccggcctttccccagtttatttgtattcatttttctagtcctcattgtacccacagtttcagagttgttaaccatatcatcgcattaaagaaacgtaactatagttcagtatttctttaaagttctttttgtctttagaatgatgttacgttgtcggagtcctgtgttcactagttgaggaactccttcagtagtggtatctccagttggacaaacagatgtcactcacaaataccaattgtaaattctgggcagcatactgaaggctagatatcaacaaagtagataaactggaggggagtcaacacatggaagaagaagtggcaatggctgaattccccattgttaatcctttttgcttcagccaaggatcctcttagctccatctgtggcctttaagacttggataaaaatctacagtcttattggatgtgaaatcaaggaaaaaatttagggagaccacagcagctgtaacatgagtagagagatcccatctagaaaagagccacagaacgggaaaaccagattgcacgaaaactctcccaatagctctggtcctgttgcctaagtgcactccagattccaaccagcctggttaggactaaaagaacagaacaaaagctttgagttgtttggtactacagggtggaaagggtttggagtttcatttcaagtaagttaactatctgtttgtttggtt

SEQ ID NO: 138011 - DNA, 1057 bp, Homo sapiens
tgtttctttggttttttaaaaatctgaagcagtttgtctgccttttgggactatgactttttttgaaatgtacaggtgtgttactttgtgaaatggccctcaggattatctgtttagttatggttagattcaggttatacatttttggcaggaatactacataaagtggtgttctgttctccatgcatcctgttacatggcacatgatgtgatttgcccctttactggtgatgttaacttaggttgtttggttatggttgtgtttgctaggtaaacccagtctaaagttatgatttattccattgtaactaataactaatttaatggggggcactttgagattactaaggtattctttttattatcaaaacttaatatgttttcttttgcaaatgaccacaaagtttgcagcttaaaacaacccaaatttgttattttacagttctgtaggttcggagtccggtgggccttgctggacccttctcgggctatcacaaggtcaaagtcaagatgttagtaggactaggttcctttctggagactgtagaaaaatccattcctaagctcattcaggttgttggcagaattcagttctttatgataatcggttagaggtccttctttctcactcactattggccaagaccccctcctagttcttttcaggtgtcttcatttcttctcacgtgatgccctccatcttcaaatccagcaacagcacatcaagtctctctcaagctttgaagctctctgacctagctttttgcttgctaattctgctgccacctgctaccagctggagacatttttctgtttttaaggattcatgtgattagattaggtccctctccctctcatctcctcctgattatctcttgagtttaagatcaactgtgccatattacataacacagttatgggagtgatatgtcatcacattgataatttctggggatttgcggtgtagaatcttgtgggccattcctagaaggtctgtttatcacagcatacatttgtgattcttagctgaataatttattcctatgatgggttcaaa

SEQ ID NO: 138012 - DNA, 1114 bp, Homo sapiens
ctcagtattttcgaaatgtttagtaagtaatatcagcagtttccttaaatgatattttaatcctaggtaagtgtacaggtaggttgtgttactcatatttttatattcttagtgaaatagaattcttttttttttttttttttgagacagggtctgactgttgccttggctagagtgcagtggcatgatcttggctcactgcaacctctgcctcacaaggctcaagccatcctcccacctcagcctcctgagtagctgagaccacaggcatgagccacccatgctctattatgagccaccacacctggcctaaaattcgttttctttaatattttttctttctacacccacaactgtaacatttcccttagtttttactttgaatgtgcatactcttacacgacttacagtatggctatattttcagtttgctagagctttacaattaatttaaaacatgaaaggctaattaagggaattctttaaattttgttttaatagtgaaagcaagttgaatacattggtgcagaagcttcatgacttccttgcacactcatcagaagaatctgaagaaacaagttctcctccacgacttgcaatgaatcaaaacacaggtaaattgaaaaagaatgtgctataccttctagtcttttttctattttttttttacacttatggaggtaaccatttattttattcagagagcagcttttaaaagagatttcagtttgtggaaaatgacagattagcaagctttatagaagcccctattatgtatcttagctatatctgatacaggagattttaattttggtaagtatgactatagaaagcttagaaaaggaagcatttatggttttatatgtaatggaaatgtgttatagaatggctagtgaatgttgactgtgaaaaaatagtattagaagaggcaggagtagtataggaatgttttgtcctagcaatcattcatgtattaggagttaaatttttatttttatttttgtgatggagtctcgctctgtcacccagtctggagttcaatggcatgatcttggctcactgcaacttccgcctcttgggctcaagctattctgctgcctcagcctcctgagta

SEQ ID NO: 138013 - DNA, 1023 bp, Homo sapiens
ctgccttggcctcccaaagtgcagggattatagatgtgagccatgtaaataaagttctattggaatacacctatgtccatttatttacattgtctgtggctgcttttgcactgtagttgcagagttgaatagctgcagcagagacctagtagcccacaaagcctaaaatgtttactgtctggccctgtattgaaagagtttgctgattattgtgctagatgaatgcaggatactacacccctctaaaaagagctgcatagaaatacatgcatatagatgcacacacgtctgacatctaccagctacctcatttcaccacttgggttataaaccacacatatttacatctgttgtacaattttcaatccgatttcagataaccttccttctaccacttcacaataattcatgagctgcaacccttttgatgcccacttcacaagcaaacttcaggtctttttcaaagtaaagtgccacatttattgttatatttgagcatttattatttaacatgtcaaactgtgctaccatttttctttggtttctttgttttaaaaaaagtcactgatgaaatttttgaatgttgtgcttctaacctcatttttcctatgagttctatggtgttaattgcacaattttacatagtttggtggtttttaggaacccatatgttacattattgaggaactgactaattatcatcctgtaaaaagtactaattcattcaccaaacatttctggggtgatgtaaatattaagtgagttaaatgggcataaagcacttatgtctttattgttactcaaatattagttattactgattactattaccatgtgtcaggaactgtaataagtagtgcattgatgaacaagacagataagggacctgtctccatgaagcttacattgtatttttaaaaatctattaatatacattttggctagtaaccgagcccttgccccacagaaaagttgtgctgttacacaaaataatattttaagatccatccacaagtcaaagac

SEQ ID NO: 138014 - DNA, 1090 bp, Homo sapiens
agcactttgggaggccgaggcaggtggatcatgaggtcaggagttcaagaccagcctggccaagatggtgaaaccccatctctactaaaaatacaaaaaaaaatcatctcggtgtggtggtgggcacctgtaatctcagctactagggaggctgagacagagaattgcttgaacccaggaggcggaggttgcagtgagctgagattgcgccactgcagcctgggcgacagggtgagagtctgtctcaaaaacaaaaacaaaaacaaataagcaaaaaattctgcttatatgagtgtttatcattttctcttatctgccttttgtgggttagggagaagggtagtggtgagataaagtttctttattcagtgtatttatatctttttgccttaaaacttacatggttaggttacaggtgttttgttgctgatacttgtcatagtatcatgtatacctggttgtataaacatttattggaaaggaaaaaacatttttgttggaaagtttggtaattattgtggcttaggatatgttctattttgaaagattgctatatccagtatatttctgcccttttatgattgaagatgtacgtctgaaaatacctatgttagttctagccggttgttctttttgcgctgggaagtctttgaattttgcactgtagctgctattttcagatcctgtctctgaaactttgtctctcagttttagcttgaagtagccatttcctgtatctgtagtccagcactcttgttaactgtcccatacaatatttgttaagaaattattgttctggcagtagtattcacatgtatatatcctgcactccatattttgggggaatgctttattagttgatcaaatacttaagtatcaatttggggccaggcatggcactgtgttagggttatgccaaaggtaataaaattcctgccatcttaaggcattcttagtcaagtgagggagattggtaagtaaatgagcaattagaaagcagtgctaaaatatggaaatatattgattgcgctagggatcagaaatgaaagaaagcctaatttgggggatgtctaggaaagttttgcaaagg

SEQ ID NO: 138015 - DNA, 1002 bp, Homo sapiens
gtgatgtatgctgctaggactgggaccttcccttcagggcagcagattcccttctggcccaggatgtgtctagaattgtcatcctggagctagggcctggaatggaggcttcatgactgatgaactttaatttgttttctttatttttattttttttgagatggagtctcactctgttgcccaggctggagtgcaatggcaccatcttggctcactacaacctttgcctcctgggttcaagcgattctcctgcctcagcctcccaagtagctgggattacaggcaagtgccaccacacctggccaatttttgtatttttagtagagacggggtttcaccatgttggccagccaggctggtctcaaactcctgacctcaggtgatctgcccgcctctgcctcccaaagtgctgggattacaggtgtgagccactgcgcttggccttaatttatttgcatataaagatttcagtattgggagatttggtgaaatttgtcattctaatccttatggcaattgattacttgaaaagctgacagctatattaccttgttattgatcttaaatataaaaaggcagaagttgtctaaattgagagattttgaatgtcttagaaagtatctgttaaggtggtagtttacaagcagttacattgtaacctaattgttgaaaaatgttatctgtgaaatacttgcatttccactatgaaaagcatgaaaccaggcccttggagggggaggagatgcaaattttataaaggtttttaaaaagcatttaaatatcaatggcttggttatgtaatgggttggggtgaaaagaaagacatttgtgaccttaatttttatcaggcccagttttattattggccacccttggcatagttggccttgagctttcagttatgtattgtatttctagagataagataaatgtagtacttaaaataatatttaagtattgatgtaggtgtgtgaaataattgtttcataagtaattgtatgt

SEQ ID NO: 138016 - DNA, 2294 bp, Homo sapiens
tgagataacccggataaaggattagtgtagtgccgagcatatagtaaactctcaataaatgtaggttgctgttattacttcgttaatatgtcaaagaaaaaagaggttggaccaaaagagcattttcaaaataaagtcaaactatgtcactagcactttcaggtcaattgggactaaattggaccccctgcgaaaaggtggaggggatcaaatgacgtcgaccgccttagcaacaggcccccaaagaaggtgaatttccgtagccaataagactctgtgctttggaggaggtagccaatggctgacggaaagagaaagagggaggacgcgccaattctcctgcctgagcctcggcccaacaaaatggcggcggcagcggtgtcgctttgtttccgcggctcctgcggcggtggcagtggtagcggcctttgagctgtggggaggttccagcagcagctacagtgacgactaagactccagtgcatttctatcgtaaccgggcgcgggggagcgcagatcggcgcccagcaatcacagaagccgacaaggcgttcaagcgaaaacatgaccgctgagcccatgaggtaaaacgcaaccccgtctcatgggccccagcggtctgggcccaggcaccgtctgagtcgggtgtttgggaaggcgttcgcttggtgggttaggcctgtgtgttgcttagccgaaagaggcatcgttttctctttaggtgagaagggtttcggggtatcggcgcaaggctccgacgggggtgggggtggggatggggtggggggaggtggggggggcgcggcctagggtatggggcgcttcttgcaatctcccctaaacggtgacgcttggtcgggctcctctgtttattctttggtgcctgtgggattgagacctcgaagtcggaggcggtctttggtatcccggtcatttttgctaatctttgggcctagaaactgcgtggggaagaagcggggggagggtgagaagagggggaggggtgggcgggcgcgaggatgtgagatcccaggacgacttagaggcgtttaggttgctggagatgggaagcacccgggccctgcgggattttttctctgcagccccaggagacaagcctttttttgattgggttgtggtgcagttccaggtatttaggtatcttttctactccatatcctgaaggatatccttgggtttatttctaggcgaggggggacttaacacagggttttgcttccagaggaccctagtatactactttttgtgatgtccagccttaatgggacctcaagtgtttccccactttctgggcaaatttcgaggagtaattaggccctatctttatttacttatttattccatgaaggatgaagggcaggttaacgtgggctgatgcgaagtaagatttattgcaagggaaaatgcctggcaggcctcctcttaaccaatcaagcacgtttattaggttgaagctgtttttctgtgtgcttctgatttgcctcttgacgggtctgaaaatttgggtagtcaatatgaaatgtatacacttttacccaggtggctggctggcgtttcagtttgacatttgaattttcatcccacaatgtgaattaagtaatttttttactcggagatgcatccttggcgtccagtggcaaaataaaattacaaggagcatgggtcagaattgcatttcaagttggcgaaatgtgcctttgagtaactcttagattggcatatgtttttagagcaatttagctagaatgtagaattgggcaatgagcctatgatacgtatgtctgtatttctgcatgaacaagcagtagattatattttctttaccttggggaaagatatgcttcagttcttagattgtagatctctagttgtgtacacgattgtggccttggtttctgaatttgtcagtaggctcaaatacaacaaatctttatctgtggggtattaggcacgtaagtggtacccagtataacttgttggcctgtaattaccaggcactcatgttcatatgcatggatggtgtaccttacagttaaattatgacctctagattttactaagtttcacaaagtctacatttgaaactatagtttgaagtcggatcttctcagtttctttagaatgaacaaattacgtatatagaatttctgaatagaataattaattttacacaagggtcagtttttcttactagtcttggatttttgtagatcttgatgataagagtaataatcataactaagttgagtgcttattgtcgttctttataatct

SEQ ID NO: 138017 - DNA, 1561 bp, Homo sapiens
gatcacaccactgcactccagcctggcaacagagcgagactccatctcaaaaaaaaaaaaaaaagtaagaaagaaaaggactcccttagaatgggaaagaaaaatcataaaatattgagctgatgcctgtatatagaaattaagcgtttctcgaaagctgttctatgttttgctgttattttagtctttattctcttcctttaggtggagaaacaaagtaccaatttgaagggattttttttattttgtcttttggtttctgtcagtagaaataaccatatgtgctaaccaaatttctgtgaagaatgttttcatggttatcattatatctaactataacctcccccatagttatgaagagtaacctgaaatgccactattgtggaaataggataattgtaattgtgaaaaaataattttaaggaaatcttacaagtattacattaaaaagatactatgactgccacctgccatttaccttctaataaccctgccatgtggtttgcagaaagagatggatatagtagcctcagaagaaatattttatgtgggttttttgtttttcgttactagatttcatggatgaggggatatggttgaccttttactttttaatggagcagccagtttttgttaattactcacttgtaaattgtgagattctgaattccttacctgctattcttgtacttgtctcaggccaaatctatgctgtggttcttatgagacttgtatgaagatgccctgatttgtacagattgaccacgggaatactactgccatgtaatctgtatagttccagataatttgtcatgaacattgacagaatgacaattttttgtatttgctttttctccctttaagagcacattcttctgtaaggagaaaggcagcattctggctaaaatgtgtagaaggtaatttactacacttataaaatagtgtgacttttgtgaaaattttgaattagctttcatatgaagtgccttaagtagactcttcatttacttttctggtaatggtttaaatatcatttgttatgcatttttaagatacagttcagaatgacacattgtagtggcaaagataaccaaatgtctggctgtttgctttttgaccatatcaataaacttttacaatctaaattctgagtttttgattaccatctaaagaggagtgagttttaaacactaaactagaattgtaaaattaggattttacattttgaagttataattaaattaatttaaatttcatattgtcctaaggacagtttgatgggacagtttctttaagtatttctggattgggatatattattctaggaatctatacatggtccctcattcttaatgttgttacccattaggtgagtcaaaacaaccaagatgagtagataaatgactgtttgcaacaattgatctacctttcgtcccagacagtgaacattccttgactaggtaatttccttttgataataaaaacttgatttgaaagttaccctggcagattataagttatatgaaactagacagcagctcttttgcaaacatggagtaga

SEQ ID NO: 138018 - DNA, 1460 bp, Homo sapiens
cagctactcagaaggctaagacagaatgatcacttgagcgtgggagtcccagaccagactgggcaacacagtgagaccccatctctaaaaaaatgaaaaaataaaattattaattagtgtctctattcaggagatattttaacttgaggttattctatttccttttgtcataagactaacgggtctctcagtgtttctcactttttgttattgatacccaaagattatcatgtacgtaccaaaatgctcttttatctgttaaaaccaacatactgcttattgattaaaagtaaatcctacttttctttcagagactaatagattggaatatatttttgtttcagctttctgatgagttaaaaaggtcccagagatatatagacactggagtactggaaattgaaaaacgaaaatcgtgtgtgtttgaaaagaagaatgcaacttgtatattttgtattacctctttttttcaagtgatttaaatagttaatcatttaaccaaagaagatgtgtagtgccttaacaagcaatcctctgtcaaaatctgaggtatttgaaaataattatcctcttaaccttctcttcccagtgaactttatggaacatttaatttagtacaattaagtatattataaaaattgtaaaactactactttgttttagttagaacaaagctcaaaactactttagttaacttggtcatctgattttatattgccttatccaaagatggggaaagtaagtcctgaccaggtgttcccacatatgcctgttacagataactacattaggaattcattcttagcttcttcatctttgtgtggatgtgtatactttacgcatctttccttttgagtagagaaattatgtgtgtcatgtggtcttctgaaaatggaacaccattcttcagagcacacgtctagccctcagcaagacagttgtttctcctcctccttgcatatttcctactgaaatacagtgctgtctatgattgtttttgttttgttgtttttttgagacggtctcgctgtgtcacacaggctggagtgcagtggcgtgagctcggctgactgcaaactctgcctcccaggtttaagcgattctcctgtcacagcttcccaagtagctgggatttacaggtgtgcaccgccatgccaggctaatttttgtgtttttagtagagacagggtttcgccaagttgtccaggctggtcttgaactcctgggctcaagtgatccgcccgcctcagtctcccaaagtgcgaggatgacatgtgtgagctaccacaccagcaatgtctatgcttctcgatagctgtgaacatgaaaagacatctattgggagtccgaggcaggtggattgcttgaggccaggagttagagaccagcctggccaacaaggcaaaaccccgtctctactaaaaatatgaaaattagctgggcttggtggctcatgccta

SEQ ID NO: 138019 - DNA, 1027 bp, Homo sapiens
aaaattgttgaaaagttgagatttatcaataatgtataccccttccttttcactctctgaaagtatagactgccaggccgggcatggtggctcaagcctgtaatcccagcactttgggaggctgaggcaggcggatcatgaggtcaggagatcgagaccatcctggccaacaaggtgaaaccccgtctctactaaaaatacaaaaaattagctgggcgcagtggcgggcgcctgtagtcccagctaccctggaggctgaggtaggagaatggcatgaacccaggaggcggagcttgcagtgagccgagatcgcgccgctgcactccggcctgggcgaaagagcgagactccgtctcaaaaataaaataaaataaaataaaataaaataaaataaaataaaataaaataaaataaaataaaaaaagaaagtatagactgccatggttatttattatactcaacctgctcattttactctccttttatttttctgcagtaatgtgtgtggctggtattggacttgttgtattattcttcagttggatgctctctatttttagatctaaatatcatggctacccatacaggtatgattcttattttttgtttatacagtgattaccaatacctggaatgattagagttgatattgctttataatatccttctttttgctttgcttccaaactattttagcttataaaggaaagatataggctttatttttatttattcatctatttatttattatttatttatttatttatttatttttgagatggagttttgctcttgttgcccagactggagtgcaatggcgcaatctcggctcactgcaacctctgcctcccgggttcaagcgattctcctgcctcagcctcccaagtagttgcgattacaggcgtgtgccagcatgcccggctaattttgtatttttagtagaaacggggtttcaccatgttgatcaggtcttggactcctgacctcaagtgatccacccgcctcatcctcccaaagtgctgggat

SEQ ID NO: 138020 - DNA, 1005 bp, Homo sapiens
gaggtggaggttgtagtgagctgagattgcgtcactgcactccagcctgggtgacagagccagaccctgtctcaaaaaaaaaaaaaagccatttaatatttttaaatgtgtttgaggtcagggcaataactgaatgtccagacaggttatttcaaagtacaatttcgggaaaactcatatttcatctgtaagttatggtgggacatttgtttaaaatatcaatttttctttgcacaaatgaagtaatcttccaattttaattttttgtatcttcatagtaaataattgtcatgccgtatagatacaagattccttattttggttttttataatgaagagttgaaggtttatatattcattttaattttcttcatgagaaactggaaatagtaaaatggtatgtcttttttgtctgtgcgaatttctccttaaacaatttttcttagatggtggagttaccttaggaatggtgcttttatgtgaagctgctacctctgacatggatattggaaagcgaaagagtaagtcaccttactcaaaatgtaacagtgctgcctgtactatggaaaaagagtgatctcttaatcacttttcctcttacttataggataagtaggttattttacccctttactatttttttctttaaatgtcatatctgttattaaactcctttactattttaaaattaatatatgctcattatagaaaatgtaaaaaaacaggagcatgaaacattccaccactgaaaaactaattatttttaaattgtaatatatttctttccacttataaaaaccttaaaaactgtatatataaaattttgacacttcacaccccctttttaaactggagttaaataactaataactttttctatatacataattttaaacttatactctgttattgtttgttttctttaagatagggtctcactctgtcactcaggctggagtgcagtagcataatcatagctcactgcaacctccgcccctaggctca

SEQ ID NO: 138021 - DNA, 1033 bp, Homo sapiens
actgtttcttggccattatcccctttgaatcttactgggaggccctaattagtcttgtccccatatcactgaggtggtactagtttggcagtcacttcataagtagcattaaacagaatcatcttgatgaatgagtgaaattacagaacactctctattaccctattgaattcagcatggaaaccactctttcgaccttaagtccatggattatctagttgtacttggcaaatccttcttaatctaaaagatgttatgttgtggttaaatagaatattgtacctattctatcctattttaggttatattatagactagtttgattgggataacataaaaaggatcatttttccgaaagtaaccacaataattttgattgctttcatttcagattttattttgacccatataattagtaaaaaaattttatactttaacatgtttttctctcctttccattagattagagtgattagacccccaaattatgctggtccccttatgttgggattgcttttggctgttattggtggacttgtgtatcttcgaagaagtaatatggaatttctctttaataaaactggatgggcttttgcagctttggtgagtgaatttcagaagacaaaaaattatttgaataaaattcctaatagtgtatttttaggtaagcttttatttatgtgagaagtagcattttatttcttacctgaggaaaatagttttatatattttaattttctgtcttaaaatcagtttgtttcattcattatctcataaggatggccagaacttcaaggaactgattgtacctgccttttattcaacctaaatgacagactgtcatctctatgaaaatctctagttgttctgaaaatattattcttttttttttttctttgaggcggagtcttggtctgtcacccagactggagtgcagtggcaccatcttggctcactgcaacctctgcttcctgggctcaaatgattctcctgcctcagcctctcgagtagctgggattacaggcgtgtgcca

SEQ ID NO: 138022 - DNA, 1063 bp, Homo sapiens
gagttcaagacctgcctgggcaacatggagaagccccatctctacaaaaaatacaaaaatcagctgagcatggtggaacacgtgtgtattccaagcacttgggaggctgaggtgggaggatcccttgaggccaggaggtcaaggctacagtgagccctcattgtgccactgcactgcagtctggatgacagagcgagacagtgtcattcattcgtttattcattcattcattcattcataattaattacatcaaaagtgtaatgtctgacaaaatattatgaaataatgtattttaagaataattatcatccagcccaactaccaaattttggctttaggtctcacattttctgtatacctctgcttgttagtattggttttaagtaagctgcctcattaaaagaactttaaatgccaagttgagtatattaatagcatgctcactttgtcttttttagatggtgttatctgaaaaggttagtcagctgatggaatggactaacaaaagacctgtaataagaatgaatggagacaagttccgtcgccttgtgaaagccccaccgagaaattactccgttatcgtcatgttcactgctctccaactgcatagacagtgtgtcgtttgcaagtatgaactccaactacgctttaaaattaaataactcatataacgttaaccatttctcaatcccagaagggccaagttagtgcagtaggtacttaaataatgtgtataccttactcaggatgtctatggtagcaatactactgctcttttatagtcaattcttgattatccgtatcagtgggggaagcatggataaataattgtggtagccatcataaaagtaacttaaagatcaaacagtcatcttataaattagtatcaacttggcggggcatgggggctcatgcctgtaatcccagcactttgggaggtcgaggcaggtggatcatctgaggtcaggagttcaagaccagcccagccaacatggtgaaaccccatctctactaaaaaaaaaaaaatacaaaaattagctaggcattgtggtgcatgcctgc

SEQ ID NO: 138023 - DNA, 1078 bp, Homo sapiens
tattttttcactttgaagtactttggaggcaggataacggactaaatagctcttatccctcacgcggctaggtcccatttttctagaatattacatgaaggcggcgaatttcaaggacttctaaatgagtctttgaaagattctgttctagcaacttcaagccattttggactccgaaaactccgcaatatttcacaactgcgcatgcgtgcttggaaagcgtcagcgcgctagatgtttacgtatcgagaaaggggcgggtcattatctttagcggaccaatgaaaacgctccagattatcttttttctattggccgaccggggccaattagaaatcaaccttcttttagcgggcgtgtagcgccagcgcgctgtgacgtaatgtgaggggtctcccggcagggctgagctggaccaatgaggaaaggcaaggggccgatttgcctgttctcacgccccaccctcagacctagccggagcaaagtttcacttatagaagggagaggagcgaacatggcagcgcgttggcggttttggtgtgtctctgtgaccatggtggtggcgctgctcatcgtttgcgacgttccctcagcctctgcccaaagaaagaaggaggtgagaacgcggtttccagcagcatgggcttttcccaatgactggggcttaagagggtctgttcgcctcttcccagccccctttccctgccgcttctatgcctttggtggcttcaattacgcggttttcggagttgtggaattcgtgagagaaggaactgtaactctttgtcttctggggatgtagaatctgagagtggagtagcgtaggtgacagcccgacttctacagtcttgtgaatgtgcatagctatgagttttgacacttttgagtgtgggccccgtcaggtgttgggggtggggagttcgactttagatcccaggagtaggatatctgagactctatactgctggccgatgtaactccctgaatgatgtgtaagagttctctattttctagcattttcatttcaggagtgtgagagttagaccaaagagtgaaattatgccagatttattacttt

SEQ ID NO: 138024 - DNA, 2536 bp, Homo sapiens
gccaatagctttccaaagttattttatcacgtatttatctacatattacagaagtttttactgttcttgcaacttttctctaaacttgacgttatttgaaaactaaaagctaagccaattagtatagtagtaatagcagacaaaaaaaatgagagaagtaaaggaagttttgggggaacagaaagaagaaagagctagtgtggagatactaaaccgaagcttgtggaacttgaacgccattttgaagctagttccttagacgattcggtcgaagatctgtctctcggctgccctctatagagctctaaacctggcttcaaggagttctttcattcttcattagataccacccaccatacgtcattttataaagccggaaactacatttcccaaaaggcctttatttttcctcgcgggaaaagggattgcaattactataggttttacaggtatcgcgagatttcgtcaaatctcattacggatcccggctgaaagccattttgtttttcagctcacttcaagggtacctgaagcgaattggcaccaaagcagcagctgtattgccgcagttctagcttcaccttcacgatgtttcccttggtcaaaagcgcactaaatcgtctccaaggtgagcaaaaattatgacaaatcatttacaacaaccttatatcaatgtgtcctcgcggcctctcgtgtgctttccttttacgaacatctcggccttctaatcttgaatgctgtctgtctcccatctcgtcccaagtcattgggatgatgtccttagcattggctttatcacccagtatttctgtttcggtttccagctctctttctgttatcggagtgatagtctagccctgctttttaattcttcagtaacctttgatttcagggaaggacattcttggtagacacctcgttccttaagtgatgtcctacattttagctttggggatatgtttactcctaaccctgtatagaaaaatatcttctccaattcctattactgtaatagacggaaactgtaaatctagctcttcacctggtttaattgcagggaaacaacccaaatggtatcgatgcagctttgaagttatttgtggattaacaatgttagctggccaggcgcggtggctcacacttgtaatcccagcactttgggaggccaaggcgggcggatcccctgaggtcaggagttcgagaccagcctggccaacatagtgaaacgccgtccctactaaaaatacaaaaattagccgggcgtggtggtgggcgcctgtaatcccagctacttgggaggctgaggcaagagaatcgcttgtacccgggaggcggaggttgcagtgagccaagactgctactgcactccagcctgggcaacaagagcgggactccgtctcgaaaacaaaaacaaaacaatgttagctgtcctgaaggcaatcgtggtcatttttttcttatccaaaggttgggcaggtacagggagttttgagaccagcattatgtagagaaaatgcaatagattgaggagaacaaattaattttcatacttgatttgcaccgaaggtgaccttgagtaacgtgggcagttgttacacaatgaaggtgacccgtaattactatttagtttgtttagccatcttttgattttcacttaatagaatcattggaggatattattagattgtgtcctaaactcttaagcaactttgaaaataaccacaaaatattagctggactattttcatattcccaaagtagcatttattatctcttttactttgggcatatgatttagcctctctcaacctcagtttccttctttgtaaaataagtaatttgtaaataatgcctacttcatggggttgttgaggattatatgagatcaccaatgtgtggtaattaaacagttgtcacagaggagaggtctgatgaaatccaccagagttacatgagtgtgttgaagttatgagatgttgcagaattttttggtagtcttaatttctttgctctttgagcaaatagggccaccttgtacctcaggaaaggttttttgtttttttttcagcgtggaattcacatgcccactttttatcttttctggagcagaatatattatgaaatatttgtaaatttgcctatcccggtgtgactaaaagatgaaaagggaaagctatgtaagacagttagaagatctgataatggtctaataactatcatgaagtaacccattgtaccatgtagaaatattcattgctagtgaatgggcaacattgcagtttcttttttttttttttgagacaaagtttcgctcttgttgcccaggctggagtgcagtggctcaatcttggttcactgcaatctccgtctcctaggttcaagtgattctcctgcctcaggctccctagcttttcattatatatgtaagtacctttggaggctctttaaaacgataagaacctgccccttaaattggacaggaagaaaaaaaaaaacagctagaaacaagctttttccagtctcggctgtttcccaa

SEQ ID NO: 138025 - DNA, 1047 bp, Homo sapiens
ttgtatgttgtaagttgttgggctctattgagtaaactttaatgaaaatttaagtcataagtattcaaattaatcaatgggagccaaaatttcaggggttatgcaaataccactttgtagagaatgttactgacatcattcattctttgcttttttcccccaacactattatgaaaactctcagacatactgaagagttggaagaatcgtatgaacacccatatacccaccacaaagattctacagttaacattttgctatttgttttatcatgtatttgtccatctgtcaattcatcttatttttgttgcatttcaaagtacactgctttaatagctacaatatgttttaacattttattgaactacataatactgtaaaattaacttccttggctttcctgattggcagtatcaatcacatatgttttctttacctgacaattgataatatgcttctgtattcttttttcgttttcctgtaagttcgaagcattcagcaaacaatggcaaggcagagccaccagaaacgtacacctgattttcatgacaaatacggtaatgctgtattagctagtggagccactttctgtattgttacatggacatatgtaagtactattgattaataatttctgtttcagatgtttttcattctcagtctatgcattcaaagtgtcttaacatagtagtgtacatatctagttaggagggacttgagagattgtgtaatctaattacccacacagtgcaggggattttttccccccagcattcatccatcttctgttcttaacattcccagtaataaattgcttactggatcacaaggcagccctttccatcttgtgtagctgttttttttgtttttgtttttttttttttttaagaagaagtcttgctgtgtcccccaggctggagtgcagtggtgcgatcttggctcactgcaacctctgcctcctgggttcaagcacttcttctgcctcaggctcccaagtagctgggaccacaggtgtgtgccaccaggcctggctattttttttttttt

SEQ ID NO: 138026 - DNA, 1339 bp, Homo sapiens
gccctggcgggtggatcacctgaggtcaggagtttggtactagcatggtgaaaccccatctctactaaaaatacaaaaattagccgggcgtggtggtgggcacctgtagtcccagctacttgggaggctgaggcaggagaatcgcctgaagttggagggggtggaggttgcagtgagttgagatcgtgccactgtactctagcctgggcgataaagcgagactgtctcaaaaaaaaaaaaagtctcaaaaaaaaaattaaagtgtgcttaattagaaggataaacagatgttgaacaaatgtttgatcagaggagcttttggaggtgaaatgttccttagtgatacagagaatataaaatactctggcagttacttaggtagttgtggttgagggaatcagtgtattgagtgggtagtatagaaatgtgaagtataaatttgaattaaataaaatttaaaaattcatttccttggtgatactagtcatattccaggtggctagtagccacatgtagctagtgactactgtttttaacagtgaagatctagaacatttccttcagctcaagaagttctattgaacaacaggactgctctagaaaattaggacagcaatcaggtttggcctatatggagggtattagatcccaggtgagtttctgtgtatttttaacctatagaacagaatatctgtcattttcaagaaatagtctccgagagagtgtactctggtttaaacacgtaactgacagcattttaattcttacaggtagcaacacaagtcggaatagaatggaacctgtcccctgttggcagagttaccccaaaggaatggaggaatcagtaatcatcccagctggtgtaataatgaattgtttaaaaaacagctcataattgatgccaaattaaagcactgtgtacccattaagatatggcattattgaagaaataaagtacatttgaaaccttcattgtaggttttgtttctttgtaaatgaaactaagcttgatcactttagcctttatgttaatattaaagtcaaatgctgtgcagcttcttaaataggtttttttttttttttttttttttttttgggacgaagtctcactttgtcccccaggctggagtgcagtggcaccatctcagctcactgcgacctctgcctcctgagttcaagtgattctcctgtctcagcctcccgagtagccagaactacaggcacatgccatgacgcccagctaattttttttttttttgagacggagtctcactctgttgcccaggctggaatgcaatggcgtgatctcggctcctgcaacctccgcctcccgggttca

SEQ ID NO: 138027 - DNA, 1096 bp, Homo sapiens
tctttcccgtggcggccctgcttccggcaggggcatcacccggaagtgggggtagtcgagggagggaggggtaaaggcggctggccgccgcggcggggggtgggaaaagagaagcagagggaggagttgttgctgccgccgccgcagccgcagctactgtgacttctccgattgtgtgagctttgttggagcctgcgtacgtggatttatcgctgccacggtctgcgtagctccagaggtttaaccataggatagagaaaccaggtaagtcctacattggcttcccgtcgtcctttctcctggagggggtcttctgtgctgtcagtttgtactacgagtgtggtgagaaggtcatgttagtctggggcagtctcgaaagtttcacttattcacaattcaggtattaactacatttatgttttacctcccctaacaggggatagaggaggggaaattaaatcctgacctgtgtcactttcttgtaccctcttggagagaatgtcctgatcatccatggcctacgttacccaattaattgagggtacaagaaagtttgtgtttggcattgaaagtcacatggactggggtctttgcttagtgacacctctttatactttggaagctaaggttactaaaatgaccataattgatgaaataataattgaaaaatagatatttggcttcttgtcttgctctgggagcgtaaggtaaactgagagaactcttgtttccacttagttttgttcattgtgccccctttccagtaaagttactgtccattgtccgaccctgtggcatcttatctttgacacttttcttcgttgtagacgttgagattatcttaagcacaaacacttatcgtttcacaattcagcgtttgtccaggatctgatctttattttaatcacagactctttatctacaatagtatggctttgtattgagaatatgtgcagaacattgaattagatgatactgaggttattaatttttttttttttttgccgggtgcgggggggtggtggggagggggtgatgcacaagaaataagacagagttcctggcctcaaaagagtttacttacagtaggctgggc

SEQ ID NO: 138028 - DNA, 1085 bp, Homo sapiens
tttagctttgcaggaatggaggaagaggaagacatctatctggactgatagatagaagaaataatgtgagcaaagccatgggggtctggaaagttgcccgacatccagtaacacactgtaagtcaatattcctatttctaacagccacatcttccaagatgtcactgattaaaattagaaaaaatatagaatacaaaactagtcagctcacaaacatatccaactgccctccagccaataagaaagcttatatagagaaaaaaatacatggaaatgacaaaagcaatgttaatgtatgaggcttaattctgatgtaaactcaaatctaaaagagaaaaaatgtaaaactcgctatactttaattctgattgagtgttgtgccttaaatataatttggaatcatttttaaaattgttgggaatgaataacattttctgaagtgagcaactgttccaggttttccccaaggaatctctgcttttccttttttcctctaaattgatttctctctattgatcttcttaacttgataggaactattctattccgatcacagccttagaaagatcttgatgcctgccctcaagataaggttaaacactaatccctccaaaggataggttaacatctctgttctctaaagcagaaggttgattttctttgaaaaatgcttgcagaagcagtaaaatttgcttacaaaacaagagagagagagaaaagagtgcaaaaataaccccagctaacacaccacaaccttcacttctgtgagggcgctaaaggaaatacattttaaaaaaataaattccttgttataactccttttatctatatatttaaaagctcttggcaaactttattaatcaagactttggacatcctgatgagtgaaaataatcttcatttgccagttgggaaagtaaattgcaaggagagatttttgtctgaactcatagaagcactagcatagatgagaatagtatttgggagttttgtctcaaaattccttctattcatctttgttaaagggcagttcaggttttagcgttttgtttttagacaacgatatttcttaggatatagctcaa

SEQ ID NO: 138029 - DNA, 1872 bp, Homo sapiens
ccgcttcagcctcccaaagtgctgggattacaggtttgagctaccgctcccggccctgccaccacgcccggcacaatacttaatttctaacttacaccatagaaaattggccggtgcggtggctcacgcctgtaatctcagcactttgggaggctgaggtgggtagattgcttgaattcaggagttccagaccagcctgggcaacaaggtgaaaccccatctctacaaaaattacaaaaaatagccaggtgtggtggcatgcgcctatagtcccagctactggggaggctaaagtgggggaattgcttgagcctgggaggttgaggctgcaatgagctgagatcatgccactgcagtccagcctgggtgacagagtgagaccctgtctcaaaaaaaaaaaaaaaaagaaaaaaaaagagaaagaaaatggaaaactcagattgagagggtcccccagtagcctatagtacacctacatatgctaacatggcatcttaaagctcattattacagctggcaaatcaaatcactgtgatgtgctcatcctatttccctatcaagaaaactcataacaatctgcttctgtaattagtgagccacagactctaggccatcgagattttccacattccctaattgtcaaatgctgaaccatacttgtactgaataagttgtgatacagtgtaagcaagggaaaaggccttatgtatgtctaacctactctgcaaatagctgcattcttacaaagttgtgtgtaaattgaatttttacaaagcatgtcagcactttgattagtacatttttattgtgtgcttattgcatattcagtgtttcctgtgagctatacaaagaagcataaggcatatgttccaatgtctagcaagagaaagaagtttaataccaagcagagagaaattaggtactactaaactatgaaactgattccagggtattcggaatttaaaaagaaagtggctaggagtatttgacatgatttttcatgaaggaggtgggacttcagttcatttacttactcaacagtgatttattgagtagccaccatgttcactggtggtatgatagtgaacagagcagatatggtcctgtttctgtggagtttacagactagtgaagtaatagaacttaaatatgtgcaagaaaacattctaggtgaggggaccagttctaaacaaagtcatagaaataaatgataagagcatggactatatggcaatcagtgaagggacttgcttgattgtagtagagattttatgttggggaggagcactgcaagtgatagatgcagaccatcttttgaatgctttgaagaactatttaagtctgtctaaaagtcctttggatacactgttctggagagggtttggggctttggggtcatactgccttggtttgatctcatctctactctaatttgtttaagtttagaattttatagtaagttttctcagtgacacaactctataggcaacaaactgatatttacagagtggttggggtcagtaacccttgtatcagttaagcaatgtacacatgaagtgccagtaggaagtccaaggaaaggttgggagaaataaaaggaggttagtaaaggaaagagaaataaatacattctgtgatagttggtagaatgtcatcagaaatgtcttcaagcaaaacaatacatttgcctgtcttttgtttctagttgcgtttaatggtagtgtgttttccttgtctaaatatgagaaagagaaactaaactgcagctacttgacgtgggcatctgagagctaccaatggttggcttaggttatgttctacatttgaagcatctggtcagttttagattgtcttctatatttgaagcatctg

SEQ ID NO: 138030 - DNA, 1193 bp, Homo sapiens
aaaaattaaaaaaccccacaaacagataaaagataaacaagaaacttaaaaaagactaacaatatgtgacaggtaaatgatgaatatctttaatatgcaaagatctcttacctatctgtaacaaaaaaggtaaacacccaaaataaaaatgcacaatggaagtaaacaggcagttcacaaatgaagaatacaaatggtcaaaaaatctcacaaagttattggagataaaaaacagatgatcatttttcacataacagattgacaaagcttaaaaagaattttcatagtacctgataaaagtgtggctagacactttcctatactgctagtgtaagtgtgaaatgatatctttccagagggtaatttacagtatgtatcacaagccttaagaagtactatttatatttagaacatgtggaaaaataaaaaataaataagtactatttatatatgttgttagtgggtatataaattgatacagtttttctggagggcagtttggaactatttatcaaagtttagaatgtacatgccctttgtcctagcaataacacttccaggaattttatctaaaagatatgctcatgaagatgtatatacaaggatattcattgaagcagggtttataatagcacaaaactgaaaacaacctaaatgttaatcaaaaaggaactaattaaataaaatatagcatatccacataagggaatattacaaccattttataaaatggtacgtttatctatcttctttggggatagttcagttttgttttttattgtggaggtctatatgtccttaaaatttttttttctttttaataattagagatgaggtctcactatgttgcccaggctggtcttgaactcctggcctcaagtgatccttggcttctcaaagtgctgcgattacaggcatgagtcactgcacctggcaggaggtttatatgtcttgatacaaggtgtaaaagatatgttaaatggaaaatgcaaggtgcaaaatagtacatatagtatgatcccatgtgtgtaaagaagaaaaaatagggaagatgggcattacagaggctttaaaatgcactgggaataataaagttttcatttttatctttagagtatagttcatgagtgaattcttttccattttttttcccagttatcttaaaagctctgttgattgtggatctgagaact

SEQ ID NO: 138031 - DNA, 1104 bp, Homo sapiens
ttcaaaattagggacaagatggattctttctaattatcagaagctcatcatatttttaagggcgtgaatgattacattggaactagaatattttgtgtctccagatcagatacttgtgagagctctactttttaactattcttgatctaaacattaacttttaccatttatttttcagaggtttcaaaatggttttggctctttagtgaaatacagaatttatactttatctctgcagtattcttacctaaaattctgatttattataagatcttgagtagattggtttcagtttgccttgtttttattacccaaaattggctaattagcccatcattactctctatgaagtctgatacatttccttaattcaagagtcctatgaagtgtggtgctaatatgtggacaattcttctcttcctaatctgaaactgtaggtgattttttccatgtctaagttttatagtcatcttggccagagagtaaactttggatccatattactatttgtatgagggaaaaagcagtatttcttgtttgttgactctacactctgattagctaagactatgttgatagctgtggctagaaaagttttatttacatagcatatattccttctcctaagttttctgtactgttgacatccatgtgactacttagatatgaactttccattttcacatgctccaaaggtagattttttttttcttgtattcaccatctaccttggcgtaattccagtcttagaggctcccacattgcttcttcccggcaacatccccgaacagggatacggttgcctttaatgatctttggggaaagagccaagttggaaaagctgagagatgacaggtaattattttacgtatttatcttcaaaatattcaaatttatataaaaatattttcccctaatcatatctatgcaaaagttaggcatattttgcagtttgttgattagtaaagagaatagtaaaagtagctctgcaaactcaatgctaatgctttaaaaatgagttgcttaatttcactgagtaataagtatgacacatgaatttgatttatcctcagatgaaactaattaaacctcctccacttgatc

SEQ ID NO: 138032 - DNA, 1067 bp, Homo sapiens
tgcatatataactttaccattcttgtaggtacacaagacattttatgtttctttctaacaagaagagtaaaaatgaaaactaatagggaaactccattagattgagttgtctcactcttcttgaatgtggtgtgatgattattattttaaatcctgtgtgatagaatttaattaaactgacttttggaatttccttccaaaaggtatcactggaagaaaaaaatgcaactattatttatgaccctaaactacagactccaaagaccctacaggaagctattgatgacatgggctttgatgctgttatccataatcctgaccctctccctgttttaactgacaccttgtttctgactgttacggcgtcactgactttgccatgggaccatatccaaagcacattgctgaagaccaagggtgtgacagacattaaaatttaccctcagaaaagaactgtagcagtgacaataatcccttctatagtgaatgccaatcagataaaagagctggttccagaactcagtttagatactgggacactggagaaaaagtcaggagcttgtgaagatcatagtatggctcaagctggtgaagtcgtgctgaagatgaaagtggaagggatgacctgccattcatgtactagcactattgaaggaaaaattgggaaactgcaaggtgttcagcgaattaaaggtaatgtgtctggtgttgattgttttgtaaggcttaggtgtctgttttgatcttttaactttttgctttcttcttaagcatgagttttgaatccatgagactagagtgcttgctgtatcattgaggtacagcatattcccaggattaaaagttaatgattataattaaaggttacataaaccttgaactgaagaaaaggcagctgggttggcaattcatggaattcaaggttcttaacacaacatgactagggtactctttacctctaatatattttacttaggcatggagaaacttggagaccatagctacagtggtcatatctcttacttgtttctagtctatgccaataacattttctgaaaagaaaaaaa

SEQ ID NO: 138033 - DNA, 1056 bp, Homo sapiens
aaatcagcacactgcaatgctgttttgcaaattgctttttgttccacttaatatactgtgaattgctttgatgccagtatgccaatcatcaacatgatggtaaaatttcattataaaaataagaactatccattaacaaactactctgtctctcagattgggagtagagataatggctagaagaaaaaaagttttgtttattcaggtagctcagattttcctgggaattgggatgggaagtattgaaattggaagtcactgcggaggaaagtgtagagataacttaatgctaacggatagtaggaacttgctcgttttaaaggaatagattgtcagtgcctggaggtatggattgtgatgcaaggcaaggatgcaattgaatgatcaatactgcaaatgaaaagaatctttccctttctaccagacacgaatgagccgttggtagtaatagctcagccttcatcggaaatgccgcttttgacttcaactaatgaattttatactaaagggatgacaccagttcaagacaaggaggaaggaaagaattcatctaagtgttacatacaggtcactggcatgacttgcgcttcctgtgtagcaaacattgaacggaatttaaggcgggaagaaggtgagacactcttgaagcttgttattttatgtgctagtttgggagctccatcttttttgttctcttacatgttttgtaactatgttatgattcttggtaaggcctcataaagattttcagtaatgtgtgggacaaccccgatgtcctggaagccttagtgttttgctgccttagataaagttcctctcttgtttacctcatgatcacatttgtatatctatgaaattcgttaaaaaaaaatagcagaaagaaatacacgagattactattttttatagatcaatcatggttgtgttggattttaaggaacataattttttttttttttttgagaccgagtcttgctctgtcgcccaggctggagtggagtggcgcgatctcggctcactgcaacctctgcctcctgggttcaagcgatccttctg

SEQ ID NO: 138034 - DNA, 1016 bp, Homo sapiens
gtaggaatgtatatgaaataagattagccaagtattatgaagcaaggtgataggtacgtcaagtttattatgttcttatacacacacacacacacacacacacacacacacacacacacacacataattgaaaatttccataataaaaagtttaagaaaaatcaggctatgttttggaatagttctaattgtttggggtcaagactggtataaaagttaaatttctccagattcaaatcctttaatacttaagagaaatcctttcatacttgataatactaagaagtaattataacattactctttttaaaaagaatgttatctgtattgtttttcttatcaatgctcttaggaatatattctatacttgtggccctgatggctggcaaggcagaagtaaggtataatcctgctgttatacaacccccaatgatagcagagttcatccgagaacttggatttggagccactgtgatagaaaatgctgatgaaggagatggtgttttggaacttgttgtaagtaagattttttgtgtgattaataaaacttccagaaaaaaaacttggtaaggttcagagaagagttgtgaagataattaaaggtggggaaaatattatgaaaattaaggaaactggaaaatggaaggataaggtatgatctaatggtactcttcaagcatggaatttaaaaagataattgtcgtatctctgttaaccaaaaaagaattgggtatgaatgaataaatgaaaattaacatttaaaatataatatgattcctatctagtagcatgtaattgaataaattccagtgcattaaagactcaaattttataaagtcataaaacctgtgtaaggcatattgatttaaagtgatcactttctccaacccagcaaatcagctgctaggattctttcctgtggaaatatgatcatatagggctgggcatggtggctcacacctgtaaatcccagcactttgggaggctgaggtgggtggattagttgaggtcaggag

SEQ ID NO: 138035 - DNA, 1096 bp, Homo sapiens
agtgacaggaatttggagacttttaatgagatcctcttctatctgggaccatatatttgttcaatgtggtataaaaatggtatcctaatgatcatatctaaagcatactagtagtgcaattaagatcttgtgtggcaaacccatgagtccttttagtaaaaagtggtaactcgggctgggcatggtggatcacttgaggtcaggagttcgagaccagcctggccaacatggtgaaaccccctgtctctacaaaaaagataaaaaattagccaggcatggtagaacatgcctgtaaccccagctacttgagaggctgaggcagaagaatcacttgaacctggaaggcggaggttgcagtgagccgagatcgcaccactgcattccagcctgggcgacagagcgagagactctgtctcaaaaaaaaaaaaaaaaaagtggtaactcatgtttaatggtggaaaaagtatattcctgaagaacaaatgctttgtctttaacaggtgaggggaatgacgtgtgcctcctgcgtacataaaatagagtctagtctcacaaaacacagagggatcctatactgctccgtggccctggcaaccaacaaagcacatattaaatatgacccagaaattattggtcctagagatattatccatacaattgaagtaagtgccaagaatttatgtttctgtgttcttacctatttaatcagcactcccgtgaatcatttctggtttgcatcagatagaggcaatgaaaaaaaatctaactcctttgaacacttcaaacaagatctgtctcaaaatttaatgtaaacgtgtctgcatttttttttttggtctttttcaggaaaagttaggcaaaggtacatttacactattaatcaggagcaaacaagttagaaccacaaaacacttaaaatatttagaaaatggaaataaagtataatttgttataaataagattcatattagttactaagaaagtgaaggatcctgcttgatggctttttgtttgttaggtcaaaacaaaagacctatttttaagttaaagtaagaaatttaaaagactaaacccagctggacatagtggctcatgc

SEQ ID NO: 138036 - DNA, 1045 bp, Homo sapiens
tagccaggtgtggtgccacgcacccatagtattaatcacacgagaagcagaggtaggaggattgcttaagtccaggagttgaaggttactgtgagagagaccttgtctctaaaacaaacaaacaaacaaacacaatcctttctttgtgacagattcatcctgtgttcttcaataagtcttaagtggtaatacatgtgaatgtattttaaaagtttcagtatgctatagaattggtgttcaagtgatttaaagcattttattagttcagttaagatcctatttgtatagatgacattatcattaccatttttgtgaaactagttttactgagtacctgctatgtgccagttaccaagattgcaaagcttcaacccttaattcccacagcaatgtggtcatattcattttggaggtgaggaaacccaggttaagagaagttaagttacttatccaaagtcacatagctaataactgtcataactgggatttgagcctaattactctgactccaaaagctcatgcttgttctattcactgtgcactgccaacaaatgtaagatggcagcatttcccctagcagttggaaatgtaatgtgtattactatctatggtcagataagtcttgcttaggggtagtttcctttttatactttgttttattggggaaaatgatttttgttcatgttctttttctgataaaacaagactaaatactgcatatgcaaggccttgaataatatgtttagtatggtgctagcttttttttttttttttttttttttttggagacagagtctcactctgtcgcctgggctggagtgcagtggtgcgatctcagctcactgcaacctccgcctcctgggttcaagcgattctcctgtctcagcttcccgagcagctgggattacaggcacctgccactatttccagctaattttttgtatttttagtagagacggggtttcaccgtgttggccatactgctctcgaactcctgactttgtgatttgcccaccttggcctcccaaagtgctgggattacagg

SEQ ID NO: 138037 - DNA, 1026 bp, Homo sapiens
tcttaaaaaaaaaaaaaaaaaaaaggaagaaatatctgattttccttgtattatggaatatccattggatcatagatgatagccccacaggcttgtgcagcaatttgaatacctccctctgcatgtacatctattgaaatacaaacacgattgttttggcttaatctccctttagtgtttatggattagctaaaagccaaagaaagtgactattgatactttaagttattgagatatatatgtgaatttcagcattttttaaaattcaatgattatcattcctatattgcagtttttcggaggctggtacttctacattcaggcttataaagcactgaagcataagacagcaaatatggacgtactgattgtgctggcaaccaccattgcatttgcctactctttgattattcttctagttgcaatgtatgagagagccaaagtgaaccctattactttctttgacacaccccctatgctgtttgtgtttattgcactaggccgatggctggaacatatagcaaaggtaaagtaagaaagggtgacatttgttaaaatgttgggtggataaatgaccttagtattttttaggccaatcattggaaatacatgcttttatgtagttaaccatttactgaaagacgtattttcattttggcaatattttaagttaaatatcagtttagaagatttaccaaatatggaattaatactgtagatagtacagtatgtctgtttattttaagagagacaaatgagaaatacttatcacttatttacttacattattaattgaaaaattgacatgaccacatggtttaaaataatgatagaaaaaattcacccatattcccttgctataatgtaaatcattttctaattccattctacatacctttctacttaacagagttgcaaatgtagtattcatactactttgtacccttaacactataaagtttttcaccatttttgcagtctagattattatctaatatttctgactaagtctgtcacatcagtttg

SEQ ID NO: 138038 - DNA, 1062 bp, Homo sapiens
gggaggccgaggtgggtggatcacgaggtcaggagtttgagaccggcctggccaacatggtgaaccccatctctactaaaaatacaaaaattagccaggcatggtggcgcgcgtctgtaatcccagctactcgggaggctgaggcaggagaattgcttgaacccaggaggcaggggttgcagtgagccgagatcatgctactgcactccagcctgggtaacagagtgagactctgtctcaaaataaataaataaataaataaataataaaatattttgtgtacttcgtctttctgaagtgaaacattttctagtgaaacattttgaagtgaaacattcaaacattttgaagtgaaacattttcatattaatttttaaacaaattaatattcctaaagctgtcttttgggtaaatgctaaagattgtatttttattttagttaagacctgaactttttcttccttagcattttcaatgtgtttgttttaatttatagggcaaaacatcagaggctcttgcaaagttaatttcactacaagctacagaagcaactattgtaactcttgattctgataatatcctcctcaggtatttatcttcactcttccctcttctctttttttaacttcttaagaaaaatttcaaatatatacagaagtagaaaaaggactatcatgaattcacataatctgtctcccagatataaaaattatccacattttgccatacttcatctatccattttgtctgtctttcttgttgcagtagtattaaaccaaatttcagtcatattgttttacggctaaatattctgtgttatctctaaaaaaggatatattctgatataactatactaccgtactgtacctaacaaaatgaacattaattccttaatgtcacctaagacccaattcatattcacatttctcctgttgtctccaaaatgttttaagtctctttgcctgaaatagaattcaaacaagatccatgcatcatagcatttgactatcatatggcttatgttcttttaatctaaaacagcgcctctcttctttctcctca

SEQ ID NO: 138039 - DNA, 1790 bp, Homo sapiens
gtttctcaataggggtgctattgccagtttggatggggcaattcttagttctcggggactctcttacatactgtagtacaattcagtgcccctgaccctggcactggcacactaaatcgaagtagtagcacccccttccccatcccgtgcagtcattattacaaacgaaaactccctcccacatttctaaatgttccttgagaacaggttaagaaccaatgttctaggactagggtgaaactctaaaagtatctgccaacaagagctaccatacaggtttttccagttcaaggtttatattcctggcattggcctagaactgatataaggaaaaagggaaagcaactttcacctaggcatttgttcagattctattttatatctagatatttttgacaagtaacaaataatgatatgtttcatgatagtgatcatttatgctccttaaatctatctttactctccatacaggggaggcaatgcctgtggctaagaaacctggcagcacagtgattgctggttccattaaccagaacgggtcactgcttatctgcgcaacacatgttggagcagacacaaccctttctcaaattgtcaaacttgtggaagaggcacaaacatcaaaggtaacttaactccctaggagaaacacaaactattttctttaaagccttctcagtataaatcttcacctagtttttacgttttccaataaaaattttagttgcattaatatggagttcgtttgtttttgttttgagatagggtctcactctgttgcacaggctggagtgcagtggcaccatcatggctcactgcacccttgacctcctaagttcaagcgatccttctgcctcagcctcccgagtagctgggactgtgtgtgggcacatgccaccacacccagctaattaaaaaaatttttttttatagaaacagggtctccctaagttgcccaggatggtctcgaactcctggactcaagctatcatcctgccttagtctctcaaagtgttgggattacaggtgtgagccaccacacctggccattaacatgaagtttgttaaaatatttctatttgtgctaactactaaatatactctgcattcagtatcagaaaagactttgatatgcttcttcttcttattattgttgttatttttaattctaggctcctatccagcagtttgcagacaaactcagtggctattttgttccttttattgtttttgtttccattgccaccctcttggtatggattgtaattggatttctgaattttgaaattgtggaaacctactttcctgtaagtgacttgtaataactcgttactatatgcagaacaatttgtgagtcttttgcattagtaattcattggaaataactttaataattaccaggatctttaaaggtttggagtgggagagtgataagaataatatttgcatttttataaatataaaaaatttccttttggaaaaaaaattttattatgactggtgattttccaaaagcaaataccaaacttttacatgttatgcttagtctcatttctgacatggttttgctttcacagaggactatagatatattgaggaaaacctcaggatttcagctctgtcatttactgtcaatatgatcttagactacttaattgctctctgagcttcagtttcctcaactataaagtgaggttttaataatacccattttgtgtaacttaaggttgttgtgaaggttaaataatatattagaaataatttgtaacttattaaatgctttacaaata

SEQ ID NO: 138040 - DNA, 1009 bp, Homo sapiens
attcattatattgaaagcctttcttttttaccttgaggcactagaggcgtctcttaattacctattaacagtcaacccttaaaaattagctctagttgtttaacatatattcacagttatttagcatgaacaaacagttcagcattggcagaggagagctgttgtgtataactaagagtatttcttcttttattttcccgaagaccatcagttttttaagtcaaattaagtcaaaggtcagtttactaagaaactaaatagtcatctctttgtcaaaacagaccttttttcttatttctggaaaggtgatgtggaggatcatcaagtcattgtatcttaatttttttacaggtaaaggtagtggtatttgataagactggaaccattactcacggaaccccagtggtgaatcaagtaaaggttctaactgaaagtaacagaatatcacaccataaaatcttggccattgtgggaactgctgaaagtaacagtgaacaccctctaggaacagccataaccaaatattgcaaacaggtacatttttttcctcttgtttattagtgtagtcatctcctgtaggaattccccggatcaaatctagtctggtgtttgactgtgatttgcatatatagttggtatgaggctaaaaagacttgtattttctcatttaattgtatgtaacttatttcttcatacagacaagtatacagatgaaaacaaatgaactataatcctatcacacagataactcctgttgacataaaaaattaaaatagaagttatacatatttgtggtaggacaattcagatagttcagagaattacataatgaaaattgtaaacctcattccctgcccccttccataattcctctctccaaagtttaacaactgttaacctattaacagtcttttaaaatgacagctttattgagatataattcatatactataaagttcacctttttaaagtgtacaattcaataattttagtatagtcataaaggtgt

SEQ ID NO: 138041 - DNA, 1034 bp, Homo sapiens
aatggggtaggttcacaagaacatgggaagatatgaattggagacagccaatagagatacttttggaaagttttgctatgtacagaagcagataaatgtggtagctagagaggtgggtgagatcaagaaaggttttttttttttttttttttttttttaagataggacaatgtacagcagagaaaagttgtgcaggagtgggcggggagaattgttgggttggagagatgttctagaataggcaaaggagcgggggtgtctagtgcacaagtagaaaggttggccttaaattaggagcagaatcagtttataataacagaagggaagctagatacacagacacaggaggcacaggtagttgagtggatgcggcaatgagagctgtggaagttcttttctgattgcttctattttctttctgaagtaggaagcagagtcatcatatggtattaggatggggcaggagaagttggagatttgaagggagatgagaaggtatgaaatagccacctagaagaaatggagaatgaatggactagggaaatatagttaagttgccagatagcactaagagcccacttaaagaaaatgagatgtcagcatgattgtacatgttcatctagccacattcagctactgatgcacagtaagtatttttaaatttgattgaatttttatggaaggtcaaagggaaagcctcaccaagaaagtaatatttgaactggctcttgaagaatgtgattgagtttgctgtctggagaggagggataaggacatttcagatgaaggcagcaatgtgtgcaaaggcccagaggcatggaagaacagagtatgttcttagaaaatttgaacatcactgttggaggctatgttctaggagcaatacaatgtagtgactgtgcaaggttagacaggaagaacttgcttcatggggttttataaagattaattgaacttactaaatgttatttctgtgcctactttcagatgctcttaatgctcagcagtataaagtcctcattggtaaccgggag

SEQ ID NO: 138042 - DNA, 1157 bp, Homo sapiens
tatgtttcacgtactcattattttttaaatgaattgagtttattttcatcacataggttggcattactaaggtgtttgctgaagttctaccttctcacaaggttgctaaagtgaagcaacttcaagaggaggggaaacgggtagcaatggtgggagatggaatcaatgactccccagctctggcaatggctaatgtgggaattgctattggcacaggcacagatgtagccattgaagcagctgatgtggttttgataagggtaagtgccatggcttgacctttgaggagtatgagactgccctatgtggtcaatgataatgtcataaagtatattgagcataacaattctgtcttaagttccatgctatcagccattaagagtttaagaatatggagtgggattatgggaagtcatgctaatttaccccctgactttctcaacccagctcataagcaagtgagaattataagtttctgaagtgaagaagaagatttaagaatggattcggaataaaatgatcttcaacaaatagttgctgagattattttaagtagatttaatcatagtaccagcatacacccctaaaagtgttttcagaaccctgaggaaaatttttgaaaaacaccttcggaagctgagtctaagttttagcattatctgagatttgtaattaattcacatattaccctaaggtagacgtaatcttcaacatacacagtatcaaatgtaaaagttactggttaagttagagtctcttactaatatcacaaatatttctgttcttagaatgatcttctggatgtagtggcaagtattgacttatcaagagagacagtcaagaggattcggataaattttgtctttgctctaatttataatctggttggaattcccatagctgctggtatgtgactcttaactagtactgctttttccactaaagttattagagacctaacatattggaagcctgtcttcttactattagttttgagcttagtttttgtttgtagcctactggtatggtgagaggtaatgttaaaatcaatcattttaattttcagtaatgtttgttatagcttaagaatatataagcattctgacagatttatttttttccctccaacttttttttttttttttttgagacagagt

SEQ ID NO: 138043 - DNA, 1086 bp, Homo sapiens
cacctgtaatcccagcactttgggaggctgaggtgggcggatcacctgaggttgggagttcaagaccagcctgaccaacatggagaaaccccgtctctactaaaaatacaaaattagccgggcgtggtggcacatgcatgtaatcccagctactcgggagacggaggcagtagactcgcttgaacccaagaggtggaggttgtggtgagccaagatcgcgccatcgcacttcagcctgggcaacaagagcgaaactccgtctccaaaaaaaaaaaaaaaaaaaattcatacctccaaaaacattgaaaaaaatggtacaataaaaatctgtatgcctttcacctaaactcaccaactgatggtattttgccacattgcttcatctctttctgcatatatttgcacagagatatgtatttgtttgcttattaatttttttctaaatagatttacctttaatctgactacccaaacccaacactgtttgcaagattaattcatggagcaaatgatttttaaagaattatacaagtattttcctctagtcttttttttactctacatcagtttttgtcttgttacatagttgtgattgtagcttatggagaattttctgctcttcacttaatattctattatagtcagctggtattttttttaggttgagagaccagatgacagagagagtgaacaaagcaatataactgagaaaaaagaatttagagttatttaataagcatctgagaatctcctaaacttagggacctggtaggagttagtaatgatgacataaaagaaataagtattgttttcttcttgttctctctggtttgagggccaaggaaagacaagaaatgacatgagaacaattacaaaactgtttatcagcaaggacacacaaatactgagagaacaaagaacaaaagaacaatctaagtccagtaagattaattcatggagcaagtgatttttaaataattatacaagtaatatatgatcaccatagaaaaagtagaaaaatataaagaagcacataaaaagttaaaagtatgagtctatttcatcctcatcatgtgagcaaacatt

SEQ ID NO: 138044 - DNA, 2478 bp, Homo sapiens
aaaaaagaaaagaattattattagctaacagtaataattagctatgtaattgttacttcgtgtactttatgcatagcaaccacaagcactgagtgggataaaatatagtgcactaattctgagaagtagggtttctgatgatataactccacacaattcgtttcaagctattttcctaccagtgatcacctttatacatttcataccaaaactaagtgtggatgagcaaatcttctttcttttctgcatgtagcgagcatctcatttacttttggttatttgaaactagcatacttttgcatatgtccagttacaggaaaccaacttacgagagttatgaactgcctgcccggagccagataggacagaagagtccttcagaaatcagcgttcatgttggaatagatgatacctcaaggaattctcctaaactgggtttgctggaccggattgttaattatagcagagcctctataaactcactactgtctgataaacgctccctaaacagtgttgttaccagtgaacctgacaagcactcactcctggtgggagacttcagggaagatgatgacactgcattataaaaggccatggagagtgctgccagtttaacttgtcatgcactgacacagcattcatgatgttaccttcacttttcaaaatattgtagaaggatttttctcatgctcttatattagggattctatttgagttgcgtttatctgttggcaaaaatatctttttcaaggcatcagctctgaacctagctttatttaaactgaatttccagtatatttttgttttcactaacaacagataaggtagagcagtgaggtttacaacaagccctacaattagagattgctgaactgctgctaaagtgattttttttttatttgaccaaaaaaaaaaaggcccaagaagaagaaaatgaaaaatttgaagatttgagagcatgaagatattcatgcttttgaactcaaaatattgaagatactctcaagcctgtatccctgccccactggggagcaatgactttcaaagcactgtgtataaaacatctagttttagaagggaaacagttgaaactgtttaaaaatagatgtgccttatttattgcaggctttctttcccccattctccctgcatccttgtccttgcaggtgcttttttagatgctccaatatgtcttcttttgttattttctttcgagctaaccaagtttaggtggtttttcattgattaaaaataactgacaactgttctaatattttgctcctttttaaattttgtagctcaaaagaccttaaaggtctgtagggttccctgcctcccatctttccactgttgtaaaaagtatatcaaattattccttcaagtttcctagctctgtgctcagtttcagttcactcctgccaagttggactctaagttattcttcatgtagtctgctgatctcagtctggaaacttaacattatgagccttttctgctcaaaaaattttcaaagattaaaactattatacatatacaggtcatataaaattacctggattcactaaatttgtttgttgttgttgttgttgttgttgttgttgttgagacagagtcttgttttgcagcccaggctggagtgcagtggcaccatcttggctcactgcaacctctgcctaccggattcaaggaattctccctgcctcagcctcctgagtagctaggattacaggtgcctgccaccacacccggctaattttcatatttttcagtagagacggggtttcgccatgttggctagcctggtcttaaactcctaacctcaggtgatccacccgccttggcctcccaaagtgctgggattacaggtgtgagcctccatgcccagcctaaatttgtattttttgaattgagtataatcactttgctagtatatataatttaatagattttatttatcttttagtgtttcagataacctctcaaaaagactttaaaataatgctattacacaaagctgcatttaccaaaaaatacagtaaaatcataatacagaaactaaaatttccctaggttatgacgctttttagctaaatatatactcttctctagtttaaaacatttgaacttgcctagttagtgtggttggcaaatttaggagcttgttcccattgccaaatggatttagaaattcccttgtgagtgcctggtagctaatacactggtcagagatctggtacttgtaagactatttaaatttctttgttagttgcaagatggatttcatatgcagaatatgtaaatgaagaggactcataagtaaattcctaacattttgttcccattaccagaagcaaagctgctgctaacccaacatctggcacataggatttgtactcggtaaatgttagttcttttctccccttgaggtcagtaataaatacaaaaaaatcatttttctagagcagagtcttaaaatca

SEQ ID NO: 138045 - DNA, 1703 bp, Homo sapiens
aactttcattagcttcaaagagaagctgtatttacaggagaaagaggtgattatggagggaatcaaaaatactgctttcagttagtagctagctttaagtcaggagttagtaatgagaaattttataaatgtgtatttctgtgtattcacatacatatatatatacacacatatatatgtacatacacatacatacatattaccatactgaagggaaatggatttatatttgaatttgatatttgaatatttgaagttctctatttatatttcatttatcactcttctgtattcactcagcaaccatgcccttagtctgaagataacaaggatactttaatatccagtgccggttcagactcacctatgtggcaccttaaacttaaatatccaaagatgccttttgaatttcaaagattaaaacacagctagagtagtagtattgtagtctcaagatgtatggtgtgtcatttgtgaaaatagaaacgttatttttcctagtttagtatcaacattttagaatgtcaaatttgatgccttgtgaacaagtaattttatattgtgctttaattttttaaaaagtattctttattcatatgtatagaatgcttaaaatagcactgtagacaagatgtttccaaaactttaagtgcgcatatcttttctgtatacagcttaaaatcaaaaatgtatgttaagagaattttttctattacttatggatcatgctttaaaatgatttttcttgatatttattttactccattttgtttttttctctgggtgaggcatctggttactggttattttaaaaagaataaagacattcctggaatcactccttttgggtttttgtttgttttgtttcttttctacatttttaagtattattttacaaaatagaaaaaatatagattcatgccaaattattacctatttttacactaactttctgcagtccctccatctggtatgagtaaccagatagagcacaaagcatgagttcttgttcttcagttaaaagagcttctttcacagtgttgataacaaatgccttttgtagccaaaaccaggcgtctcaaccttacgtttttagttaaagaaatgtttagctaaacgttgttgaacattgattgtttggtaccgaaaacagcagtggacgatgttgtgcaatatccatctactgtagttaagatattcagtagtttgtttttcataagcatgtaattgatcatatttctgccaaggatgtgccttcaactttataattatagtgttgtaaaatatttttgtctgtctcttttgttaaatcatccaaccccctctatcagcagttctgaactacctttgttatatttttatttttttcaacttttcatctatgatggaggtggattataggcatcactacactttcggttaggatgggagggaagaaatctattttccttcggactccactacacctgccatatcattcagtgaggatgagaaataaaggaaggaatattattgttctgctttcctttgtagtctctaatacattcttgatagaatgtctactccaaatgagctaaacagagaaaagagattttcttgccattggggagccctatacagagtgtttgaagttcccacccaagatacattcccatacccgaacactcctttttgagttaaggaaaccattgtaaacttgtgag

SEQ ID NO: 138046 - DNA, 1023 bp, Homo sapiens
accctgggtctcgcacattcttcacgtccgttcgcagcgtcacccggatcttcgccgctacccttgtgggccccccggcgacgcttcctgctccgcccctaagtcgggaaggttccttgcggttcgcggcgtgccggacgtgacaaacggaagccgcacgtctcactagtaccctcgcagacggacagcgccagggagcaatggcagcgcgccgaccgcgatgggctgtggccaatagcggctgctcagcagggcgcgccgagagcagcggccgggaaggggcggtgcgggaggcggggtgtggggcggtagtgtgggccctgttcctgcccgcgcggtgttccgcattctgcaagcctccggagcgcacgtcggcagtcggctccctcgttgaccgaatcaccgacctctctccccagctgtatttccaaaatgtcgctttctaacaagctgacgctggacaagctggacgttaaagggaagcgggtcgttatgaggtaattctgcacgtttgcccgcgtgctctctgtgctctgtcgcaaacctctttggccggagccgacttgttctctcgtctgctctaagttcttttagcttttggctgggccccaggggtcctaggcttggagggcgaggctgctcacgggtttggtggtttctagccgcattttccccagcccagaaagcacccgaagtcacccttcggggatggatcccactgaggaagggctgagattgccgctgggacccattttgtcctttttcctattggtgaaatgcagttccgttgcctccagctcccagtcggcgagatgggacttaatgcttatcctgcaaatctctaggcttcaaggaagggaccttgaaaggtcattttactttcccttcccccacgctcctagaccgtcgcagccaaatgagaaacggcccacatctcacaggttcctgcacaaaaggatatttttccaagaggatgttgatttaacttcaggagtagacccccccgccccccgccactaaaga

SEQ ID NO: 138047 - DNA, 1041 bp, Homo sapiens
catcaggattgtgacatactaggtaatggtagagcagggtgtggctgctcatacttgctggcctccaatctcatccccacgtgtggctagaaaagtagaattttaaaattgggggaagtttcctcgtgcactttgggtctcttactctgcgcatgtggatctctagtcacttgccaacacggtttctctcttatctgccagaattgttggtagagtgggcagcttttacatttatcctttttgtcacgtgtgatatatttgtgcataccaggagcaaggtgcaggaggatgagtcggtatgtaactgatggacttgactgttcatataccttaacaggatccaagagtggtgtttttgaggggtcataaaggtttctgttgatagcattttgcaaccttgacctttttgggaagtggttgattgatgggtaggtatttatttggctggtgtaatctagccccttttccaatttgggctggttcaaatgagggcttgtgttggatattaacagacacgtaagtcagtaggagatctccctttactctaactttaaacatatgaggacacgtttgagttagggaactgtatgggtaccctaaaaggacatgtagctctcctcttctctctaatttcactttggtcaatatttttgcaggtaaccgctgccctgctgtggagatagaagaacccaataatttatgtccatgaaaaatacctggtttccacatttccccaaatgacataggcctttgtaatctggacaaagtaggagtcacagccatgttagtactagaggagtgccctttctggccctcatacaatcctaaaaaaaggggatagaccctgtaaaaaacaggacaggtggacattggcatgcaactagcttttaggttttaattagttccttgcatctcccctgtgttcgacgctgattcttccagatgcatggaccaactaacagacaaggagtgggacattatgctgataaccttcctgtaattgcagtcttgggctttatttcctctctctctagggaaact

SEQ ID NO: 138048 - DNA, 1064 bp, Homo sapiens
aggtgcttaggcagccatgtggtgtcagctcaattcctttttgtttcaacgtggtggttgctggcggtgtttccggaatggggcttcctgagtagtggctgcctcatttgtcgtctttgtcctgcagaagtgaactatggtatttgctgactcttctggtccactggtttggattgccaagggaaattgatttgttgaggtaacatgggatagccagaaacctctgacttgttaattaccaggttccatcttagttttttaggactccgcagttgactttacagcctctttgaatacacttctgcttatttttgtggtaatttcctttctttctctcataggttgccagtcatcctttgcctgcttgtaaagcacttcctttttgcttgctcctgcctttttttttaaaccttactggttttctccaacttgtaacttgtaaagaaactgctttgatgtagtgggaagagaaacaggaaaaaattgagagcagagaaaaagtcactaagacacccacaatatcccagttttccatctggggcagtgaagcattgatggacatggttcctttgagagtttttaatggaactggacctgggacctgagatttcaggtgatagagacttgatattcttattccagctaaatcagtatattttttaatgttttattttgaaataaagattcatgggaggttacaaagttagagaggtcttgtgttcaacccattttcccccaatggatgcatcttacctaattatagaacaatatcaaaagtaggaaattgacattggtataaagtgtgtatggttctatgccattttattacgtgcgtagatttgtgtaaccgccaccacaatcaagatacagaactattagatcaccaccaagatctccttcatgctacctctttataataataaccaccccccttcctgactcctggtaactactgatctgtccactgtttctaaaattttgtcacttcaaaaatactatacagattgaatcacatggtatataaccttttgggattaacttttttcacttagcataatgtcctc

SEQ ID NO: 138049 - DNA, 1021 bp, Homo sapiens
ctgggcatggtggtgcattcctgtagttccagctacttgggaggctgaggtaggaagatgacctaagcccctggggaggttgaagctgcagtgagctgagattgtgcctctccactccagcctgttgggtgacagagtgagaccctgtctcaacaaaaaaaggaaaagaaaaaaaaaattctagacttctagagtggggcaggtgttcagcataaatcaccatgtttgtatagacggtctaggaagagtgaatagcccttgttggtcttgtcagttaactttgaaagccaagttcccagataccagccaggatctaatcttgcagacaggtccttctgtagatagtagcctcaggcctgctgtgttaactcttgtctgtgaaaggggcagatacataatgagattgtacaatcctaggtggagggttggcattgcatttaacttcttaaggaccaccattgaattactgatagtagatttgaaggaacttggagaagaaaaggagctttatgctttatgaggttatcaataagctagttcccactaatttctaggagtaacttcattctgtttgttgtctctctttggttgcaggattaaggctgctgtcccaagcatcaaattctgcttggacaatggagccaagtcggtagtccttatgagccacctaggccggcctgatggtgtgcccatgcctgacaagtactccttagagccagttgctgtagaactcaaatctctgctgggcaagtaagtgccaggctctggtgctggtagactttgtggcgggggaagttgtcaagcacgttgttactggtttttaactttcatactgctcaagtgtcttcatctcttcctcttctcagggatgttctgttcttgaaggactgtgtaggcccagaagtggagaaagcctgtgccaacccagctgctgggtctgtcatcctgctggagaacctccgctttcatgtggaggaagaagggaagggaaaagatgcttctgggaacaaggtaggacctg

SEQ ID NO: 138050 - DNA, 1422 bp, Homo sapiens
tttctgtttttgtttttctctataggttaaagccgagccagccaaaatagaagctttccgagcttcactttccaagctaggggatgtctatgtcaatgatgcttttggcactgctcacagagcccacaggtaccaagaaccttgtagactaccacactgagaacagtattcctatttacttgagtagcccaagctctgggttgtttttggagagttttgtattatactgtaatcctttcagcttctctaattggaactgccactatggctcttgttgagtagctctcatccaaagaggaaataaaggtaaaaaaatgttggtaattgtagggctttttgtggagtttcaggaagaggttgctctttctcaccttagatattttgtacagagttatccttttatgaacgttataagatcagactctcatgctgtcagtaggaagcaaattgaggaatcctcttctgctatcatcaaccggccaattacttactgtgatttgccctttggcctgcctgaagagtgttaactgggtatcttaaattctacctaagttcattacttttttactctttccctttgaccttgcactattagttaaaaatcttatcttgtacctaagtgttttttgttgcaatgtagggatgaaaaccatgatttcttgcagtccagaagtagaaatattttagtgataaggagctggcctctaggactaggaggaatgatagggattgactagaatctgaatgtctttgatcttttctagctccatggtaggagtcaatctgccacagaaggctggtgggtttttgatgaagaaggagctgaactactttgcaaaggccttggagagcccagagcgacccttcctggccatcctgggcgggtatgaagaactctttaagatcatgctttaagtattgtttgcctggtagtaggccataacttgggtggtttattgtcatatagctcagtcacactgggtaactgaggagaatttaataaaggaactacaggctgggcatggtggctcacacctgtaatcccagcacattgggagggcccaggcaggaagattgcttgagcccaggagtttgagatgggcccagacaacaaagtgagatctcatgtctacaaaaaaaaattagctgggcggtggtggtatgcacctgtggtcccagttaccagagaggctgaggtgggaggatcacttgagcctgggaggtagaggctgcagtgcactgtgatcacgccactgcactccagcctgggtgacagagcaagaccgtttctaaataaataaataaataaataaataaacaaacaaacgaacgaactacatacagaggtgtgggtagggttcagggaaaccacaaagggacagtacagtaatttggggctaccaacaggcatcaccatttcta

SEQ ID NO: 138051 - DNA, 1045 bp, Homo sapiens
gggtatttgaatgggaagcttttgcccggggaaccaaagctctcatggatgaggtggtgaaagccacttctaggggctgcatcaccatcataggtaagcggtcctatacaaagctaatacccatataagctggcagaattctgatcagaggaaggtggaatggagaacttcttctatgtctctttattctgggtaaatgttaagaggtaaacaggtaggtaatttacagaggagcctcttggtaagatagagttgggggtttatcagctaccttttgggttggggagcacactgccttacagttttggtgccaatcccttttttttcttttctctcttttccctttttacctggctttcattcaacaggtggtggagacactgccacttgctgtgccaaatggaacacggaggataaagtcagccatgtgagcactgggggtggtgccagtttggagctcctggaaggtgagggtcttctgttttttggcttgtttgggataagggtggactgtgcagtgagaggtgggtagaatggagtggagaaagttagaaggtagtgttgtcattagcagtcattactacctgggcagtacagaggaacttcagataaagctcctggcatccactgaggcggggagggacagatagaaacttggtctgagagttatggtctagtagacctggaatccacaatgtaaaagttggccagctcctggccatatatcctaaaaaagagctggcatgttattgggaagataaagtgggggaaatctggcttactgggccctatagtaatgctgtctatgtatgtgtgctctctcaaaaacaggtaaagtccttcctggggtggatgctctcagcaatatttagtactttcctgccttttagttcctgtgcacagcccctaagtcaacttagcattttctgcatctccacttggcattagctaaaaccttccatgtcaagattcagctagtggccaagagatgcagtgccaggaacccttaaacagttgcacagcatctcagctcatcttcactgca

SEQ ID NO: 138052 - DNA, 1344 bp, Homo sapiens
cagttaaaactgttagatctctttagtaaacatacaaatgtgtttttcagtaggcttcaattacaaacagttaagtacttgtttcttaatagtttcattaatgttgagtcctaatatggcaattctgtttttgagacacttttctgccttctatcactgatagtagcatttaagtttcagattctacagcctagtcagcagatttatctttgacagcataatttctgatctacatttaaatactactttattttataaggtaatatagttacttactgtcactagctaatttttttttttttaccaaatctctcaatataggaaacattttttggaaaggatggatttagaggagagattctaaatccattttggatgtatttgtttctttgacttccttaacttccaaactcaactccctttctagatcccattcattttctgcacctcccccataggcttgtttctctccattgctattaaatgtagaaggccatacctggaattttaaaaatattattcctggtaatacagctcagtgtcattttcctatttttaaaacatgctctacatgcctaatgttttgtgattcactttaacctgatggtttgcatttgctgtttttcactcttatgtcagagcagttgggttttaccccttagtttttatgcctgttaagctttactgtgcttttgacaggtagttttgggtcagttatattcagttttagtattgtattccaagttgataactcttccatgtttcacatttctaaatttaacagagatgctgtagcttaaaacatgttttgataagtaattacactggacctaggcaaaaccactgaagaacaagtgttcctttttaccacatacatattatgttttgatcactgctgcttgagccccgctattggtataattcagatcattttagcttgttgctgaggatgtcacatataagacaggatcaaacctgaaagacactaatggttcatcctctataaggccaacaaagaaaacaaattaatgtgatgtaacttgcatttatgtgcactctgcataggtttcccaataatactgtaatgttgctgaacacctttccctgttttccatttatacacatattaaagtcatattgggaaagatggcaaagcttttgagaatataaacacacctgttttgtttttcttaagttcaacatacttttgtagaatttgtaaaataaatgttcgtatcataattgagaatttatagccaaggatcctcaaaacagaagtttcatcttaggatagtgtttgatatatctaagaaagtccagtaacagagaagaaatgtctcaaat

SEQ ID NO: 138053 - DNA, 1049 bp, Homo sapiens
tcattcattcatacattcaacaagtatttactcagtgtctagcatgtaccagccctctactggacacttaggatacaacaatatgtagaaggggtgattatacagacaccccccccccccacacacacactctatagataggtagacagcaaatatatagcatatagacttgtttcagtagtaatataaaataaatacttgcttcatataagctttattattatttcaatgagatgactgttttatgccaattattttgtatcctaaagggattttgagctgtctcaagaatttctaaaaacattatcacctagcaatggatttcatattgctgctatacaaaatttgtcatgaattcatatttattattttcccattattaaaagtaaattaccattctaggacttgaaagccacatttctagaactaagcattagttataataatttcagataaacaaaagaattacaacattaaaagtctccattctgtgttgtattttagatactatgcaatcatatgtttaagataataaaaatacatagtatgaaagtagggcatcacatgagtattattgggtccttctttataatatactgttttctaaaaaccactttagtataatttatggaaagccttaaatgaaaatttaagttttattaggcaatgtcactataagaaatatattttatgttccagaataaactttttattacccaatatatgaccatgatgggtgagaaacaatagataagtaaaggtacaattataccagaaggctggtatgatagttgattttccttagcagtaggaattaccaatattttttataatttaaatttaaaccatgccttggttattttcccattggttgtgatgaattttcatcaactcatctacactctgactcatgtttgtgagttaacaacacatattttcaaaatagctgactattattaaagcttggagctggttttgactgtgcaaagttaactgactcctgtaaaggactttgtttaatgttattacagtatttattaaaataattc

SEQ ID NO: 138054 - DNA, 1027 bp, Homo sapiens
gtactgaacaaggatcttcgtgatgaatggtaaaaaacgagaatttccattgttttggcaataatattgtttccgtggaagacatacaggattttcaggctgctgtttcatgtaaacacagttgttctaaagagctaatttaaaatcacagtgtagaacaatttagaaagtatgtcgactagctttgtatttctttggtttacagtttattgtgcgctaacgtggcttgtattatgatgaggtttcttctagtaaaactatacatgacatgtctttgatgcttaattgatttatggagaatgtgacatttgctatattgaataattcatgaacttgcccataaaggaagaatcatgtttgaatgaaaaactctgtcataaactgaatttgcaattatatgtgaaattaattgctgtttgccatacaaatgcatcaatgtgtcatctttaaactctcttcttgtaaattttaaatattttcagtaaaaaggtcttattgagttgctaaatacagtatttcagttaccttttaaaaggaaattcagcaatgtaatttatcattatttcagtgtggaaaagaccagacaaattcaaaggttagaatatttcagagcttggtggggttattcactttgctaccttacaaaattataccatctttctttatcttgactaacataaagacaataataataacctgagatccagattacccaatggctttgcaacacgtttatttttcagaacaaaattcccaacatcatatcccatcaacatagattataaaaccttttgccttgtcacagatgaaaagttgcactcttgccaagaaggatgagttcacctgataaacttgatggcatctacattctaaagtctctcctgccaatcagagatgggaatgaaagccttattggaacaatcaggccagtctttcagaatgtgtgctctctgcaagttaaagggagaaccaggaagatgcctcacagaaacattcaggccaagcttagctaaagcttgatctattc

SEQ ID NO: 138055 - DNA, 1419 bp, Homo sapiens
ttctcacctgtattagtgtggatcgtttcctggccattgtctatccttttcgatctcgtactattaggactaggaggaattctgccattgtgtgtgctggtgtctggatcctagtcctcagtggcggtatttcagcctctttgttttccaccactaatgtcaacaatgcaaccaccacctgctttgaaggcttctccaaacgtgtctggaagacttatttatccaagatcacaatatttattgaagttgttgggtttatcattcctctaatattgaatgtctcttgctcttctgtggtgctgagaactcttcgcaagcctgctactctgtctcaaattgggaccaataagaaaaaagtactgaaaatgatcacagtacatatggcagtctttgtggtatgctttgtaccctacaactctgtcctcttcttgtatgccctggtgcgctcccaagctattactaattgctttttggaaagatttgcaaagatcatgtacccaatcaccttgtgccttgcaactctgaactgttgttttgaccctttcatctattacttcacccttgaatcctttcagaagtccttctacatcaatgcccacatcagaatggagtccctgtttaagactgaaacacctttgaccacaaagccttcccttccagctattcaagaggaagtgagtgatcaaacaacaaataatggtggtgaattaatgctagaatccaccttttaggtatgagaaatgtgttcaggtccagatatggtttctcctataatttttcctatgctataaactaaagatttgaagctaatgatactgagaataatgcaccaaatccagtcagatacatttgtttgaaggtatactgtagagtttttattgctgttttgttcagtaattataggtcaaatctaattacaacaaccaagatggattgccaaactcttctgcttggttggaatttcattgtatcgcattatccaggtggctagtggcatttgataatatagagatgactttgaaactttcaaaaaggtatttctattccaatgatatttggtaattaggttgggcctataaatatagaacaaattcagggatttttaaaaaattgtgttactactgatatatgctagttttattttatttttttgaactgtcattgagtttattttagcacaagaatatttttagcctaacattattaataagaaatgtgtcaaatttttaacattggtaaaatatgttatgtgcattttgaaaacagaaaacaaattgcgttggcatgtacgtgggtgggaagaaaaagaaaattaacaggatttacacaattataatcaccagcagtgtgagtttaaaaaacttcgttgtttttacaccaaattaaaattttcatgtcaaacttcaaagccagaaagct

SEQ ID NO: 138056 - DNA, 1093 bp, Homo sapiens
attaaaaacagtattttaaaatctacaaaaaaagagaaaatttttttataatttacttaaaccgcaaaaatctttaaaactcttactagtttttaaactaaagtggatatttaagaatattagaacttgtaaatataacttctgagcttgaaagatgctacatttgtgctcaagtcaggagcagtggaaataaaccctcgtatacacacatacacagcagcagcaacaacaaaaaccaaaattaaatgttaaaccctgaaaaacaacaaaaatattttaaaatgtgcattaatcaatttttaaaatatttggataacatggcaatttaaaaatgctaagaattttaaaacaaaacttccaggaaaaatgtatcctgcaagttgctgaacttgtgccagaaagtggttaaacaattataaagcacagaacaataacaaaaaagtaaaacttctaaaacaataagcaaatttttaaaactcattaacttgtttttctttctgatgatatgcagacttaaaaatactgagacttttaagtaaaaatctgttagcataatgtaactttaaaaactgtaaaatctgtgtctgggttaggaacaaagtgaaaaaatgctaaaacaatagtaaaaacaaattcttaaaactggcattactttttcccaatgaaagtcctaaaagtaattatgcattatgtagtcttatgaaaagaggctatagatggaatatataaggcattagattcagttaaataaaattaggttaagataagttcagttgttagattatatggtaagatcaaatcagtaataaaagcgtgaataatcttttgtttctttcagtattcatgtttttccatttcttgttaagtataaaatatatgtgaacatttgtttgtgcccttgcttcttaacattataaaattttatgattatgacaccaaaccatttaatgggatattaactaagttgaaataaaatatattattaaatgtttcttgtgtaatttccatgtttagttttaatttttttatatttcacttctcaaatttccatttttatagttaatataaattgctaataataaaacttgtcaca

SEQ ID NO: 138057 - DNA, 1049 bp, Homo sapiens
tgcttttattcctagttttttaatgatttttttcttttttaattaaaaagttttaaaataattttagatttaaagaaaagttgtaaaaatagtacagcaagtccttgtataccttctaccaagcttttgctaatgttaatgtcttacagaaccatagtataattatcaacataaggaaatcaacatcactacaagataaataaataaaccacagatcttatttggatttaccagtatttccattaacatcctctttctgttccaggatcctacgttgcatttagtcgccatatctccttagtctcctccagtctgtgactgcttattcagtctttccttgcttttcatgaatttgacacttgaaaagtacgctagtctgttatatcaaatgtctctcagttcaggattgtcccatgttttctcttgagtagattaaggttatgttttcggcaaccatgccatagaaacgatgctatacccctctcagtttatcatttcagaagataaattatactgaaatgttttatcactggtgatgttaaccttggttaagtggtatctgtccggtttctccacagtaatttctccccttataatcaatgatttctattaatttgatattttttaacagaaaacaagtgtagaataaagaaattgttccagttcctcaaaagcattgtgactagttggttaatattaatcttatctcatatgttttataattttaatatcttgtttgcaggtagttatgttggggaaataactttttgaatagccttatccttaatggctcttttcagagccattattttacttgaagtttgctgcaaaagaacttaataggaatgccaagaaatgtgataaagaagaaaaggctgaaaaggccaagattaaaaggtaagtcacttttaatatatttacttttttaactcatgaaatgagcataattaatcatggaacaatgattaattatacatagtttatttcatgtgaagaaagattaatatctttagcattctaagccaagaatccatttaaataaattcctt

SEQ ID NO: 138058 - DNA, 1175 bp, Homo sapiens
actgctaacgtgttccctcctcccttggcttttaaaaaaaagcttacaatatgtttaaatgaaatttgcataacaaattgtgtaatagatcatttgaaaagtactgttttgttacccttgagtattattcatctaaaatattaataatgaagtgctggtagttctgaattatttccgtacgtttaatttataaattagattcagtattgtttataaaacaagtgtttttgtctagtctgaccctatagagcaaaaaatatgcccatgatatcctcatagtcatgaaattaccaagtaatccttttacttttgtagatttgtgttcatttttattctaaatgtggttagtcgttttcataagaaaaagaagttactaaaacaaaacagtagttgaaggttgtggtacatacatttttgctttccgtttttttcaaaaatttaagactgctgaacacaacgacaagtttttaacactaaaaataccttttataagtttgcttgtaagtattcaagcagaaattctcagagaattatctgagataatgagccacattctttctctaaacatgtgttggtatctccttcaaaaaagatgtttaccagtgggcagttgtagcctgttctcttcatattagtgataagaaatgacttaaaaaaaaaaaaagactagactgttgctacctagatttgttcacttttttattcattcattcagcatttactgagtgtcttctatgtgccaagcactataattttataaagagctttacagttcacaaagtccataatctcagtcatcagaatgacatcagttaatttcatttttcagatcagaaagatgagttttagtgaaatcaagtaatttgcctaagcctacatggctggtaactagaaaagccttgattcatccggcatatctgcttccaggtttctcgtcttaacttttatatcttattaataagatgttttgttctttctttcttcccaatctctatgaaatggagacttctaaatcatgcctgtgtatcttgaaaataacatttctttttgcttctggctcagatctttaataaagaggaccttgagatatggatcttcaaacatcttagtgctttggaatttttaaaactaccaggtttggaagtagaaaaatgattgaagctcaaatgattgaa

SEQ ID NO: 138059 - DNA, 3386 bp, Homo sapiens
atttgtgtgattttggctatctggagctttatttataatttattttgaaaaataaaaatgccacatttatttcccaaatgtcaagattttctagaattagataattagaataataaggctgaagacattttaaagcatattttatatgtagtgaaatactgtgaaaatattagtgaacagcattttgctgtaatgtttatttcagttattaagatttaaagagttagtcatcagggtatgttagataaacatagttatcatttattaaacaaacagataattttctgtttgcatgcaaattattttaataagtgtgaaaataaaagtttggaagatagtatttttacttttatatctggacttttttttcccccaatttacactttgctttcttgtaataccacctcctgtgaatgtgttgtaattagtatcacattgattactttatcattttaatttctttgaggccctttaaacctacgtaaaatctgggtccagccatagcaaagcaagtacaaaatgaacaaagaattttgaagaaaagcctaaatcttaaattgctaagaaaaaacactgttatatttaggcccgtgagagcatatacatgtataaacctaatcctatgctagatatgaatagtcagtgagctgtaatatttctcataaatgctaataatgtttaaattcccagctttaagatcttagtgtgtgtatatatttataaaatctgaattgtgtgtttcttctatggcttactgtgtgtttctctttcagcaataggatgctctctaaaacattcactagcctactagcctacttactaaatttttgtatatgtgtgtttgtgcacttgtatgtgtgtaaagttttttccccaacttgacacaccttatctcagacattcaaaaaaagagaacattttgtatggaggacagtctgccaactttttgcctctctacagctcttagcctgtatatttactgcttgatcattcattatgccttctagataaccagtccaggttttgtcatatacctgtgtccctctattctttttatttccctttttaattttttttcttttttttccctccccagaaatcaggcttgtgttggaattcttctctataatactttgtttcccgcagatgcaaagtaacaaagtaactgagtaaaattagaaatctcattctgcacaactgtgcgctcagatatttaactcagccttctaatacttttaagtacgtttctgttatttatctttttgttgtttttgttttaatcccatagattgtcatcagacaataatagagtgattgagagagaaagatataaatgccacttctaactttttgataaaacttttttgagcatttttcaaaaatttgtatgtttgtggtaatggggaattaaacaccttttacagctgatgtatgttggaaatcattttatgtacatttaccaactggtacttatcttcaagttggaattttcacatccataaaagggagacttgcatcatatataattttcagtatactttgctgtccagccttttaaacaattacagtaacattttgagttctgtgatgaatagttctaggggaagggatggaactttcgacatgtaaagtccattgttttaaatgctaaccccatccccaatatttttgtggaacgtgaggctttatgaaaggtttatcagaaatagaatattctaaagtcacttttatggcttatttcaaaaactagtgtgaaagtattttcatgcttttttgtttctcatcttttagcaaagcttctttaccaagttttgattaaattgcaatataaaattaagttttttcacggtgctatattttgtggaatatgggtagcactcaggtttctttcttttttcttttctccttccttcttccttcattccttcattcctccctcccccctccctccctccctctcttccttccctccttccttccttcctcacctcggcctcccaaagtgctgggattacaggcatgagccaccgtgcccggcctatatacccttattcttgattatttcttttttcatcttttcaatcctgcttacttttatcctcacttttctttctgccatgaaaactgcacctaatttaccacacttaagattggcaatttttgattcattgatgggagaagtacagtagaaaggccctgcagtttagaattaagttgtgtttgtttatttacatgtatgcccatttcttctaaattaaatctagaatgtgagactttgacatataaaagcatgataagtattttcttaaaaaataagactattgatacataatgaaaccaccattggtaattgaattttaaaatgatatgcaaaaatatttagaaatccagttgggaaatgtgtttttgcatatgtcaccagatacacattaggcagtactacaaatgttaattcttaaacaatactgtggtgatggcaatcagtaatttatttctttgtcctgtaacttatcattcttgtcttttgtaatgtcttacacagtattaacataactgtaccttttttttgttcttggtatccatacattttaagatggaaaatcagttcatagttgatatgatattgtatatgggcaaaatgtccgttaaactaaaattcagtaaaaaaggtaatataaactggcttgatttataaaagatgttttgtttggcagttatcagtcattataagcaattatcttcaaagacaaaaaaactggactaatttgttgccattctttatgggatgtttacaataaaattccaagttgtttggaatcaattgcactcttgctgctttatgccttaatttatgtaccagagaaaaattaaccagaagaaagaaatatggagttacctattcagctttagagattgtaacatgtaactcttaggtctttcttgtttctttgtcatagaatattttattactattactttttaatctgagaaactaggatgcttcttcctatcaaagaaaaggttttgttttttgttttcatcttagacattgcaaatattctttgggtcacttttaggataataaatatgatgtttacactttaaatgtgggctgcttggtgcattcaataacagcctgcaaagcatttgtcaacattttgttttgcagagcttttcaaaatgaatagatctctaacatatttatgacttacaacttttaacagctgagttatatgtacctgacattttaaaatgtatagtaagattacctacattgtaaatggtgctttaattcagtgtaagtgtaggagagagagaagtgaggtgagatgatctgaatgctctaacaggaacattcataactatatagttacccagaatttgtc

SEQ ID NO: 138060 - DNA, 2816 bp, Homo sapiens
agataatgaataagaatttatcaaccgaatgaatgaaactatactaattagtgttctcaggtaattcttcctgaagtaggcccttaaaacttctgcctaaacctcatggccatcattccacccccatattctcctccctctcccaaaaaagcagacaaaaataaacactttaatatcttctattttgaagaaatttaagttcttagtctgacaccctccatgattgtattccacatatttttgggaactgtagactgtttttgaacctaaataaccattttgtcaatgtcaaagcttaactattaaaaatcattcattttaatttagatcactcccttgatggaccccttacaaatggtgatggcagagagccccggacaggaatcaagagaaaactacttagtgcatcagaagaagatgaaaacatgggaggagaagataaagagaaaaaagaaacaaaagagaaatctcatttatccacctcagagagtggagagttaggatccagtttaagttctgaaagtacctgtggttctgactctgactctgaatcaacttccagaacagatcaagattacgtagatggagaccatgattatagcaaattcatacaaaccagacctaaaagaaaactcagaaagcaacatggcaatggaaaaagaaattggaagaccagaggcacaggaggaagaggcagatggggaagatggggtagatggagtagaggaggcagaggaagaggaggcaggggacgagggagtcgaggaagaggtggaggtggcactagggggaggggaagagggagaggaggaagaggtgcttctagaggagctaccagagccaaacgagcacgtattgcagatgatgaatttgataccatgttttcaggacgtttcagtagactgcctcgaattaaaacaagaaaccaaggcaggaggactgttttatataatgatgattctgataatgacaattttgtgtccactgaggatcctctgaatcttggtacatccagatcaggcagagtgcgtaaaatgacagaaaaagccagggttagccatctcatgggatggaattattaacagttaataaatttagaataacttaaaaaattcaatggccttctactgcagggaatttaccaggaaatctacaaagcaagttgtgtggggacttctgcttcctttcacattggtgcttttccatttatgccagtatacatttgtttcaagacttttgatctccacacttcatttgttcaaataagccttactcattaggccttaaattaaaagaaattctgcccacacacacacaaacacatacacacacatacacacacacagacacacacacacgaaacacaacacagacactacagatttactacattaaaggagcattcagcttcttaagagtagcatgacatttttatctcaatagaatagccctcttttgcttttgtatcacagaagtatagcaccttcttacagagttttatatagtttgtttttgccattttgattcctatacccagtaataataacttttgcacaatacaccaatcctaaaggcagctattaaatgtttacagtttctatattgtaagagcgatctggattattttactcttcccaggccaaactttcatgacttgtactgaactgaagtatatatttatactacagttttttggggggtggggggatcttgatatgcttttcattgatttgcataattcacgttaaaggtgagaaagggttggtgccttgtaaatatgtagcagatcttcgtggtgtgttctgatgtgtgcattaactttattaaaaaagaatacttgaggtatcaatctagacaaggtgccaaatgcaaaagtttcccgcatcaatttttttcctatcacattttattgcattaatagaatttgtgtagcttaaataacttaaacatttgaaaaatcctcatccacaaagaacaacttctttgaacagtagctcagctacctcttaactacaactactggaaacattaaggaaaatagatgctgttattccttactgactaaggagaaatagaacaagcttagtaggaatgaataccccataagttataagctgagaggttgttaataattgtattggctctcaaattaataattgtaattaacaaagtttcataaatatagtatgctctaccaccttaggctttcttagaacatatttgtgtaagtagacttgggctactgcttatatatttctgctccacttaccatttaacagctgtgagttgctggttttcatttgaatcttaaaatttaacaaagcacctggtttgatttggaatgttttggctagctagtattatgaatcaacttatagattctgctcatatcattccaaagggttcttctgttctagtctttcaggaaagaaccttattgcactgcacactcatgttgtgaatcattattttatagataaaaaacatctttaaaaacccttattgtcttgtttacagcagtagagtgcacatggttccataagtgagcttgagttccaaggtcagttttactccccaaatttaatattacagatttgttcatttgttagatacttacatttctgaggtaagagggataatagcaatttctgtttctgtaacagcaaatttgttgcacttagatcaggctcatgggataaaacagacttcttagtatatacctagctatcccaggatatttcttaagctaatgtgtttgtctcatgctttcaatcatttcatgcatctgaaaacccttaagtgcagaggaaggcgta

SEQ ID NO: 138061 - DNA, 1042 bp, Homo sapiens
gttcagctatttgaagtttgtgaagaatagttaatatgcttttacaaataattttattagaatatagattttattttatatacattttaatgcaagattaagtagcttatccattgttatttaaccatcaaataacttaaaaataggcttttctgaagatattttatagtggctatgtaagaaatgttgaaacatatttgattacttgaaaataattagtgcctttgtttttcccagtttacatctttagtgtctcctctgatcttgcatacttatgccattgccttttttcattttacccttccttccactgccaagattaacccatgcttccttcatctattttgtttttcccatccacagagtcgtttatcctttatagtacggtgtctgtcccgaccacccttcaaaagctgttctcacattcatcagtactcttcagtggccaactagcgtctttttttagtttcaatctctatatcattgcatgttgttgactaccttctctatgaactctacttgtaagcttctatactctattgattagcttatatctcttatttctgtttcttctctttgactctactgctctgtatttgcagtttgccactgttttttgcttgtttttgtcttccacaaataaaggattctaatgactgcatccgtcatcttgatgtgatgactctccaaatgcatatgcagagcttaaatatctctttattctattagaataatttccaagtgcttccttaaaaaataaaaaaataaaaatattcggttgcttatcttcgcatctcaaacttgcttctttttctgtgctcactattttagttaatggcataaccatctttcttgccacccagcttaaaatctcacagtgttttttgactcttcatttatccctcatacctagtcagttgccaagttttgtggattccacaactctttaataccacttaaatcttctatatagtttctactgctatcaccttagtctccagcctgaagtattagtcagcttgggtttccataacaagatacc

SEQ ID NO: 138062 - DNA, 1076 bp, Homo sapiens
tgaccaatttgaccctgacccttaactaatgacacttaagtagaatgttctcatagcaaggaatcgtggaaatatgtgcctaatttgtagagtggaacaatttaatcatatgtgaataatcccatcttttatcattaaacagtgtgctggggttttggaggttgtatcagcctttaagcaagacatggaagctgtagagatgaagccaacggctatggattttctattctttaccttcatagttatttacggttattactgtggtgtgagggctaaggctttcccacagacttatgctgtttttatgagccaccaaaagatgttttggggttgtggggaggtagttggcacattgaaaagcaatgtgtttatttcatggtggatcgtagtaggtgataccaattttagtcccattgtattccttaatattgctatacagtatttaataacacattcttctttgtaggattatcaagatgttatagatactcctgtggacttcagcactgtgaaagaaactttggaagcaggaaactatggtagtcctctggaattttataaggatgttcgccaaatattcaacaactccaaagcttatacctctaataaaaagtcaagggtatgattattagttgggttaattatcaggcagttttctttaaccagttactgaaaattggtcctcagtatcttttttgaaacatggattgcttgttaggcatgcataaagatacatttagcagtcattctgaaattaaccaccttttcctttctcttatttgtctctttactctttagtaataaatatttataggtaccagagaaaaaacaaggagaggagaggtagtaatttaagtacactttaatataataagtgacttaataaatagaaaggtgattgacagtgttgatttatgtgaaatatttttattagctctgaacatgtatgttccatttattctaacaaataatgaaccatcttgggaagttgtaactgcttatttatactcacatttaatatcttccctatttttgtcagaacttaaagtatattgagaatagaaaaatagtaatca

SEQ ID NO: 138063 - DNA, 1024 bp, Homo sapiens
cactagtggtgcttgggtcttgactcttcatattaaaaaattatcccttagagagatacttaactgaaatagatctcttttctataggaaaatataaatgcatattatatgagacctatttcttgaaatgtcaatggagtaatcatgaataattaataattttatattaaataagcatgtcatatagaataaggtttttaaaaaatactaacacttagatacaattttagcaaataccaaccactacactgttcccctcctttccgattcttgtttaaagagaaaccttgtttaattcttcttccagtatattttccagcttgtacactgcatattgggaaagtttggtgtgagtctccctctatcttttgttctacttgctgctccagtggggaaagttaactgtgattttatttcccgtttatttgtaaatgtccatctaatttatatgactttgaatgtaacttaacgtcttttcccactcttcctttttaattaaggatacagaaattgttgatttagattcagacggtcctggtacttcatctggaagaaaggtgagtaaataagtgaactgctgaggagatatgttttcaggtttcctgtgtcagtgatccctaagaccaaccccatatttggagaattgctagaaggattcttgcaactaagtatattaggtatgctcattgataatatttattagagtgatgcagtaagggtacccagttgagtcatgggtgaaaagacacaggcagagtctggagaaaattatgtacaggcttccttatgctattattatctttcccctgtgaggggtcacatattacactctttttccagcatgtgtgtgattagagactcagtccccaaagattttactaggggctggttatgtaggtaccctctgactagcacgtactaagattccagattcccagaaggaaatcaggtattcagcacaaatcacattgtttatactgtctaggtgcagtaaactgtcttaataatttaggaagccattcaa

SEQ ID NO: 138064 - DNA, 1289 bp, Homo sapiens
agtattccatgactggttaatctgcctttgcaattgagaactggttgtatttttataatatattattttgatttaatatttatatcataaaagtaattagataaaaatctgtcattttttataatctgtttttttttcttgctcttcttggctcttcccctgaaaactaaactaaacattcttttgaccttgtcaaatgactctttacctataatgtcctaggtcagttctatttgaagttttgtatatacattccagtggttcagaatccctgcttgtgctttaaatactgtaactatatcatctctttttagtgctcatcagtcaaatatattgagttatatgcatattggaacacctttgacacactgtgtttaagtacatatttgttccatattgtatattcctaaaatatactttaaatatattagccaaggctaacagagtattttttctttcacaggagaatatcagcattaatgtgggaggtacgctatattgaacataatgccaggactttcaatgagccagacagtcctatagttaaagcagctaaaattgtaactgatgtcttacttcgatttattgggtaagaagcagttttagcttccagagagtctaacttaaggtttttaaaaaattaattttaaaaaaattaattgaaaaattgtaaaaattactgaagcttttgaaatgacttgtttcttagggatcagagctgtactgatatactggatacttataataaaattaaagcagaagaacgaaacagtactgatgcagaggaggtaagaatcacagcatgattagtaggaatgagttacttttctcttatttgaagtacagtattatgtgtaaatgttgtaattggccatgaacagcaaaacagatttttgaaatctggctgaataccagcgtcttttaaagtgtacttagatggcatataccaaaaataaaatagagctacagggtttattcagagacaggtggccagtcatcatatttgacacagtggatgtaagtgacgagaaatcaacactttattttccaacatttagaaacaagacaagtgctcaatattttaaaagaatgcttagttgatggaaatttcagtaaggattttattttctatatgctgtatagaaaatattaaagtattttaaagtttcaggcttgaaagtctaaatttttggtagtttcatgaaattattactcgatttcctttctgaaaatttataaagataaatcagtctcttctgaatgaaatggaagtagtactcagcagaccc

SEQ ID NO: 138065 - DNA, 1108 bp, Homo sapiens
aagaatgatagacgaaatgtttattctctgaggactgacttttagtctccatattgacaaaaagtaggctttctgccctctaagtttcatagcgatggaccatgttttctctattagaagtttattgttatctgtatgtaaccggagttgtactttcaagacaactgtattgccctttttcaaatttcacccccaagaagtcatgtaaaattgtggtagtatatgaaaggaagtactatatgattaatttgatttgcatcttcttattttttaatagctgggacaataatgagagagaaaagatgagcccatgggatatggagccaattccagaaggaagtaaatatgcttttaaaaaatgaattataattcttttaaaagtaaaatggtaatcacatgatattggaaaataattttttctaatttttttttttttatcttatacctagctgcctttccagatgaagttggtgctggtgttcctgtctcccaggaagaattgactgctttgctatacaaaccccaggaaggagagtggggggctcattccagagacgaagaatgtgaacgggttattcagggcatcaaccaccttctttccctgggtatgatgaatgtgaaaaaattttaggagcatgcaagagagctaggaaaatcagcagaagttttaagttctacagaaggatatgcagtttctcactgtacacttcagttttaactcaagaagcacagtgattctagttttaatattagcagttttatatgcttggccaaagtaataactgataattttttgtttagcaatctgggggataatagtgaaggtaactgtgtaagtgtctttttcctttttgaatcactttgattctctagctattcctgagcctgactttggatgggtttcttggtaaggacagtggatgagtaatgtattttacccacatgagtagttaaatttgctaaaacatgtcacttgagaagtttggcatttatctaggaaagacagaaatctgaagttaaacccagtgctcctctaattttgttttacctgatttgaaccagtgtatcatgcatgattcatagatatgatgtccaaatataaagaata

SEQ ID NO: 138066 - DNA, 1052 bp, Homo sapiens
ttctgaataagagactaaagggccattttatgatagttttccaggtaaatgaagagttgtgtgatgattcttgacaggaaggatataagagagaatatgtatatttatttatttattttttatttattttgcaacggagtctcgctctgttgcccaggctggagtgcagtggccctatctcggctcactgcaacctctgcctcctgggttcaagtgattcttctgcctcagcctcctgagtagctgggatcgcaggtacacgccaccatgcctagctaatttttcgtatttttattggagacaggattttgccacattgaccaggctagtctcgaagtcctgacctcagggtgatccacccacctcggcctcccaaagtgctgggatacaggcatgagccaccgtgcccagctgagaatatgtatatttattaagataaagatttgatttagatgtttgtaaaactttttattaatgtcatcaggtgctaaagtagcttatcaagtgagctttacataattatcttctggaagatagggacagctcccatctattcgtcatcaagtaaaagttgaatcttttttagaatcagaggattcaataaaacatgtgatttcttactctttttttttttttaagacagagtctcgctctgtcacccaggctggagtgcagtagagcgatctcggctcactgcaacctccgcctcccaggttcaagaaattctcctgcctcagcctctcgagtaactgggattacatgcacccaccaccacgcctggctaatttttgcctttttagtagagatggggtttcaccatgttggccaggctggtctcgaactcctgacctcaggtgatccacccgacttggcctccaaaagtgctgggattacaggaatgagctacctcacccggccaagttcttactttttatcctaaccttgttgtcctaggaaattgtaggagcagcttatatgtggtaaaagagcttgggctttggaataagacctggatttcaattctagctttgctatatgctaatatataactt

SEQ ID NO: 138067 - DNA, 1264 bp, Homo sapiens
agttttgctcttattgcccaggctggagtgcaatgttgcgatctcggctcactgcaacctccgcttcccgggttcaagtgattctcctgcgtcagcctccctagtagctgggattacaggcatgtgtcaccatgcccagctaatttttgtatttttattagagatggggttttgccacattggtcaggctggtctcaaactcctgacctcaggtgatccacctgcctcaacctcccaaagtgctgggattaaaggcgtgagccaccatgcccggcctaattgtattgttatatatatcaaatattttcaatctgcagttgattggatttgttgatgcagaagctgtggatatggaggggcacatatactttaaaatatgaccagttttgtgtacattttccatgaatctgcttcttcagcacacttatgaagctgattgaagggaaaggactgtgtttactgtgtttatatgatgtggtactgagcacagggctacgtaggcatgaatactgaattaacatcatttgaaacctttattgtataaagtctttcaatattataattatttctttctgcaaacagaagaggatgtttgtaggaatgtatattggacatacagagttatataggatgctgctgtttaataccttatgttttctgttttagcttatctattttaggcaaggacatgaagcttatgttcgggctgtaaggaaatcgaaaatatacagtgttaatttacaaaaacagccatggaacaaaatggatctcagggtaagtttgccaaattcataagctatgcaatggaagtagctttggaattaaattgcttacccatggttttttcccctcagttttatgcatatttcactgttgattgtgtatccaagataagatgatgatctatactcttgtagaactgaatattatggatcacattttatacgtttctcaaaatttgtatgctattttctattgtctagtctatactagtccataattagagcaaagcaggagttcccctttgtggatattttccgtaatcagcaactttttaccttctggagcctccataagctgagtgtgtagactataaacactctcaaggttctgacagctttggtatattttaaatatgataaatcacaagaagcccagaaacttttggtgttttgtaaaatagctgttttgatatattacccttgtagctacatatataatacccatgtggctccatattttatggagaatgattttgtcaata

SEQ ID NO: 138068 - DNA, 2435 bp, Homo sapiens
tcaatatccctgtcttctacctccacatcttgcttgtcccactggaaggtcttccggggcaatatggagctgttatctcttaggttaacaatgcctttttctggaatacctccaggaggaccttcttgaggctgttttacagtgcaattttttttaataattaaaaggagtacatttcaaaatgatacgaagtatggtatagtgcatacataaaacagtaatatagtcatttattaccaaatattatgtactgtgcataattatatgtgctatgcttttatataactagcagtgcagtaggtttgtttatgccaataacaccacaaacgtgagtactgcattgcactgtgaaggctatgatgtcactaaacaataagagtttttcagcttcattatgatcttatgagactaccgtcgtatatgtggtttatctttgactgaaatgtcgttatgcagcacttgattgtatttttaaagatgagaaggctctcataataatgtctaatttgggagcattggttaagtcagacacataagctagtacatcaaaaatatttacaaatgtttcatttgatatatactttattttacgtttaatgctgtttttaatcatttgtgtagaaatttataggttgtttttactatgtttaaggtatactaaaatgtaagtaattttgtggctttgtatctggtcttattaaggtgatggtgaggtagtagaacaggtaattgggcagcaaaccaatgaccaagatgagagcattcttgatggaataatcagggagctgcagagagaacaagacctgagactaattaatgaaggagatgttccacatttaccagttaatagagcatactctgttaatggtggtaagtatttttatacttgtaaagggtgtagtttatgtactgtaattattttacttttaccaaataattacatggaaaatattttacgtttataaataaaaacttttttattaatttacaattttgatatcagatatattgaagtctcataatctcatcatttgtggataaaatgacttaaggtctcctgagaaatacaggtgatgcattttaatacactgtcttctttttactcagtaatttatctgtaatctttacatttgttttaagaagtgaagtgctacggtaagtctagcccttttgtagaggaaacaacctatatagttttcaaaattaaaactaccttaagtttagaaattactaccaattcctcttttgtggagaggaaagcagaataccatgctcttctcttgaataaaaaaaaaaaatacactgaagacaagaagcactcttagggaatacagatacagcttctgaattaacttttataatagtttgatcttaataccagtagaagttattgtataattaattatcttaaaatgaatattctatccttaaatgatattaaaatgatattctatcctatcttttacattaaacgtgccagggcatctgagttttatataagttttagcttgtatcaagagctatcagttttattttcaaatgtagtcatcttatgagatttttcagatttatttcttttcatatatttgtaactagagtcatttatctgtgtaacattgcattttagattccatggaaatgaataaggtgatttaaatttgtggtgattcacagggtattttactcatttcctgatgtcttcaatatctcataaaattaaaatagttcatttaggttacttgaacacctaactcagataagcttttctgaacctagaacaagatgacaagtgggctgataatcctatctatccaggccctttattcctgagacataaaactttctcagaaccctgatttaaatatccattaatgaaatctgtattctgttgtaccgtcaatactaggtttctgtggacagattagaaatggcattagtcaagagaccccactgacttctatttgtaatattgatttgttttgaaatttttctgacatttaacagttggatgtttcagtttccatttgtgttttatttgtaaatataagaaaaataacatgaacctttctggagtattaaaaagtaaaacttctgttactttgttttctttctttcgttgctcatcaatcttgaaaatgaaattttgatttaaaaaaatatttatttacactttgaatcttaacatttttgaaagttttattgatgttttatctagaaacactgtaatggagagaacaaagatagaatttagatcaaaaagctccttcctgaactagtactaataaacatttgtaaatctccaaatcatgttgaatacatttttttatattcattgagcatttagtagatgtcagatgtgaaactactttgaaaaaaattaaaataattatagaaattttaaacatttctcaataagagtgcctgctttatttata

SEQ ID NO: 138069 - DNA, 1833 bp, Homo sapiens
tatctttccattagttgcaatatagaaatgactttttcatcatagtcgcccattgataatgtcatatttaattacataaaaatggtactaaatctgcttttttataagacctatgggtttttaaaaacattcatatttaagataataaattggccattatgttttcatattttctgacaaccaatataagtatgaattttatttttcaaggtatttatagatttcttagtagtttttggttctcaaggaactatttaccaaatttttgtcattttagggtctttttttctccctgaaataagctaatgggtattgccctatgcagatatatttatttttttctttcatgaatacttaacggtatagtttaggatttttaaatctaaacagttgtatactcctggagaaattttgtcataatttgctatttaacatgcacctttgtcaaaaatttataagatatgaatactgcaaattgttttgtttagcaataatttgccatctggagaagacaagatcactaaacttaaggtgactatggtggcctgggatcgctatgataccacagttattactgcagtgaacaattttcttttgaaagtgtggaattctatcacaggacagcttcttcatacattatctgtaagtattttatttttagagtaattaaaatggtcaaaaagcacattattttaagacacaggaaatttaagttccaggttcctttctatgatatactatactagtccttggaaaaatgattttctgagagggctctgttgacatatctgtaaaatagggatgacacgcgctatacctgctaaaagcaagtatgaaatcttttcaagatcttttctaagtctggtagttactcatctactatgttattgtatacaatgaggacatataagttattttgtttttagcaggggttggcattttttcattgttaccgttataggggtagagcgtaccttatttcaacaagggtatcctacatagttttttcaaggaataggggtaagaggaagaagtaggaaaagaaaggtcttttttcctctttcagaaagtgtatttgtcattgtaagaggctgtagtatttgttatgtaaaaagttgaaaggattaatagcagaaatcacatgggtagtgttgatgtttttcagtttatcataatactggttgacttcagattaagcttaatttaaaaaccttattttttgtctgtttcaactatcaattcataagcattttaaggagagaatgccaaatggttgccatgtgattacacgatagtaagtgataagaatagaaaccaattcttctgactcaactcagttgtctttatactatatcatggtgtttatgtatcagagggatgtaaagttcttctattttgcaaatgctgtttgagtatcagctatgtgccagaagtggcttaggtgttagatataaatggtaaattagacagagtcctgtcatgctagagtttatagcctattatgagaaatacctttaatcagataagtgctaagaaagaaaaatgcaagatagaatgcaaacttctaacagggtaaccaaatttgatatgggaggctcagagaaaacttcctgaggaagtgtagtttgggttaagttttgaaagataagtaggaattacccaatctcaacttgtcaactccttgattaggccttccctgatcaaacaatccaaggtagcctcctagtctttgtcttattatgtcaccttgctttacttttattaggtttatcactatctgatattttattgttatgttttcttgtttattccctgcctctacatggtaggaaa

SEQ ID NO: 138070 - DNA, 1063 bp, Homo sapiens
ggtaaccattaatctactttttgtctttataggtttgcctattcaagattcatctgtgttaactgtgtctttctttctttctttctttctttctttctttctttctttctttctttctttctttcttttgctaaataatatttcattgtatgaatatgctacattttgtttatccatttatcccgttgatggacatttgggttgtttccactttttgacttattatgaataatgctgccatgaatattcatgtacacatttttatgtggacttatgttttcattactcttggatatatacccaggagtagaatttctgggtcatatgataactctatgtttaacattttgaagaactgccaagctgttttccaaagtgactgtaccattttacattcccctcagtagtatgtgagggctaatgtgttacttatattatcaaaaaaaagtgatttacatttttgagaaaattaataaagttattttaactctttctagtttaagatttgttagtggaagtcgagatggaacggcaagaatttggcagtatcagcaacaagaatggaagagtatagtgctagacatggctactaaaatgactgggtaagaatatatgttagatgtttatgtggttctcatgatatattttacattgagtttaatagtgaatataaaatatctttttacattaataaatagtttgaagttaattgtagacatgaagtttgcatctgtacagcctctaagcaaatcttcgttactgttgattgacagagtggatgacaggaacattgctgattcatttgatattctggtcttttgtgactcaaagatctctgtgttctactgatgcctacagagccattctctgccttagttttttataggtcattaaaaaatatatctattttactttctaccttgagagttgtccctattaaatgtcatcatatgtttaactttttctctaattttctaaggacacttttataatatttttcctactcagtaataaatatccacttaatcagcatttagttttgtcatcttcactgttgattgga

SEQ ID NO: 138071 - DNA, 1039 bp, Homo sapiens
atactgttgtttttttcatagtttcatttgcttgtttattttctcatttcttttacatattgtagtgccttagagatctgtagacctctctatcatactctttctcttagtcatctcatggttttgaatttaatctgtaaactgatgattctcaaacttccatctccatttaggatcttttagctccatacttgtttatgcaactatcttcttggcatcatcacatggatgtctactaggtatttcaaactcattatattcattattgaactattttttcttccttagatcttctccccaagccttttcatccaaacaaatggcaataccatgctttcaactgctcagagtagatcatcccttttatctttctcttatactttgtgtctaacttgtcagcaaatcatgttggttctaccatcaaagtgtatctagaatctggcaaattctcatgacctctgttattgctgtcctgttttaaggcactatcacctgtggtctagattattgaaatagacttctaaccgatctgcctgcatcttccattccctttcccctgcacccagtttagtctctcagtttaacagacaaagttattttaaaatggcagttaaattgtgtcactggtgctcaggaccatcagtagcttccaatctcagagttaaagctgaagtcttcacagtgactcacagtgctctgtattctcagcctccttggcgctcttcaatctcatctactgcgtgtttgtttgcctttttcactctgcttactgctggccactttgcttttcttgaacattctaggtacatggctgcctttgctcttaactgtttcctgtctctggagtggtcttccctggatattcacatagtttgttttctcagtttctatgtgctttgtgcacatgtcaccctctcagggagaccttctctgactaccttattgctctgattaaaattgtaaaccactgccccccccaccccctccactgtgtgcacagcaactctgtatcttcccttctgtttcatttttttgtctg

SEQ ID NO: 138072 - DNA, 1664 bp, Homo sapiens
attttatttttatatttgtatgctacaacgaatgaagtggaagttattcgggaagttattacaccttagagtttattttggactcttccattaatgacttaatggctctaaatgcgtcacataagtatttggatgttagtgatcatgatgaggatgatgaatgctatgttttaataaatagataattgttaagtaacttttctaccatagtagagtagaattgctttttactgttcactcttctgaaattctcaaaaggaagtttaatatatttttaccagaaattatcattaacgggtagcctcatgtttactgagaaatgcatgtagactttaggttaaattctgaataatttgtggaaaaaatatttaaataatttagaaaaaaggctgtcaagcctaaagaaagaaatgatggtaaaaatacttaatgccaaatcactaaaaagtgagtttaaaatattttgcattgtcagtattggtggtaattttgaaaagttcttcacaaatgccattgtcactttggacaatgctttgttattgctatcatttggacatcatttatacttgctactggatccctattatatgtagagaggagactagaaagtaaaggcttagaagtaatttaataaaatcttctttttggctattttttgggtgggggtattgtgaatttctgcttcattataaacctattgtccttttgttactatagggttcagatgactgtttagtaaaaatttgggctacagatgatggacgccttcttgctacacttcgtggacactctgctgaaatttctgacatggctgttaactatgaaaacactcttattgctgcaggcagctgtgataaggtagtaagagtatggtgtcttcgaacttgtgcacccgttgcagtccttcagggccattcagcttctattacttccatacaggtaagaaaagtgataaaatttagcttgaacatatgtaaaaaaggtgagaattctctgatttcatgttacattgtatagataatagcccaaagaataacaagagaaaaatgctctcttctggactttgctcctaccctgcagcaagatatttttttaagttcctttttcatatgattatcttttttaataaataactaaaaagatgatttaaaaagttctataaatagagtgagatatcttatttgtatttgttaagaagggagaaaacctgtaaatgccttaagagcacactctttcctattaggatataaatgagttctaccatcagagaataccttaaacacctctatgcaaataaactagaaaatctagaagaaatggataaattcctcgacacatacaccctcccaagacaaaaccaggaagaacttgaatctctgaatagaccaataacaggctcggaaattgaggcaataattaatagcttaccaaccaaaaaaagtccaggaccagatggattcacagccgaattctaccagaggtgcaaggaggagctggtaccattccttctgaaactattccaatcaatagaaaaagagggaatcctccctaactcattttatgaggccagcatcatcctgatatcaaagcctgtcagagacataacaaaaaaagagaattttagaccaatatccttgatgaacatcgatgcaaaaatcctcaat

SEQ ID NO: 138073 - DNA, 1083 bp, Homo sapiens
ttgtattactcttgaatttttaggggcagtcatacatatggtggataggtgtgaggaggtaggacaataatttatgaaattcctgtataattttttagaggaatatacttaaccaagtacagttttattctaaaatttcttcatgttatagaaagatttacctatatatttaaaatgacagtctctttgactatagcgtaccaagaaaggcaaaaggagaatgtgcttgagaaaccacagtaagccaagcagaatatcagtcccttgggatttaatggaagagtattcttggtgctttcttgtagtaaactggagttcataaaatcatgaactatgtaagggaatttagacttctcacagggcagaattgctataatatatgtactctgttttgtctcatcttaatatttatgacttaatttcatgaaatcagtttcacttttaagttttaagttaatttcgtatttttttcagtgaatatcacctctgccaggcaattaaccggctgtagtcgctttggtcatattttcccttcatctgcttaccagcacattaagatgcataagagaattctggggcacttgtcatctgtctactgtgtagcatttgaccgaagcgggagaagaatttttacagtgagtgtaaaatttataatatggtaacatatatagaattacaacaattgaagccagactgcatggcattgcattgtgctttgtaagcagttcactttttttggatatatgggtgcagaaaaagatgagtggaaattgaaaaaagtttctcattttatataagtaaacgaatgaacaaaaatgtttactatcttcttggaagtttaattttaaaaagttaaatcttcagaagaccttatattctagaagtggttaatttatgtgaaacaagtgtactcaatttcatttcattcagttttaacaaacatttattaaatgtttgttaatgtgtcactcagtgtaattgctgccagttttccctaaataatgatttcatcactttttttgattagatagttgaactacactgtgatgaagattatagctattttttatatcttttttttgg

SEQ ID NO: 138074 - DNA, 1048 bp, Homo sapiens
gttgagaagccctgccttaaagtaacctttctcccctgcatctacctgcaaagtatgaagagacaaaagccaagcagaagtaatggttgattgttttaaggaactcagagcagtaagaaatgtttcactggagaaggaagatttctgaagtcccaaattagggtaccagtccttcctatcttggagtcatgggattttcttgtggttgagatgggaacacctgccaaaaagaaatcctcttgcctgatactgatgcttatgcagttcctcccattatttactcagcatcttgcagtattacataactactcaggtctcttatgtgttctaattgtttatattcaacatgtcactgattttgctattcattattcattttttgtcattttgtcagttaaaatggccagtggatctgcctttgcctgaaagaaagacttcattgctcttaaaattgtgagatgttgaaagatttcatatttttgattgtggcatggttctaatcatactaatctagctagaactcagttcttgctttaatcttgccctgcttgaacatgaagctattttcattttgtactatattatttatgcagtatggtaaaatgtcactttgcctcaaggtgacctttgaagttatagggagcctatgttttgattaaaatacattgtgtggggtgttaagcacttttagtgtataagggaagatgaaggatttcacagggcaagtgggtggctgtaaatttttacatagagatcaagatttgttttttagcatgagcagaatccacgtggtatttggagaagaattgtgtagacttatgctatgttatggctttttttttaagaaaatgcagaacaaggcaaagcgaacaagaaaaaaaaatgagataggacttaaaatgacttcataggagatgaagcctttaaagttcattgttaactacagggagagcctctaaattcagaaaccaaaaggaaagaacccatagacaaacctaggttgtttgtaacataaaatatttgtaacatcatagatttccttatcttt

SEQ ID NO: 138075 - DNA, 1032 bp, Homo sapiens
gctgcaacgaacatgagagtgcagacatctctttgacattgatttcaatccctttggatatatatccagaagtaggattactggatcatatggtatttccattttcaatttcttgaggaacctccatactattttccaaaatgtttcaatttacattgctgccaacagtatgcaagacttttccttttctctatgtccttaccaacacagattagtatttgtcttttttataatacccattctaacaggtgtgaagtgatatatcattgttcctttaatttgcatgtccctgatgactggagatgttgagcattttttcgtatatccattggccatttgtatgtcgtcttttgagaaatgtttgttcagaccttttgcccatttttaattacattttttttttgctattgagtttcttatatattttagatattaaccccttatcagatagatggtatgcaggtattttctcccaatctgtgagttgtatcatctgtctgctaatcatttcctttgctgtacagaagctttttagtttgatactatcccatttgtctatttgtgattttgttgcctgtgtttggagtcctacccaagaaatcattggctagaacaatgttctgaagcttttcccttatgttttcttctaggaaccttactgtttgatatcttctgtttaaatctttgattcattttgagttggtttttgtacatgttaggagaatagggttcaatttcattcttttgcatgtagatatccagtttcccagcaccacttattgaagaaactgtcctttccccattgtgtgttcttggaatctatgttgaatattgttttattttaaatgcttgggtgaatttctggactttatatcctgttcccttggttgatgtgtctgtttctacgtcagtatcatgctgtttctattaaataagctttatcatacattttaaaatcagggagcatgatgcctctagcttcattgtttttgcataagagtgttttagctgtttggggtcttttctggtttc

SEQ ID NO: 138076 - DNA, 1013 bp, Homo sapiens
ctaagaattagcctgtagtctgagaaaatcagatgtatttatgtatagtgagcgagtaaactcccaagtaacaatgaaaggcctctggataagagggatgagggaagtactttttgtaaagtttgttttacattaaagtattctgaggagggtctgatggaagccaggatcagttctagattggtggctgttaactgaggcaaattggaacaagtgggaattaactacggatcgggtaccatcatgaagcaaggacagtttaggaactgggtatctccctctggtaataagtgaaaatagcaaagcgggtccggggacattgttggtaagaaagcagtaatcactcgagagggagtcttcatgatattttacaactgccacatgaccttaggaaaaacaatgtttcctgttaattttgcagctggttttatctatgtctgtcctcccaagcctgattaattgcatggttgcttttttcttttttcagtcctagctgatattcactctttcagtcctggatagattttgactctttaacatgtagtcttataaatgtttcaaaagcagtggtcaatatataacattttgttattaattttacttaaggactttcctgaatgttcttagtctgttgagttgaaaatcctttattttagcctagaaacatttttctgacatcggtttgaagtttcatgcctgtgtgaaatagttgtaatacaaacatattttttttctaatgtaaataatgactggactagttagtggtctaacaactctgatgtgaccatcttggaatactctttggatcttgatgagcttttcagtagaaccaaatttagttgaagccagagcctttgctaatggtgttgtctctcaggtggaggtaagatcgagggatattatgtataatttttgctgttaaattatttcttattgcaggctcacagcagattacattttgtaaaatgtcattaaatagacaacattgaaaagtgggaagactattaaactag

SEQ ID NO: 138077 - DNA, 1027 bp, Homo sapiens
tcagatagaaaaatatgaatacttttttaaaaggaatacttcttatacattaagcttatgtagtttagcctcagaggttaagtaaattgaagctagaaatatttcttaagatatatttagacaaaatcattgattagacatacataggacttattcagggaaattggatactctgaagtatattgctaaaaatacttttccatagcttggatgttacttggaaaagttgagtctcattgaacatggtattgctaacttttttttttccaagagttgtttgtttatccaccagaattttccagtgttcactttgccttaaagctttagtcataattaatatattgaattgagataacttttgttattcatgcatttacttattttcaaaatacagtatttttagctatactgtcaacattattttgtagtgtgttatgcttcatgggtcacatgtgaaatgctgaagagcaaccattacaatattaggtttacaggctttctttatcccttcttcccttctctcgctttttttttcttttaactaagcatatactttcaaacttctgctggttttgtaaaataaactctttacactgatttgaatccgtttgttattcttttagtaattgcttaggaattgtcatggccctggcactgatgtttttaaattcattttaaatctggcatgttatttggggaggagcttttagaacagaggcaattcgatcatgatgtattttcatgtagtaactggtactcaagatgcttaagtttaagttatttagaattcaaagcctgacaaaaactcactaagatggatatgaaatctttccagtttgtgatttgaggcagttttctctttgtgggtcatagttctctatagctactttcaaaccaatcagttttataggttgccaatctaaacaaaatttaatcatgaaggtatatctttttttttttttttttttttttttgagacagagtctcactgttgtctcttgtcactcaggctagagtgcatcggcac

SEQ ID NO: 138078 - DNA, 1050 bp, Homo sapiens
tctgatatgcagtgctgttatctgttatgacacaactggcaagtatttcataatacgaacatgtacccaagtataaatatgcctgaattttccctggcatacttgtgctatagttatatccttgcttatacggttttatatgaatagacgtgtaagcctaaagatcaagaagaactgatgtaaactttaaagcttattaatctgtgacatatttatttaagattcaaatatgtgcataaaaaaagctttagttcaagactagcttagaaataaaatatccagatgatatgttaaggtgttgggtggttaccagttataaatttagtttataacatgttcaaatatatgcctattattttcattttggtttaataattaaaaatgtattccaacaaattaaattaaaatcagacatttgcttctgagacatggttaaaaaaaaaactgctctattccttagcaacctttgttctttttatatagactgtaagagtacactatggaatgggtctgcttttgcggctctgcatagaggcagacctccagaactacctgtaaattatgtgaaacctccaaatgtgggtgagtaatatacctgtgtgttataaacagattgttgattctttccttcctgaactcattaggaagacaaaaataggtaccaaaattaaattggaagcataaacaaactgtttacattcctgaggagtttcatggctagtccagatttttaaaacatttttacttaaagcaaatacaatgttttataaaaggtgatctttgttttctttatttcatttcatttcacttctttcttagcagaaacttcttttttaatatagtatagacgtttttagccatatggttgtctatttacatgtctatgtgctgagtttcccaaacaaaagtacattatttatatgtgttgttttccaaaattataatgatgttatacatttttatatgtctgtattaagacaaaaagtcacctttcttggttccagtttaatgaaattcacgtctcattcaaattattcttgggacatctct

SEQ ID NO: 138079 - DNA, 2137 bp, Homo sapiens
ggattgccttcacaggaagggaaagtcactccggagctcgcagacgcgaatgccaccacagagttccaaggcggctgccagagcgtcggccgtcagttagcacctccccctccttcccagagctgtagctaagcaaccatcgggctccgggagagtctaggctcagctgctgtattagtgcctctagcggggaactatgagcgctgcaaaaccctatcaccatttttaccctcccctctctccaccccctttgcccccgcccacctcttcgccacttcggctcctccctcttctcgctccgtctatctctctctctctctctctctccgcccccccaccccccgcgtctctctctctctctctctctctctctctctctctctctctctctttttcctctctctctctctctcttctctctctctctctcactcactcactctctctctccctctccctctcctctccttcctcctccgcctcctcagctcttgggctagaatatctatgggtcgaaacgtgatgcgatgaattcgagagagagcgaaactaggacgaggagtgcggcggaagcggcgggactcccgggcatgggggcttcaccacaatagaggcagcgcccccacccgcccccgccagcccctccggagcgaagcccccaaaccccctcgggaaaaggatggcggcagcacctacccagatcgaagccggtgggtagctgtgtcggggggtgggggggtgctaagggaatgggggcttagcgcgaaggctgtcagtttcttttgaaaaagcttctatttctcttctctacctccctctgaacctcttttcccccctcttccccagagctgtattacctgatcgctaggttcttgcagtctggaccctgcaacaaatccgctcaggtaaggggaagaaagagatctgggagtcgtggtgaatggtcccagtggggaaatcgaggcagcgggacgagcagttccgttgagggtgagggaaaggccggccttgactagtcaaacggtcagcggctgggctttaagtgtggagggaggaatgggttgatggcccgagctgctcctcatatctgtgtttcccttttgctcaggtgctagtgcaggagctcgaggagcatcaggtacggagccccttcgggaagggtggggagggttgaggtgagactggaggaaggggagggcaagtcaggggcggaagacgggctgggatagaggcttcgatctgggtacccgtagctgttgtcaccggggtgaattggcttcttccctcaaaaggggcagacaacgctggggtcttaactcgtccccgctttatgcttgtgggaggcagtttttcaggatttccttctcgaccccccttcccccccccccccatatacttgtctagctctgagccaatagctatcaggccgagagaaataaagacggtaaagtgttgaggactgggacacaggttgggtccagttgatggggagcggaggcttttccttcatcatttgcctccgcttccccctttcttttcgtccggcccccagctgattccgcgccgcttagattgggaggggaaagagcaccgaagaagcttcgaggatctggtgagtaaagttttcatttcaacttaacctaactctttcaccactccctccccaccttgtacccccaacccgccccccacctctcagccgacgaggttctagagctcggtgcagagccaaagaacgactgccccttcccccatccctgctagtcggaaaaagggtaccttgccctccccttggccctgcttgtttccacccgaaaactttgaagaatgtgagttgattatcagaggtgccgtgttgtggattatgaatatgttacaaacattggggaaggcccattgtaggcggaaaagggagagaaaccaaggggttatcttggggcacgtactaaggtctgacgctggccaatgacagcgttggtaacagcccggagttccggattagtggaagaaaactggtttctggttggtcctggcctgaaatacgggaactaaggccaggcttggtcttttttggggggggcgggggggcaggggggaggcgtgggaggaaggggctctggaggggaattgacggacc

SEQ ID NO: 138080 - DNA, 1051 bp, Homo sapiens
tacccagtaagccggccagaaggagggagcaaaaccttttctctctgcaacatctttccagtttcctctactggaaaagcttcattgccagctgacaaaaggaaaaatacttaaatggatcagatccattttcacagagcagtcaataatggtgaatttggagatgataagcaacaaattgatgaactggcacaacttccctgctactttcttgattgtaatgcctagatagggaataggaaagttattgaaatgtatgtgttcccatgaaatgtgtttatttgttgttcaagatcaatactaataaatggggactaatgttctgaagtattttggaacaattagaatcaccactcttaaccctgtggccaaagtcttaaatggacagggaggaaaatgtttataaactgaagcaaaaattgatctacatagaaaataaatctggagtatttacttggtaggtatactagtttcctagggctgccataacaagttattacaaactgggtggcttaaaacaacagaaatttgttctctcacagttctaaaggccagaaatccaaaatcaaggtgtttgccaaagccatgctctaggggagaatcctttgcttcttccagcttctggtggctcctggcattacttggtttgtgagagcataattctaatgtccgcttctaccttcatatggccttctttcatatgacatgtcaaatcttcctctcctttttcttataaggacaccagtcattggatttcaggctcacccttaagccgggatgatctcatctccagaaccctaacttaattacatccacaaagaccctatttctaagtaagatcatattcacgagtactggggttaggacatggacatctttttggaggacacaattcaatccaccaacacatttttattttactttggtctttaaaaagaataagccgagttcagtggctcatgcatgtaatcccagcactttgggaggccaaggcgagcagatcacttgaggccaggagttcacgaccagcctggtcaacatagcaaaaccc

SEQ ID NO: 138081 - DNA, 1048 bp, Homo sapiens
ctcgctctgtcgcccaggccggactgcggactgcagtggcgcaatctcggctcactgcaagctccgcttcccgggttcacgccattctcctgcctcagcctcccgagtagctgggactacaggcgcccgccaccgcgcccggctaattttttgtatttttagtagagacggggtttcaccttgttagccaggatggtctcgatctcctgacctcatgatccacccgcctcggcctcccaaagtgctgggattacaggcgtgagccaccgcgcccggccagtcctttgaaattctgatgagctaattagtaatttacttctctcgaaatagccctttccagcatgatgcagtagaaagagtaatactgtgagggtcaggaaacttttgttctaatcctggctccttcattaattgtacaactgtggaaaaatcaccaatttctttaagctttaaaaaaatatctatacagtgagtgtactcctagctgtaaaattctgactgtaatctttagttccatcccattacttcttccatttaaattttcgatatccattcaatgaagatgcaagtctcttatttctgttacctctttcaagatacaaatactcattcaacacatccccactccattttactctcaattgtcctatattttctctttttcttcttagtaaggtgctttatgaagcccctgattctttgtaggcaaatttcattttgtcttaaaacctgtttatcacccccaacaaaatctggctgtcacatgaagacatcagtttctctgcagtctttctcactggagattttacccgcagacacctaaagcatatggtagcttccccattgcccagcttccgcaccatgggcagcttcttcagtgctcacctcccagagtttccattgacactccttgcccctcaggcattattctagcagacagcttccaaatgagacacattggcatgattagatttcccaggctccttagagggtgattttccggtaatccctaaaggactaatttctagcaagttccacctgcgtaatg

SEQ ID NO: 138082 - DNA, 1297 bp, Homo sapiens
cctcgatctcctgggctcaagcaatcctcagccacctaagtagctgagactacaggtgtgcaccaccaagccaggctaatttaaaatttttttgtagagttgtggtctcactatgttgctcaggctgttctcaaacttctgagctcaagagattctcttgccttggtctcccacagtgctagaattataggtgtgagtcactgcttttggccacatggctgaaattttggaatagaagctgtaaacccctctgtgtctgcatatttatgtgcctgtaatttataaagatcttgacctcccatgtgagcgtgtgattttctaccttcagatgttgttaataaattattatattatttctaacacaataaataaaagcaagtaatgtttacctcaaaaaataaattatatcataaagttacttaagttaaaaggacctccctgcctccgcgctgcagcccctgccgtagccgcccctgagcccgccaccaccgcctctgagcagaagatggctgtgccacctacgtatgctgatcttggcaaatctgccagggatgtcttcactgagggctatggatttggcttaataaagcttgatttgaaaacaaaatatgagaatggattggaatttacaagctcaagctcagccaacacagaccaccaaagtgacgggcagtctggaaaccaagtacagatggactgagtacggcctcacgtttacagagaaatggaacaccgacaatacactaggcaccaagattactgtggaagatcagcttgcacgtggactgaagctgaccttcgattcatccttttcacctaacactgggaaaaaaaatgctaaaatcaagacagggtacaagcgggagcacattaacctgggctgcgacatggttttcgacattgttgggccttccatccggggtgctctggtgctgggttacgagggctggctggccggctatcagatgaattttgagactacaaaatcccgagtgacccagagcaactttgcaattggctacaagactgatgaattccagcttcacacaaatgtgaatgacgggacagagtttggcggctccatttaccagaaagtgaacaagaagttggagaccaccgtcaatcttgcctggacagcaggaaacagtaacacgcgcttcggaatagcagccaagtatcagattgaccctgacgcctgcttctcggctaaagtgaacaactccagcctgataggtttaggatacactcagactctaaagccaggtatcaaactgacactgtcagctcttctggatgg

SEQ ID NO: 138083 - DNA, 1033 bp, Homo sapiens
gtggtagactcggggagaacttggtggcccctttgaggtgccaggtttctttttcatctagagatggctgcgagtggaagctgataatatgtaggcactttgtaaattcatattgagtaaatgaatgaaattgtgatttcctgagaatcgaaccatggtttcctaaccctaattgatgagaggctcgctgcttgatggtgtgtacaagctcacctgaatgggacttttttagacagatcttcatgacctgttcccaccccagttcatcatcatctcttttacaccaaaaggtctgcagggtgtggtcactctttcttttgtgccattttggggtggagaaggtagatgtgatgaaaccaataattcaggacttattccttcttgtgttgtgtttttttttgcccttgcaccagagtatgaaatagcttccaggagctccagctataagcttgggagtgtctgtgtgattgtaatcacatggtgacagcactcagaatctaaattggacttctgctgtattctcaccactcaatttgttttttagcaatttaatggctacattttagagtcttccattttttgtggaattagatcctccccttcaaatgctgtaattaacatcacttaagaaaacttgaataaaatgttgaaacctcaaaaaaaataaataaaaggacctctattctgtatggcttacacagataaataaatgcttatataaattaaatatttctaaaattccaagaaattaaggaaactgagtatttaagattttcagtgtgctaaaaatgcatgcttgaagaatccaacttagaaacattttacaaatcatagcttctgcaccattgaatcatgcttgacaggtggagagctccaatgtggtggtccctacagctgtgcaccagcctgcatgttccctccctatactgcaggttccccttaacccacagcaactccccacatcagtttgctggtgtgtgtcagcacaggcgggttttgctttacttgccctgccagcacgtgggagtgccat

SEQ ID NO: 138084 - DNA, 1598 bp, Homo sapiens
tatgcaaatatggaaaatcttttgtaagttatcttataatatctggtacagtacttttcaagtaatttttacataaaaaatatcattattatagaaacaaaatatgttattttccaaggactatattttgtttacatgcatagtcctcattaagaattgctgatacagaataaatatatgtcatcctttaagtatttactttgtgcttcttcatatttgaaataaaaagtatttataagtgtttctgtatttattgtttcaaatatctatttgtagatatttccgtggacatattttagttaatctcatttcttagaatgttttctcataatgtgatatttagcaggcttctttcacaggaaaattactttctttaaatgaagtattagtctttctgtgaaatagatataatccagtgtaaatatttaggggaaatggttctaaatttacagacagaatcttgtttttcttttcactatacttacaggcaccagcttctgaaaaagaaattgtggaagtaaaagaagaaaatattgaagatgccacagaaaagggaggagaaaagaaagaagcagtggcagcagaagtaaaaaatgaagaagaagatcagaaagaagatgaagaagatcaaaacgaagagaaaggggaagctggaaaagaagacaaagatgaaaaaggggaagaagatggaaaagaggataaaaatggaaatgagaaaggagaagatgcaaaagagaaagaagatggaaaaaaaggtgaagacggaaaaggaaatggagaagatggaaaagagaaaggagaagatgaaaaagaggaagaagacagaaaagaaacaggagatggaaaagagaatgaagatggaaaagagaagggagataaaaaagaggggaaagatgtaaaagtcaaagaagatgaaaaagagagagaagatggaaaagaagatgaaggtggaaatgaggaagaagctggaaaagagaaagaagatttaaaagaagaggaagaaggaaaagaggaagatgagatcaaagaagatgatggaaaaaaagaggagccacagagtattgtttaaaactgccctatgtagtttcataatttggtaacatgtaccttcatgttgtaaagttaatagagataaatatttttatcaaaaattttataaacacagcctttctttagcattgatttaatttcagaacatcttcatattgattattagccataaagtttctaacatgaaacatttatctataaattttgtgattatagtagtggaatacatagaaaaaaatatgctttcaactttgtgagtgaatttcgtgttgtgtaagttatatgtcaaatctttgaattttaattttactcttttatacatgtgataatttcataaagtgagggatcccaaaaaaagagtttcatccaacattcttgttctgcaggttgcttttataaagaaggtgaactattttcatgtaatgttaagagttaaacttatctttcccaaatataactttattattagcttgggaaaaatgaaattgtattcccatttttaaaataaatacaaatgtttatttcagaagggcagttttgattatatg

SEQ ID NO: 138085 - DNA, 1035 bp, Homo sapiens
tttttttctgctgactaagatctcctatagagagctacaacaatgcccaaaagaaaggtaagtgaaatggaaagacagacggggaatgagctgctgagttacctatttcctaataggaagaatttatttgtttgtttggttttttttaaagctttttggcttcttccattttgtgatgtaatgaaacggaaaggggtagaagggcaaagagcagtcggtgtaaggtttaggatggtcttgcatgcaactggtagttcacttttggagtgttctgtttaaggagagaatctcttgaaaggtgtctccatgctgaattacaaacagccatagcgctgggctgtcgcttcctaccccaacccccttcctccgcttaccctattggagaacacttctcccaaccatacttcagtttcctcctctgccaccggcttttctcggggaaccgtcccgtctggggaacgaaagccatggctttctcctgtatttgcctttgttcttcccgttttcttttttcttttttttttttccttccctcctcctccacttcttgtcaggccagatggctatgcaatggtaatcctgtgccattaggcggcgcagacttcaaactgtcctagagaacagagattcaccgctgtaattagaaactttaggggtgagaaagctggacctttccaagctctttagctaaagatgggaagattataaggagacagcgtcggataaacttgctgatgttggggtagcatggatttgttcactttagtagtgcagaattgatctgagcctttcgagctccacaggtcttctgcaaaccctcacttcacaattcctggctcctcgcagacaggaaacaagttcacgctcggcgtttttttcttagtcccctagaagtgaaatcgaacgctgtttcattgcttggtaaaaccgtataacactatgctaagacattatgattgtttttggattattcctataaacaactccgccttccttattcctaaaacataggaataatactgaaattcccccgtg

SEQ ID NO: 138086 - DNA, 1685 bp, Homo sapiens
ccccacccttctctgccaaccgctgtttcagcccctagctggattccagccattgctgcagctgctccacagcccttttcaggacccaaacaaccgcagccgctgttcccaggatggtgatccgtgtatatattgcatcttcctctggctctacagcggtaaggagagtggggagtccacctttgttgttttcctacacaccagtcctctgctgccccagaaccattaaaatgcagaagttcctctggcagcttctcctttggaagactcatgcatccccgatcccacccttcttcttcccttttttccctttgttgcatcgatttcatttttttttttttccacatagagttcagctttgtttgcttcgtgacgttggggggcacatttctgctttgaaggaaaacgaaagctaccaagttttgggagatgggagatggtgctatacggtctttagggttacgtgaagtcaagtaaaatcgcacactggtgagtttcaagagtgagacatttgatgaatacgccctaagtactgagacaaggaggagtgcacttctgtaaaggatgggggtacacatgctgtaactggtggggattgagtggaggcctaccgaggcattgtaattattctgggtgagtgagaccctggtaatagagttattttgagagtgtgtagaagaaagtggttaacttgagcttgaaggcctgttagaactagacaaattgggaggggaagttggtaacaatgacgtaaatttttttttaacttaatatgacacgagattcagttttccccccatattgtcccttattttgactgtttctattctttcaaaatattttacttttaaatttctctcactgcttcaagtatattgagaactggatagggagctcagtggcttcttgtgtagtggcagcctgagttgctgctgcttcaaatgataggactttctctttcatggattcacttactcttaatttagaataacaaattttcagcagctgtcgggagaatatgataaactggggtgcaagatgagtgtatatccatgataaatgaaagtgcttctgctttttacaactcaagagaaaggcagacagtggcaagaacagatgtgtgggttcagattgtagggtataggaaccccttccctcttcttgagctttagagcagcagctaatccaggttgttgtgtgtttttattttttggcttgtttatttacacctgagaggatgtggaatggaagtggaggttatgttaaatcacaagaaccttgatatttgaactttgtcttctctggccaccatgtgtggatatgtttatgcaattttggaatatcagaaaatttaatcttacattttttgaataagtttaggttaaaaaaaagaacaccttttatatttcctttggacctaattttatgagcctcttgctttattattttccatacatgttgtctaatatttcaaagtaaaatttgagttgctcagagtctcaactcaatccaataattgtaaagtccaacttaatgcctttagttaaacccctaatgagactgaacagatcaggcagttagttttgctttgggagtcatacagtttcaatactgttatttattctttgctttctccttcctctaccccttctttaaaagtagattcaacaagaaactgctttcag

SEQ ID NO: 138087 - DNA, 1055 bp, Homo sapiens
actgattaaaaaaaacttttttttgtagaaatgggatcttgctatgttgcccaggctggtcttgaattcctggcctcaagtgaccctccagtcttggcctcccaatgtgttgggattacaggtgtgaatcactgcacctggccaaattctttagtcagtaattccctaaagctcaagtattgggagttgttcattcatgatagttgatagtgttataaatgaagaaaattacatgacatggctaatgtaatacccaatgcaatgctttaaaaggttcaatttccagaaaaattttatcataaaactttgaattatactgcttgttgttgtagaagaaatatcactgttttagaactctatacttaatgctgtgactttttaatgtagtttactgctaacttgttagaaatctttgtcatcgtcagtatgctaatcaaccaggaaaccctgtgttggggcgtaaagggccttagggaaatgggttaacctttgtttcatcccattccccaaccccagtcaccacgtaagaaagaaatgaccttaactctacttcctaggaatgctagttagatttttaaaatgtgattaatagcaagagctttgaatttctttgaaagaaaggatttttttttcattagcagcccaaaataatttgttaaaactctaatgtgacttctttaaaacacaatttataatgtcaggaagacaagctgaggcacaagttacgtgcttaacccaaaaccatataattggaggcaatactaagagtaaatcaagaatagatactagaaggcattatttcaggtcacaattaccctgtgagattaagatggtttgtatttactaacttcattgtatacaaaaagtttattttgagcctcacttatgattccactgcatttttcttaaactacatttttggatatggtataataaatggattatgaatcatcctttgttcaatcttttttgttgttgttgtttttgtcaatagtcttttctccttctttttcctcaactctggagttgggaacacttttttttttccccctaag

SEQ ID NO: 138088 - DNA, 1098 bp, Homo sapiens
ccggttggactagcttgttttagtatatggcttcccactggatcttaaacaggttttagccacatttttggtaagcagttcagcatttttaaaaatcagtgggtaaaatgagtatttgaatttctacaattttatttcctgtaatttatacttactactaatattgataaaattaaaacaaacaagagaaaaaagcagttctgcttacacaacatttgagtaataacacaagacattagagttcttttttcatacactttactttcaataaggattctatgttattttcttttttcaacttgaatactattagatttatgtcaataagtgattctctgaatcaggatcaaaatgcttatggcaaaaacatgttcatagagtgaataaatgctttgcagcttgtctatactttaaaatgaggccatggtttacttttcgtcttttggtaaatatatggagatttgcttttagagtgaaaataggtaaagatgtaatgtggatcacaataattgatttcacacataaataacccacttaacaagagagtgatgaaggaattgtattatcatccctggagatggaagagttcagtctggcttgatggattatttttgtttttttctgtttgtttgtttgtttttttatttttctgagatagtcttgctctgttacctgggttgttacccagtggcatggtcatggatcactgcagcctcaatttcctggcctcaagcaaacctctcaccttggcctctcaaagtgctggaattacaagcgtgagccactttgccaggcacttgatggattcttcaagcatccatgactcctatttttaattgaattgttatacaacttaacacccacaattttctgttcaaccaggtggtgaaattacaggttttaatcactcaacacaacatttgatgttcagatgaccttccctttcaaaaatctgtaagacaagagctggacactttataatagtcaaaataacttgtaaatggtagatgttggcatacgattttttattgatttcttgcttttttgcacatcttgtgagcagtggcactgactgcttttgttctgtattatcttttc

SEQ ID NO: 138089 - DNA, 1054 bp, Homo sapiens
tggcagttgttctcagctgggcagtttggaccatgtttttttggcttgtgtctgagagtacattcttagtgctttctggtatgttcatctggggcacaccgctgtggcttcagactagttcttcttcctatggcaaataaatttgttttggtgggtaaacaattatctaagttgctaggctcccttgaaaggaaagtgtttaatttcttttgtaatgaaatcttatcactttaccaactatagaggaaaaagcccagtgctacagctaacatagtctgaaaaggtagtatttgcttttgttgtgtgtgttttctttagtcatggggagcccttcaggtatgatgattaccatgtggacccaccatcagtgacagatgtttaacagttattttcccagaccagcctagagagggtgaccagggaaatgcagtatttttgtgtgtgaaagtaacttgatcaagacttatttaccaactgagtgtgcagccttgaagaggcattgatgtaaacagattttagattgttaagcaacatttattaatatacattgctttgtggagattcttacaacttctttcttaagttttttttttttttttttgatatggagtctcgctctgttgccaggctggagtgcagtggcacgatctcggctcactgcaacccttgcctctgggttcaagcgattctcctgcctcagcctccccagtagctgggactacagacgtgcgccaccacacctggctaatttttgtatttttagtaaagacggggttttatcatgttggccaggaggttctcaatctcctgacctcatggtccgcccccctcagcctcccaaagtgctgggattacaggcgtgagccaccacacccagccacaaattcttttaaaaagcaaaattgcaatcatcctatgtttgtggaaggccatttacactcttttaccctgaatagactgtaactgaaggttagttttgaaatgggtggctatgtttaatttttcagtgtgtgaaaaataaaggcatgcctatttgtctcattatatgaagtta

SEQ ID NO: 138090 - DNA, 1083 bp, Homo sapiens
agagtgatgccattagcaataggtcagacccctgaataattttctgttttgctccccttctttcactttatttatagttcagttatttatggttgccactgtaataacacttttgagtttaaaaaagccattgccttaaaatatttttgttgtattgagagaaaatttggttctaacaaagagacgttttactgggatgaaaatacagaaaggcctatggagaaatagctttttttcccattggaaaaataaagggaagtggagaagtacatttatttcaacctagaatcattaggagttgcatttctgagaattttcatgtgtgtttctatgggtattattagtcttcttcatagaatgatttgggggactttcggagattatgtcaataacttccttactcctcattatttcacaatgtttttggttttccccctttttcagaaacaaatgttggtggattttcacagtgaacactagctaagtacatgagtaggttttgagtatagggattgaggttcagatttatttaacttcagaacgttttctactgcttcagatttatctattcattgagagagagaatgcttttgcatttgaaacaatttaataggtgccaatctaagaaaaagagcaattttacaatttggcaggatgttctttgatgggaattgacttagcgctccagaaatatattgctccacagtatttaactgccagtcaactttcttattagattctcttactttagaagctcctttttatggatcattatcaagatataatttcttactttggtcagccctttttctgagcagaacacttttggagttttgctgtaattcaataaattgttatgtcttcttaagtttctcagggagaaatttacagtttcccagtgatccttcaaacatttactgggcatacaaagtagcctatcttgtttctcagagccccatgatgtgagtgaggaaagttattaggcttcattaatgcttaggcatcagcccagcgtattgtaaactacttggctgatcgtgctacctagcaactatattgctttctttaaacactttatcatcc

SEQ ID NO: 138091 - DNA, 2370 bp, Homo sapiens
aaaacatacaagtaatattgattcatcagtgcacagatctaatatattcaattattttcctaggaaaacattttgttctagatatatgtctcatgatatcatgtgaaagttttttttttttttaactccagaatttgtacttagtttgtggcattttctcattactttagggagcaatggttgcaacatactctgccctgactcacaagacctttcaaccagtcctagagcctgtagctgcttcaagcttagcccagcgacggagcatgaaaaagcgaacatcaactggcctgtaagatttgtggtgttcctaggccaaactggatgaagatgaaattaaatgtgtggcttttttcctattcttatcaaaggcatcgttgtctgctaaattacttgaatattaagtaatattaaatccccatttttaggggaagtgagatttaaaaaaccattcacaggtccacaatattcatactatgtgtttgcagtagtgttcaagtgtttatttaagcatataattggtgtccaccaggtcctcacaacttctctgcacacaagcttctaaaattcctttcaaataaagttactttaatattttttttcttgtttcatacaattatggtttggggagtcattaccaacaatcagtatacatatataatagtataatgacaagcaatgttagtatttttaaacatcagatcctgaaggataggctttttctaatgaaagaaaaacaacaaaaacttattataaaagcttgttattccgtaaaaccaaaggactccattcatttgactcactgtagttactaaaatgtaaacatagtggtttggtgccagagcaaaatacatttgtgctaatatatgaattcttgatatagttggtgccaaagtttttatagaagaattatatctcagataatgtgtgcaggcagatctgtatattatccataataagtggcctcatttagaaataaaggtttttataaggcttctgtaaattttacatcatggaaatttagtacaagtgaaactttttttttttccaaaggctttatactgttggtgtaatcttataaataggtcatagttaagcctttgaaaatgaagtatgtggtgttgacactatcctggtgttatataaactgactttcaagttaaccaattggattgtaatcatcatctatcccctttataaatgaactacactgttgtttttctgacttcgatgtgctttgaagtacagtgtagcatatcattctaccttgaatcctatgataatacagttgacatcttgctgtagtggacttgtgcatatagcacacatgatatagtatattgtattacagtaaactttagacaatgctacttaatcattttacttcatgaagataaactaacattttaaatatgaataatattaatggtctacaaaaaatttgagcacattttaaaatcatatttataaaaaactggccaaattggtcttatttaatgtataattcagaaccactgtgtagtatgtattcttttctctaaatgatgaaatgctaaagaatcatttcacgttgttgaagaaaataccgttgctacaacaacagcagcagctactactgctactactactactactactactactactactactactgacagaaagaattcatgaatgtaaactggaggatatcacagttttctttagtgaatataagtgaactacttgtgcgtgttaggtgtactatttgctatgtattttattttgctttattcagagagaaagttgattactgagtgctgaattatacaatttaggctaggaaactcgtaactttggtatttaataaaagaaactatacatattctgtttgtaatgtaaataatctataccccatgcacaaatatctgtttcctgggtgtgatatattaaagtatgtattcttattttgaggtatcttttggaaataattgaaagagattaaataacaatttatgccacatgaaaaataattacttagaagtagttaggtatcatgtcttatggctttttatgttccattttggctttttttctcatttgctttattactatatgtacttgcatgtaacagtttgtaagcatatattctgacttattttccttctgtcattatctagtgctgttatgccttcctatcagaatcgataagtcaaactcagaggtgtgattttggtgttgaagttttcaggacagagatactatttccatggatgcattttaagtaataaaattaggggaagtgaaatcagaaaatgaaaaatgattacaaaataactttcaggttttctataatcaatggctttaaaaagtagacagtcttaattaatt

SEQ ID NO: 138092 - DNA, 1006 bp, Homo sapiens
tatggttgtttacttcaaggaggggggtgttgagtagggtcttagtccattatggactaagtctaaacttagtttagtttgtaagtcaggaactgttcttatatgttatgtataatgctaagtgatataaattatggcatgtccaaaagtggatctgagaattgagcttagatatattgagattagaaatggttaacaaaactagtggcttttgagacaatagaaactggaacatctatctgacagacataatttcctgtgtatattttaggctattaagcttgagcaaaatgtcattttcaaaattttgtaatttggaaagtttctttttctcagatatttagttaattatatagatataatgttttatttctcagatatttagttaattatatagatataatgcttttttcctttatattcaaggttgttcatcgtgatcttaaacctagtaatattttatacatggatgaatcagccagtgcagattcaatcaggatatgtgattttgggtttgcaaaacaacttcgaggagaaaatggacttctcttaactccatgctacactgcaaactttgttgcacctgaggtattccttaaaaacttcaccatttgcctttcattcttttcctttagttgaatctatatgatgccatatgaatgttatggtaggcagataaaagctgttaccttgcccttttcagttttaaagttctttaaatcagggaattctcatagcccctaatataaatatttacactggtaactagcatctaaaaccaaccagaatgtaataatcaggctattctattctgttgggttatatactaatttcagaatcatatcattttagagttgggaggtagggaaaagatagccacagcttcaatatattatgtattctaaatgatgaaactggctcgaggtacttcaatgacttattcaagacccagcattcacttaataacaaagctaggatagattcatcaggtatgttaaattgtact

SEQ ID NO: 138093 - DNA, 2669 bp, Homo sapiens
ctcactcatatgtgctgagtatttctccactgaatacttgaaggagactgtctgcatatctacagagttctctttgtgcaattttctcttctctaatactccatcctgtgaattttgtcctccttctctaagactctctgttctggcttatctactcaggaagtctttcaggctccacctgacttagccctccctgtactaccacttggaaactctttccaggtagtaagctaaggcagttgtggggcatacgtcatttgtcccctgtctctcagtattcagtgtcctttgttgcctgatgtccaatgtcttaaaagtatcatttcatacgttttgtcctgtgttttagatttttcaggcatgagattaaatcctgtctttgtctgcttcatttttctttaagtagtagtctgggagtagcattttaattgggtgatagtagttcaatgtcttacttccagaatttacagtgtagaatgtgggagagctactgttgattcccagagctctggaacttgctgtgataaaggaacagtgtgtttctggtatgctagccagtgcttaagtggctaaggtctctggcttatatctgtctacctccagtgtagaatgtgccatgcgtgagcatagggtgtgttattggtatattattaactatagaacataattcaatatctgaaaaggattgtctaggacccccttctaaggagggtctttaaaggaccttgttaaaaactggtaccaaggcatagaaggacaacagtataataaggctccattattcatgatttcttgcgttagattttagaagtgtcacaaatatgtttgagaaattcttgtagtcatttctaattttcttttaaactcttcagacctccattctcgatgtgggactatctaaacccatactagcacagagatgcagtcagtaagttttgattcctaagtctggaatattaggtaagagcaagcattttaaatgcgttacccaaaagatgataaattagtacattgattgagcagccttttaaaaaatgattcaatggttacttctgtagacagcttattaataattagatgtttgttggttatacttcacttgtgtgtacaaaaaattgttaatccaaaatgaggacatgtttttataccttagaaaaagactttttaaatacatttttgtatgttttaaagaattttataatgtatgtcatttgtattttaaagggaaagatacctacccaaatttcccttcctcagaatgtacacacacacacacacacacacacacacacacacacacacaaatacacaggtaaacaaacagaactcttaagctgtgctctattttccttattcaagaaaatgtggtagaatgaatggctgattattgtaaagctgtcagttcttctaaaattaatttattggcttaacaaaattccaaataaagccacaatagggatttttgtttgtttgatgttgacagaattattttatagtttccttggaaaagtaaacaaatgcaaagaaataatatttttgtttgtttgttttttgagacagggtcttgctctgtccccaggctggagtgcagtggcactatcctggctcattgcagcctcaacctcccatgctcaggcaatcctcatgcctccgcctcccgaatagcttggactacagaagcgtgcgccactataccaggctatttttttttttcagtagagatgggatcttgctatgttgcctaggctggtctcaaactcctgggctccagtgatcctcacgcgttggcctccccaaattctcttgtttaaaacttggtaatgtgcataagcaaaacattatagtatcaacacaagattggaaacatactgtatagcccaaaaatatcctgttatagattacttaccctatatcattatgataaaggaagaatcacaaattgtggcaaagaggttgttcaataaacagtatttgagaaattgcttaaatatttccaaaaatcattttaaaatgccatctctaccatatacaaaaataaatcttacttacataaaaaagctaaatcttgaaaaacaattaccctataataaaatgcagctaaatattttgttgaccattggatggagaatgtctccttaaacattaaaataatgaaggaaaaatcatacagaaatcatcatacatttgactagcaaaaattaaggattactgaacatcaaaaactagcacaaaattggataaatatttgcagctaatatgatagaaaactgacatttttaacatttaagtgacttgtaccaattgacaaaacagtaagtcagtaatagaaaataggcacaaacattactgataattcacaaaaaagtagaaagactactaaacatgaataacaatgttcagcctaaaaatcaaaacttaaatttaaaaaataatgccattttcacacatcaaatttgaaaaggctttttacagggtatattccatgctatcaaggatgtggtaagacagatgctttcgtaaactgctgatgggagtggaaattactataacctttttggaaaataattttatcgtgtatgtcaggaatcttggactatttatgctccttgacccagcattccatttttaaaaaaaaattcttaattcattttgagaaaatgatcataaat

SEQ ID NO: 138094 - DNA, 1685 bp, Homo sapiens
cattattggaaaagtctgtcttttcttcactgaattaccttacatttttcttgaaaaccagttgatcatatatatgaaggcctatttctggatactctgttctgttcattgatccatttgtctatctttatgacaataccacactgtctgaattactgtacctttataatatgtcttgaagtgaggcagtgcgagtccttgagctttgcttttctttttgaaagtttggctcttctaggtcctttgcatttccatatcaattttaaaatcggcttttcactttgtacaaaaatgtcctgctgggatattggttggaattttattgaatgtataggtcaatttgcagataagttacattttagtaatattgagtcttttaattgatgaacgtggtatctttctcaatttatttaggtcatctttaatttctcgcagtattgttttcagtgtaattcttgcaattcttttgtcagatttacctctaagtaaatcctgtttttaatgttattgtaaatagaattgacttcctaatttcaattttaaattggatggaaacacaaccgattttttgtgtattgagcttgtttcccacagtctagccaaacttaatacttctagcagcttttagaaatagatttcaaaggttgagaaagttttctgtaactatttttgagagttttataaaaaatcaggaatcaatttcagatttattcaaatgctttttcttcatttattgagattataattttttttagtcttactgtggtgaattacatcgattgatagtcagatgttgaaccaaccttgcatttatggatgaaccccacttagtcttgatgtattaccctttttataaattgttggacgatatttgctgaatatttaagaatttttgcatctatttttatgagggatatttatgattttcttgtattattatgtctatttttggtattagagtaattctgactccatagaatgagttgggtgtagtttttgcctctttaactttctgggaaagtttatgtagattcaatgataaattgcccttaaatgattgatagaattcaccagtgaaggcatctgaacctgaagtttttcttataggaaagtatttaactccaaaatcaatttatgtaatagacttgggttatttatttttgagtgagctttgctaacttgtgtcttttaaggaatttgtctatttcatcaaagttatgaaatttattggcataaaaatgttcataatattcccttattgtcctttttgtagttgtggaattgttagtgatgtcactgctctcacttttgatgttggtaattcatgtttgctctgtttttgttctgcttagcttcactagagatttatcaattttattactctcaaagaaacagcttttggtttcattgatttttctgtattctatttctgttctattacattgttttctgctttaatcttttttactgcttattttatgtattagcttttctttttctggtttttaagatgggagctgaagttattgatttgaggcctttcttttctaataatgtaggtgtttagtgttataaattcccctctgaatactgctttagggtcatctcacaagttttgatatgcatcatttttattttctctcagttcagtgtactttatgatttcctttctatttctttgaccc

SEQ ID NO: 138095 - DNA, 1049 bp, Homo sapiens
ctcctgccctaaccctactgaatctgctttctgtcactatttggtttgtactttctaggagtttatataaatggaatcatatagtatattcattttttttgtctggcttaacataagtactttgagattcatctatgttgtatgtactaatagtttattcatttttattgatgggtagtattactgattgtatggatacatcatgatttgtttatcattcacttgttgatggatttttgggtcattgcagtttttgatattactaataaaactgctataaacattcatgtacaagtgattgtatcatatgttttcgtttctcatgggtaaatacctaagagtataatgactgggtcatgtgctaggtatatgtttaacttttaaagacactgccaaactgttttccaaagtgattatataaattttacattcccaccagcagcgtaagagagtttcagttgctccacatccttgccaacatttggtatggtcagtcttttaaaatttttgaacattagattagtttttagtggtatcccattgtggttttgaattacatcacactaatgactaatgacattgagcatcttttcatgagctcatttgccatctatcctcttggtaaaatgtctgtttaaatttttagcctgtttttttttattggattgtttgttttcttattgagttttgagagttcttcatatattttggatgtaagtccttgatcatatatgttatttggaaatattttcttctggtctatagtttgtcttttcattctcttaacagtgtattgaaaagcagaagttcttaattttggtgaagtctgatttataggattttttccctttattaattgtgtttttagtgtcctttgtaaggcatatctgcctaatcacagctaaagattttctcttatgttttctagaggttttgtagtttgcattttacatctagatttaggatccgttttgagttcattttagtatatggttacaggtatgtgcagaagtccttttcatttgttcacatagatagccagttgttat

SEQ ID NO: 138096 - DNA, 1016 bp, Homo sapiens
gttcagtaccaggtcatctattttaaaaattttcctttctatagtagtatttatatgcattatgatttattaaatcataacagtttttttgattaaaaactaaattaaatctaagaaaagtgagaaaataataatgtaaattatagaataatttataggagaaggtataacttttttcatttatttttttaaattgacaaatagttgtacatattcgtggggtacatagtgaagtttcaatacgtataatgtatggggatcagatcagggtaattttgcatccttcaacaaatctctcactatctctcccttccctctatgggaaggcatatgtttataaaattagagaaaatgcaaggatataagtgtatgctggtgtgtttgtgtagagcaagaatgactagaaatgtgaattttcctttttttttttgttcaattttctattaggtttttcttgttagaaagaagaccggtcctgatgctgggcagctctatgcaatgaaggtgttaaaaaaagcctctttaaaaggtagaaaattagaaagtttattaaaatagaatttgacaaagtgtagtttaagaaatatgctgtgtattacttgcataaggtgaatagatgtagctatttttaacattggtatttgtggcagtttttctaacctgtaggtaatattactagatttgatattggcatatgccttaacttagtgagagtgcacccccgtaaaaatttgatgctagaaaaagtgacatatttcatttaatttaaacttattaacttaattaggatatattctcttctttcaagattcttggtttttccttttctatctgtgtcagtattacatattgagaaagcacaaccatttgcacacactatcttttagggtgtgataaaaataccgcttatgatcagttttaatcagtaaactcatttgaacaattaaaagagattaataggccgggcatggtggctcacacctataatcccagcagtttgagaggctgaggtgggc

SEQ ID NO: 138097 - DNA, 1067 bp, Homo sapiens
aaaagcatgacataagggtctgtaagtccttttctagtaggtcaaaaattagacttaagttttctagcagccattataaagaagctaatatatttgagtgtattataattgacagtattttaaaggtggaaacggattaaacagaccagagaaatttctctcatgggttttcttaaagaaaatactgtataacataatgaaatatattcaataacatcatgttaaatatagcaacatgatgaaaagttgtcaatgtagtgcttaaattcagggaaatcttagctttgtctgtgctgggatttagttttaagaagaatatcattgaaaccttttaattcctaatattaaagtacaaaatagtgatctttatgtagttcatcaaccaaagaaatattaaggaggtggcttttttttccccctaggatatgaacatacttgcttgtcagtgttacatcatttgcggaggcattgtgtaggtgtgacttgttatatgctgaacctattcaggaatttggccaaggctgtgaatcagataagtgtaggagcaattccaagagactttgagctgcagagtcttaagtttttcttcaaaagttccattgttaaaatgcagtaaatgggattttagcccatataaagccttataacattaaatgtttttattgtctatttaacagtgggggaaccctgctaaagtcaacttaaaattgtagtttaaggaagcatgcattattatcatgaaaggtgcatatacaattctgtcctaagcacaccaagtataatgctattaatgatcattaatgtatgggttgaaaggtatactaaacaacttacattaattattttaaaacacaaacacatgaaaatacctttgaaattgtctgattagtcgtccttatatatcatgtgccaaataatatttatataaaacatacattttaatatttgtggattataaaaaaatacttttgcttttgtgatagtaaagactttaagtacaggacttaaaaatgaatttttgaaaatatcgaatacttgtactcttaaataagtgatcaactctcaag

SEQ ID NO: 138098 - DNA, 1110 bp, Homo sapiens
gacttctgattttaaatggaactaatcagaagatgttgaaaatggattcaagtattgtttggatttctttttacaggatgaaggagttgttaaagaaatccctattactcatcatgttaaggaaggctatgagaaagcagatcctgcacagtttgagttgctcaaggttcttggtcaggggtcatttggaaaggtaatgaataatttttttccccatttgttcctcttctaaacatttagcaaaaaaagtgaacacatacgtagaaatctgattaatgagtcgtttctaaacttctgaacggatgctcacaaaggtaattctttaattttattcctttcatttctgttgtacttttattaccatttctttgtacttctctgtaacaatcaaggttttccaattccctaggcttactgatttcttgagggaaaaatatagcatactctttattagctgcctaaatcaaagtagcttgatttttgtaaaaaatggtattcctatctccttgttcccatgctggcatgaatacagcttgttttctcctggtgatttaatctacatttgttagctatgacacagaaatcagaatttatgtcttaattcatgtatgaattcgtctgtcatctgttaaagtagaacaagggtgtgtaaagtagaacaagggtagttactgggtgatatgtggtttatttaagtcttcagagagcttacatttcaaggcagaaagcaaaattgagtaagaataactattatagtcgttactaaagttgtttattaagcacttaataacatggttttagaaaagaagtgtataggtctggttcctgacctttatatacctaacatctaatacatgaaaattattgcatacacatagtaacagcctttagaaaaacagcaatttagaaaaaccgcaatttaaggggagaaagataaagagaaactactaatttcaagtggctgagatttagttttaaaggggaaaaataaggcaattgagcataggttatttatagtgctctggaacattttaaaataaagacatttttattttattgggttttagaaatggggtcttgctctgtcacccaggctgtagtgcagtggca

SEQ ID NO: 138099 - DNA, 1038 bp, Homo sapiens
ccgggttcacgccattctcctgcctcagcctcccgagtagctgggactacaggcgcccgccaccgcgcccggctaattttttgtatttttagtagagacggggtttcaccttgttagccaggatggtctcgatctcctgacctcatgatccacccgcctcggcctcccaaagtgctgggattacaggcgtgagccaccgcgcccggccgagttatagattttttaagctggaaagaacctcagagatattatgtaatacttcattgtatggattagtctactgaaacttggagagtctgtgatttatactaggtgataaaagtagctagtagcagaatcaagacttagggcagtatgcttccttttaggtcagatatattatgtagacctgaagaagtagaagatgaggagaacattatcctttttctatttggttgtggatgaaatcaactttgatgacccctccaccaaaacttgttcataattggaattagctcagatagaaaccagcagagggatttaaattgggtttgtccaaaactctcctttgaaatgttctatgtaactatttctgcagttagtaaccatgtaacaacacttttaattttgattgacaatatgagagatacaatgttgtctttgtagcttttgcagtttactgaatattaataatatattgtaattttgagtataattaaatgtaaactatcaaaaccattatctagagatttgtctacagttcatatggactaataggcatagtaatattaatgttgccagtttataaaagataaaggagtataaggaactattaaaggcagtggagaaggagaaggctgcttattatattttagcattaataaattcacaaggatatcatggcttacaccacaggggaacagtgtgtgtggtgcataaactcaaggacacatacacagggtgattggcaaatatttacctttataattttagtagaagataagtcaggaagttcagtttttagtggaaaggcagtaaaaatatacagtgctagttact

SEQ ID NO: 138100 - DNA, 1016 bp, Homo sapiens
ctgttgtagtgcaaaagcagccatagataagatggaaacaaatgggtctggctgtgttctagtaaaatttttacagaaacggacaagaggtcagatttagctcatgggttatagtttgtagaaccttgatctaagtcttctactttactgtttcttgaattagttgttaaagaatgagtagtattacctactgagctctgcatgttgacttgttttgtttccatgattacttacatctttctcctatagtttattttttcttctgtatagtatgtcatgatgtttaattaactgaatgaaagaggaattcacaacagtgcaattatataaaactgttcttattataatttgctttgaatatacccccatggtagatttctgtggcattttttttcctgtcataaatacttggttggggacaatttaatgaaagtacataggttatatacttagtgtatagttatctgttattgcaaaactctaaacaatatgaaattaagcataaagctctgaaaatcaaagtttctcaaggataatctgggaaccatgttaatagtgttccttttctaagtacttctatgtgtcctttgtccttttgtttttcagtaagtgtggatcttgttagattgtggaaggaaatgcctagggttatatttttcttagttatcactcttgttttaatacttttgaacctcaatttttgaacaatgtttttcaggtaaatggtcttaaaatggttgatgagccaatggaagagggagaagcagattcttgtcatgtaagtatttatgttaatttattaagccacatttttagcatataaggaaaaagaatacagggaaaggagaaaagctcctatcaaacaaatatattcaggtaagttggtaataagcaaatggaattattaataactcaactgcagtttaaaatataggacaggttttcctgacagaaatacttatgcatgcatttttaaaaataaacagctttattgagacataatttacatgctattg

SEQ ID NO: 138101 - DNA, 1036 bp, Homo sapiens
tcccataccacctccaattccaaggatctgaaagggatttttttttttttaatttctcagttcagttttccttgatgagttgctttggtcaataatagtaagaaagcgataaatttgaagtgacctatgtgattttctgggatcagatgagtacagcaactcagtttaggatttctgtttgtcccgcatatttgtaagtgctttaagtcttttctgataaaatgtgaaaagaatttttaaagtagtcttctctaagccctggtacgagagtctgttcacttggattttgaaatatctgagtaaattattactacctttattgttgatgataaacattccagaatcatatgtagaatttttttcctctcatttggcacttaattggggaaagcagcatgtctgcttatcttttcaaattacaaattttatttttgaaataaagatttattatcccagagaattcagaaattatttttgtttttatgtggatgaaagtgatttaaattatagtaagtatcaatgagtatacactgtggttctccgtaggatgaatattcttatattgaaaacctgataccttgagggtagatgagatgggagcaatggagtgttctgtttctaaaggccatttctgactgagataatttccaggatagagtgatcttcttgactcattcacattcattttatttctagttccttcagacccacagcttcatgataaattagtcataagatgatatgaataggaagtaaccagtaactaaggtaacagaggaaagcaatatttttctttttttatggataatcctcttcctatgcataatccttttttctatggataattctgagagtcattttatggcaaaaatttaattatcacgattctgtcttaatattgatttctggactgttttccgaatgctcttctttctatatgcttacaatgaatctgtcacagttctttttttaatcccacatagtctgttttgttgagctaaggtggtagatggtgttatcatttaatgaaatggga

SEQ ID NO: 138102 - DNA, 1014 bp, Homo sapiens
gttgctcattttacagatgaagaaattgcaactaagaaagcttaataaacttttcaaaggcagtaaaagtagagctttagagtttgaatcttggtctgcttgacactgaagaattgctgttttcatgacatactatgcctgcctaatgaatgaaacacagcatcattcctcaaggagctttaagtctagatgcacatgacaagaaatttacctgatgtgatgtattactaatcttatttttagcattaaaattttaaattgtcttatatatataaatatatatatgaaacataaaatttgccatcttaaccattttaaagaatacagttcaaaagtgttgagtacattcacattattgtgcagccaatctacaggactgtttttaccttgcaaaactagaactccttacacgttacacaaaagctttccattctcccctttttgccagccccagcaaccacctttctactttccatctctatgaatttgactattctagataccttatataaatggaaccatatagtatttgtcattttatgactggcttatttcaattcatataatatcatcatggttcatgttgcagcgtgtgtcagaatttcctttctttttaaggttgaatgatattccattgtatgtatataccacattttgtttaacttaccatctgtcgataaatacttgggttgcttctaccttttggctatttgtaaataatgctgctatgaacataggtgtacaaatatctttttgagaccctgctttcgatttttttggttctataccctgaagtgggattgctagatcatatggtaattctattttaaatttttaaggaattgctatactgctttttatagcagctataccattttacgttgtcaccaacagtgcacagaggttccaatttctccacatccttatgtatggtggaattattttgaaaaagtaaattccaggatatattctggatttactttccatttcaacaaagccatgctgttgataatt

SEQ ID NO: 138103 - DNA, 1041 bp, Homo sapiens
tggagtagatgcagtgatgaatgaatgctgttggaaacaattacatttcaaacttaatgggcatatgcagaaaaccatatgttgattatagagacatatacaagaatgatagaacatatataagataatttgtgtatgattttgtactttattttacagatggagaagagtaactctagaccttctggcacaatcataaaacatttattgtgtttatcatttgtagagcaattacattggaataagtgaatacttatagaatctcttaagggaggtcagtcaatacggattttcaaaaaagacatggtcattcagcaacttcatatctatgaacaatattaatttgattttatttggtctttattcatgatattatgtgtatcagtagttctttcttttttattgctgtgcactagtctgttatgtgaatgtaccacagttgatttgttcattaataagttgaaggacatttggatttgggttgttaccagtgtttggtgattatgaataaagccattatacacatttgtatgaaaatttcggtttggacataacttttcacttatattgggtaaacacttaggagtgaggttgctgcgtgagaattccagctgctctgagtacttgccagcacttagtcttgtcagattaagtgaaaaaaaatagctattctaattggagtgtaggggtatctaattgtgattttaacttgcatttccctaatgacacatgttgctaagcatattttcatatgcttatttgccatccgtatatattctctgatgagttgtcttttcaaattttttgaaattgttcaagttgggttgttttcttattattgaattttgagagttctttatattccaaatgcaagtcctttattagataccgatttccaaatatttttcccacatggtctgtcttttcattctcttaataaagagtcgaggtttttcatcttagcgaagtccagtttatcagttttttttttcttttatgaattgtgtttttggtgttgtatctaagaaatcctagcctaat

SEQ ID NO: 138104 - DNA, 1488 bp, Homo sapiens
gaatggatctggtaaggctttgtgaaggaggtggaatttgagcagggcattagaaagtgataatattttcacagacagatgaaaggagcatatttcacgtggatgggcacaatataagaaaaggcatggaaatgttctgaaagaaggaagaatctgatactgttgtaagtctgtgatgtgggagaggggatatagtgagagataaggaatgtattaaaggtaagctaggcccaggttgaatgggactttttaagccagtttaagggttcaattttatctcataaataggagccactgaaggtttttgaggacatgagtgacattattagatttgtgctttgaaaaataattgacggtagtgaggaatgggggagatatggaaggtggggaattccagctaggaggctattgtgttagtggaagtagtagtgagatttttgaactagtacagaaggggtagaaaagagatgactgatgggagagacctggcagaggtagaatagttacaatttggtaactgattagatgttggagagtaaaaagaaataacaaacaattgagattagaagcgtcctggtaggaattaattcaatgtaacaggtatttaatgcatacctgccaatataagtctctgtattagccaccagactaatataaaaataaatagatctttgcagtatagggagatagaaagctaaaatgaaatctcccctttctaatattgtattgaataatagcattccactctgaaggtttctgatcgtgcttagaatgcttaaattctttactaccaaaggtgaatacacttattactagctaaaacatttttaattctttttaaatgggccttaggcctgtaattcttgtttcaccaatgttcatcttcagtagtcagcagccgtgagtacagagtcctattctgaaaataatgaccagtacttatttctggaatgtggaaggagagcagggacatctgtattttttctatgctttcaccaggtttatttggaatagacaagcggggaggagtcagagggcagtggcccctccctgccacaggtgccttctcagttcctccaagtcaatctttctttaagccagtctgatctggaaatattcaggtcagttccttcagggcaggtcctctatatttccctaccttgattagttcatcaagagagctaatcattacctctgtgttccatgataaggcctactgatagtgtagttgcttttctgggccatattgttttagtacctaccctctcatagtctctctcatctagaattttgatgaggaaatgcaagatttttttcccttcctgtaatttctttcttggtgctatcattgtatgtagcagcggttcttaagatttgataagcacttggaatcttgaggtataagcctttcagtactttgtcagaatttgctatgtaatgtttattcatttatgttatttccaaggattatttactgttgctgccaat

SEQ ID NO: 138105 - DNA, 1004 bp, Homo sapiens
ccacttagtacttagaagagtttgtttgtttttaattatattcttttgataagaagtaaacaagtttacttttgataatttatattttaattacaaatttgttgatgttggctttaaaaatgctaattttgagtacaagctctacaaccctcaattgtgataattttaggactaagagtgtttttgttgtagaatatatatttttaaaatgtgctagaatccttaaagaaaatgtaggtaagaatctgttaactttaatgtcaaaagaaataatttccgtccatttctgtgtgtgttgaatctggtaagattaaagattatagacactaccatatattttggagtctttttgtatcttttacctgtcttgcttgcatggacagttgttaacctttgaattatcattcagaagtgtgtaaattggttgtttgagactcttaacatgttttcccacaggaaaaacttattaagggtacttatatttttagatcagtacataatagcgaggtataatgatgccgagcctaaccactgtttgtaaaattgttctgtggtgaaatgtgtcaggtttcaaccaataactagcttggttccagtgagaggtagagaatgggcctgaaaaggggaaacctggaatcttttggtttctgggaagagagttcttagaagaggggaaatagggtaagcaagaaactgattgtgagagctcttgcagggactgtctcaatgaggtctactgggaataggaacttcaaagggcatcacccctcacgcagtcacaatttaagcttttgactggattctgtcaggatcaagaaagaggttttacttgagatgggatgggtattggtcattcctgggcaaggatcataaagaacaacctgtttgactaatgtgaacttttcatgatttaatgccatgcatgttacagtttgttcgcttagttgtttgttttttggtgaggaaccaagtgcttctttatcaagttgatgatgtaattttca

SEQ ID NO: 138106 - DNA, 1191 bp, Homo sapiens
gccacgccagagttgttgtgactaagtttcttcactttccgacccgaaggggaactgggggactggcggggtgctgtgcctgactccgcgcgtccctttttctccgccgcgcctagtttgctggctgggaacattttgggggacagctgcggactccagctcgctgttgaaccccggacgctttacgaacccagtgcaacaaacacaccaaggtgactaagtaactctggggacatttgcacataggcacgagtgttccctggtaacagctttctcgtttctctgtggcttgttatggttccttgtaatgacccatgtcgagatacactggcgacctatctccagtcgccaggtttcaggtgatgttctactgcttcctctcaggtccccttgattctactgcactcttgctccaccccttctcctttccacaaccgctgtccctgccccgttggtctgtaaaagaagacgcaaagtaaaccccagcccttataaataagtcgaatctttggtaagacttagcgaggttcaaccaaaatactttggttcacctctcttcccactcttcttactctgaaactgttctggttgggctttggtcagctgtgcagtgagaacttagatgtacacaggtgctttgtttttattgttgttataaaagcgggcagcatttaaacacaaaaacgtgtcttttgtgatagaaagttggatccttttctgataacttaatcgactgcgtactactccagtagaggccaccatacacctcctaaaaatagttggtgaaattgattcacagtaggatattttgaggtaagactctcaatcctcgacatctaaagggtgcaactttgtcttcaagtacttgctccatttaaaaaaaatacacatttggctgttgtatgattaccttgtttttttttctttaaatttttttgttatttatcaactaaactggggttaagattacatgctagaataacatgtggtaaggaatatagtggaaataaattcagaagtaccctaaatctgaaccctctatacttacaggaaatattttactagtaaaccaagcaattccaatatacgttttaatattttacatctcgtaagaacaagataaatgaataggcgttcctttcttgttgaaatgtgggaatgctaactgtttgcacaattgtctagcaagtc

SEQ ID NO: 138107 - DNA, 1087 bp, Homo sapiens
acatatgaaaaaaaaaggaaggtattttcttcttttcagccaagctaaacttattcacaagaaaatgagaattgcaattgctctggagaataggaaaattagcacatgcaaagaaaaccttaaaagaaaattggcctcttcatggaaactggggatgttttgtcctaaggtcagttatcaacagcaggatttttgtattgccattgcaagcatgtgatagaaatgtttgttattgttggagaagaaaaggctgagacccaattataccctgtactctttattcgaccaagacctcaaaagatgtcaaagaagccatttctccaaagacagcaacatctattgtgaggcactttcatattcagcagtctgtaagtttgtaggagaaaacataagtggttaatttaaaataattttgggctctaaaatggactttgttgccttttttggtgggggtggtgggaatcggattcagcccatttccaagggatagtttcttcatctcagacaactattttgtgatcctttttaaaagacattctgaaaactttaactcctgcccttcttccgtattacagttgtgttattccagaaatattgtctacttttttaatatattagattttcattcagatcttaaacatgcaaacatgtgataggttagctttttaagggagttatcagtaccactgtatctaaatgttaggtaaatgggtagatttctctttgaagttggtattttccttggcagacagcactgtatcatgctcttcaccaagctatgctctgtaatgctataatcaaggaggctactaacttgtgaacctacagtcaacacaccattgctgaaaacaaactttgattaagaacagatttgctagggggaaaaaagagtaaagtgatattttcaagcaaatataattaaaattgtttcattaaaatatatactgagtgtatattgctccacactgaaattttattttgcattaacttgttaagtaattcattttagcaatcctgcatcccattttactagtactacctctgaaatatactgtcaccttaaaaccacatcagactgtaatgtgaa

SEQ ID NO: 138108 - DNA, 1002 bp, Homo sapiens
tttcttttaggtaaggcattgtctaagatcctgaaatataaattattctttaaatccataaggataattcaccatgggaggactacaactattaatataaattggaaaacaatctatccacatactaatccaaaaatattattttttttattcaggcactgctgtcagatttacctcctgaattagaggaaatggatttcaatcatgcctcactggagcctgatgatacctcattcagtgtatcttctttgtcagagaaaaatgtctcagaaagtttgtgatttcagttggagggaatatatgatacagtcttttggcttcgtaacaggtgtgcatttcaagataactgcattctgttgccctggtattctttagttgggaaaacacattgttgaaacggacgtattctgtgaagaatgtacaagatataatggctacagtgcaacaaaaatgtaggtgaaatttaaaagcattgtttgagagagtatttttttaactgatggaactctggaaaaaaattatatttaagtttcagcagtttaaccctgaaattcattatgtctaatttctaaccagagacaaaataactaaagacatttcagcattgcttatcaagttgctacagcttgattagtcttgtttttgtagccattacatcttctttcttcttctctccttttcctatcatccacttacactttttctcaggaaagtggactgaacatttaaaacaaaactttaaaaaattatttaactcattatttaatgagttctctgatttagtttttaacccctatgaaaatttgacttaaactaatgactgaaaattaaatgattacaggtatgtaattgtaaattgctggtgttcttctattatctaacccaaatatttgtgtgggggtggggaagcacaatggaaaggtaatttaaccaacataacgtcaaataaattacgaagtgtacagaaacaaaatgttgtcaaaattagtcttgatggggatt

SEQ ID NO: 138109 - DNA, 1032 bp, Homo sapiens
ttttttttttttttgagacagtctcactcttgttgcccaggctgcagtgcagcagtgcgatctctgctcactgcaacctctgcccacctccaaggttcaagtgattcttctgcctcagcctcccaagtagcttggactacaggcacacaccaccatgccctactaatttttgtatttttagtagagacggggtttcaccatgttggccaggctggtctcaaacttctgacctaaggtgatccacccgcctcggcctcccaaagtgctggggttacaggtgtgagccacgcacccaacctttattcttaatcttaatctgaatgccaattaggcttgatataggaggggtctttccaagaagggagctgttttttggtttttctcttactggaacttattggattggtttttgactttataaattgttttctattagtgatttgcttaaaaggcatcctgtgactaacaggatcattttcttccatgctttgtattcctttatgttaacattttgttttctttattgtccttctaatttgatggttttttagaattttattgtgcatcaaacatgtatagtcctgggtttacataaggtaattgtatcatttggtattttctctttcagaatgaagaagtcaaattcattgaaaatgagctcgagattcaaaagcaaaaatactttaaacttcagacttttgttagaagcttgatattagcaatgaaagctgatgataaggaacaacagcaggtaggtcccaggaaagactagtaagctgcaatgtatcaagtcaaaaaatggtatgtcacacttgggttcttcatatgttttcattttaatacttcatttctgcttggcatggaggaaatatttgttatttcatgacctttgcaaacagttttcttgagaatagatgctcagattttgtgtgctccttcagtggaaaatcaaaataattgattaacatgcttttaatgtcaggttagtctttaggtgaggaaaataactttaaaattaatttcaaagaaatt

SEQ ID NO: 138110 - DNA, 1053 bp, Homo sapiens
ctcgcccttcccatcatggcctgaactaatttttcaggttaactttgaaatgcctttggccaagagggggggttcattcagatggttgagggtcttacaattttatttttggtttattaatacatacattattggtgaaagtgtaaaatggtacagctactttggaaaatattttggcagtttcttatgaaattcaacataatctttcttaacgtaagactcagcaatcctacttgaggtatttacccaagataaatgaaaacacatgtcattaaaagacttatacatcaatattcatagcaggtttatttataatagtcccaaaccagaaggcgttcaagacttcattagcaggtgaataaacaaattatggtggtgtttacacaactatgtccacctgtcaaaactcatttaactgtatacttaagaagatgaattttattgtatgaaaattatgcatcaagtaacctgattaaaaataaagtctatcccaaaggggggaaataaaacctcttccttctgtctaactgacactttgtatcctctgaccatcattcccttatttcccagcctcccacaagcccttggtaaccaccattctactctctgcttgtttgaatttgattgtttttgattgcgcacattaagtgagaacgtgatgggagtctttttgttaatggcttatttcatttagcataatgttctccaattctctccatgttttttcaaacaacaaagtatttttatatgctgaattgtatgaatggtgaatatggtaaataataataatatattgtacatttcaaaatcactatgagaaaatttgaaatgttttcaccacaaaatatggtatctgtggtggtggatatgttatgtcgtttgatttaattaatccacttggtattcataaatcataacagcattttgtaccctataaatatacacaactcttacttgtcagtttaccattaaaaagtaaaaattattctaaaaaaataatcagccagttaccatttcaaaaaacatggaagtagcctatgactattctttgca

SEQ ID NO: 138111 - DNA, 1057 bp, Homo sapiens
agagcctgtcatataattgttcaactgtaactatagttacagtagttgctgagtgagtgaacaaatgacttaatttatctttggaaataattttaaaactattatgcaagtactcatttatataaaatcaggagctggatcattgtatttttcccctacactgaattatacagtctctcattcttgagatttcatgtggcaaactgaaagaatgtttccaatggtgcatttgataattattactatgcaaccatccatactcattttggtcatagtggagtttttgactgagatacatcactagaaatccatgttcttaggaattctaaataacacaaaatgtttatgagacactttgatgggctcagtacctgaggcaagagtaactgcatcataaaatagcacctcagacttggcagtcattaatagcttgctcagagatcaaagctctggtcaatgtggaaactggagttctccttactatcatcttgacgaagaactaacaaagtttactcaaaatgtaggtagggttttaacaacaataaaaataagatagatcttgttttatgatattcagtaactgatgttatgatactagttcctctcacaagcattgatttacttagaaaatcttgaaagtatacataaattactgcctgttatctaggaagtatttaataggcttgcaaagcagctctgtgaagaaaatgtctgcaatattaaattatcttaaagctgtttatatttttcaaacattgcataaatactgaggaggagaaatatttgcatgaagaattagaagtctgcataccaaaagatgcttcatgacttttgcaaatgtgaatcaatgtttcctaatacacttgaatgcagctaagaaggactgtgcattcaaaccagatactactataatgataacgtatatctcttgtattagaaacgacttcctggtcagcactttactaatactactgctccaacaatgaatactaataaagcaaaggcctaaatttagtaaaatatattatgacaggagcatgttcaggtaaaaaaagtt

SEQ ID NO: 138112 - DNA, 1040 bp, Homo sapiens
atttaatcaaataccatttaacaaaatgctaagtaatcaaatactccattttcctggctcacataaaatgcagtatatatcagatagtagcttttctagcctcataagttggtctcagatttttaaaataggatgttcaacatatacatagaattgtctttacaacatatttttgaaatcaaatgaatgtttttaacatataatctctgtgtgactacataaaataattagaataaatttttaaaacttggtattttgctcttgacaatctaataatctagcagaaacattaaagcggattcatatgtggggtctaaattgtgtaaaataaaacagcaaaaattcctttaagaatacctaaatcatctataaaacttaactatttgcatgccttcttatgaatgtacaaccatgtacagtaatgaagacatatcatatataattgatatcttgatatgtagagtctatttaaagtatgattttacatgagactggcaagtgtgttatagttgaattcacgaaccttaagtatacatttgatgtgactccagtatacatctaaataagtgcattattttcgttgtgtatccactcttagccatgagatgcagatttccaacagtaagtacactttctttcatttacttttaaagttgcaattctccgttagctccagcagaccaggcactctgggaagcagttagccataacaggactatttccattatctccagactatttagttctcttctatcttacacataaggcctttcttcagtagtgtgccttatatttctcttcttaattcctacctccttaccctggttccaagcctgaattacttctcttccaaactattataatagtttttgtacttctttaatttactgtacacacatagacatctaagatttgtactgtataaaaatacatttctgatcataccatacgtctgtttgaatgccctcaatggctacctattttctacagaattagatataaatgcactttgccattcatgatctccacacagggacctt

SEQ ID NO: 138113 - DNA, 1017 bp, Homo sapiens
ttgtcagctccagacatcacagtcagaaatgtggttaatattgctcgaccctcaagccagcagtcttcttggacatctgccaataatgatgtcattgtaactggtatatacagtccagccagttcatcaagtaggcaaggaacaaacaaacatacagacacacaaattacagaagcacataaaatccctattcagaaaacagccactaaaaatgatactgagtttcagttacacattcctgtccaaagacaagtagcacactgtaaaaatgcttccctactcctaggtgaaaaaacaattattttgtcaagacagacaagtgtgctaaatgctggaaactcagtattcaatcacgcaaagaaaaactatggaaactcttcagtacaagcttctgaaatgacagtacctcaaaagccttctgtgtgccaccgaccttgtaaaattgaaccagttgggattcaaaggtcatataagcctgaacacacaggcccagcattacataacttatgtgggcaaaagccaactattagagacccttactgtagaacacaaaacttggaaatccgtgaagtgttttcattggcagttagcgattacccccagagaattctgggaggaaatgccccacagaagcctagctcagcagaaggaaattgtttgtccattgcaatggagactggagatgctgaggatgaatatgccagagaggaagagctggcatcgatgagagcacagataccaagctattcgagattttatgaaagtggcagttcccttcgagctgagaaccaaagtacaaccttgcccggaccaggaagaaatatgccaaattcacaaatggtgaatattagagatatgtcagacaatgtactgtatcaaaacagaaactaccatttgacaccacggacctcattacatacagcatctagtacaatgtacagtaataccaatccattacggagtaatttttctcctcattttgcatcatcaaaccaattgagattatcacaaaaccaa

SEQ ID NO: 138114 - DNA, 1021 bp, Homo sapiens
taagctctgtgaggaagccactatgttttgtctatgccccgaacaactgcccggcacagagtatgctctccgtgacttagttttagaatgaatgaacttacccatgtttcgcagaggtaataagttgtttttcttactatataattaattattaaagcagctacatttgggtattaagtccttatctggacatatcacatatgcccgaaacaaaataattaaaagttctgcacccaggaaaataactcccaactggactattgataatgttctggaaggctttatctgggaccgggagggtcaaccacaggggtgaacagtttctccagaagacagctgaccgaaaccgcagcagttgccaaggcggctggaggagggcggagaaaaggcggtaactggcaggcaaggggcgtaacggggtggggctgtcctaagggaagcctagtcgaactgatttgtccctctctgctctccgtctgaaaaccttggccgaaagggttgtagacatggcggccatcagggtaagcgaaaaccaacttgcttaatttctgtgggtgccgatagcatcccggtaactgtaaaagggatcctactaacttctgaaggagccctgaaacaaggggcagggtggaggtgggttttgagataattgcaatctttatcgtttgaagcctcaagacacctgcctttccccattagggttttatcagcctgggacgctgctccctcaatcccctgtggttgtcgatttacacagtggcacagtacaaaactgggaaacggctgggtgaaaatggctggccaggcgacgagccgcagtagacgtttcggtcttcagctgcaataaagagaaaaatatatatataaacttggcatttgtctcggcgcacagggcaaggccacatgaccctatggaaggactttgttgaaacatttggggtgaaactgaccaggatagagaggtcccatagtctttcagcagtgcgctggtttacacatagtgttgttgctttctgtgctc

SEQ ID NO: 138115 - DNA, 1078 bp, Homo sapiens
aacttataatataacatatagtttattgtgtttattgcctgcctcctctctactggaatgtcatttgtatgagaacaggaatctttgttttgttcactgatatattctaagcactaagaccagagtctggcacatagtaggtgttcaattgatgtttgtggactgaatgaatatcaagaccaatcccactccattcctcagattttagtaattattacattgctatattattacataataatattccagataaatattatattgctatatttcttatgaagtagttaacaaacaggtaaaaatagtgctctgccatccagtatgagaagataattttatgaactatgtcttaaaaatgtctgaggtaatttggagtgtttgagtatttaatatattaaagtgaaaccaatagatttcctgagattcctccagtatttattaggaaatggaagatggaaagcttttcaactaaaaagatgtttttgatatatctttcttagatgggaaaactgacaaccatgcctgcaggtctgatatatgcatctgtaagtgtacatgcagccaaacaagaggaatccaaaaagcagctagtgaaaccagagcaggtaatttgcctacaaaggtttatgaactttgtataatatcaagatgacacaaaagctatattttttaaaattatctttgcccatcaaaaatgtcttagaagtctttgttaggtagatattaaaagttgagagaaatagttatgaagtatctcaaaagacaatatgtaactcaaacatctaaaattctaactccagtgaaaaacaactagtgatttttcttaatgaataatcaataagtagtggagggtgttagacgttctaggcagtctgatttttctttcttgaaaaacttacacaggtacattcagtattaggaaacttcagtttaacaaattcattaagatctcagttttggaagtgaccttagatgttttctagatcaaccttctgtatggtactgtaattccctctatagtaggcacatttagtggccatatatcttctacatgaataaaactctaggtaaaggagcc

SEQ ID NO: 138116 - DNA, 1035 bp, Homo sapiens
tttatgccattattgaaattgatttttaaaatctatataccatatgattaacatgcattttcaatatgaggcagtgtttatgcagtatttaacagagcaatctgctgccaatagagtttggaggtggatatttagtttacagtgtataaacttaaaatatgcatccctttaacaacgctttgtgttagcatgctgcaaatcaaaatggcacttaatattaaaagctggtttagggaaattttatgaaaatcctgttcataaatgtaatgcatatgatatgtacttttaagttttagttgcttcatgtttacattcagctgttcaacataattaaaatgtaattttacttcatgctatattgtggctttgtgtttcaaataatgttcacctttctgtttttgcaccagataagaatcagttccttgagaataaattttttatctttcttaacttcagaatattaaatttggaatatctactaaaattgtgtgttatgtggctgtaaatgatgtacacgctgtaaaataagatcgctactgttatgtgggattattatttctaaatgttactcattgaaatgagcatacaataaaaagcatttattgcacttaatggttttataagtttatttaaagtttccatattttttattaaaagacttcacttcagagttacttaggcagattggtcctttctttaatgtcttgttgaattttgttcatgaacaacaacatgaactaggaatttaaacagttacgatgactatgtaatgcatatttcttaagaatgtatgttatttgctaaaatcataatgaaatactataaataaaagtgtccattttaagatcttagatttcatattagagagaaaactaaaagttcttaacttgcttaaatgacacaatcctgagcagtgaatacatctaattatgttcccaatatacattcaaaaggaaaagtattgttgtgtgtatttggcaaagatttctgcaaatgagcataaaaataactttctatgttcaaaccagtgagcat

SEQ ID NO: 138117 - DNA, 1121 bp, Homo sapiens
ttatttgacctccattaagagaaagtaacatatttcatatttagaatcttccggtctaataatgtagtctgctgagaaatagttttataggcatagttttcactagcagagagaagtgcagagtttactacaccatcagataaatgaatgcctggtctaatatttcaacaaaattaaatgaatctcatcttaagcaggccaccttgcccaggaaaactgggccctgacaggaaagctggatcaatcaggcccaagttgtttgctaaggagactggattatatccaagatgtgaaagacagattatattcttcctcacctaatgcaagagatatggccctgttcaattcttaaaagacactaggcagtgagcaaaaaataaaacttgagctaagtggcactgctcaagcttaattggtggtgtcaaaacaattgtataaagatcatgtttttcaaatggctctaaattttaatcagatataatgtgacaataaaatgtagccattgctgtcagtgtatccttgaaagtgtattgtctcagtatgcaacttaaattatttattctgcctgatttaattatatagcctgattgacaacactaagtgcaaacagtccattctaatgccttttgactgcaatacctgcgtgcaggttcataagcgctgccagaacagtgataaatggctaaataatcttcttctgacatgtatagcagcacagtgtgaagtgttgtttagcagagaaaatagggagtgttaatgataagccaagaatatgtgctggaaaaaaatgctaacgacaggtgcaaacaattttctgtgtggaaaatcaaatatattgtaataatacgtgatggaacagcagatgtttcccagaacaagtacgacttccatcactaatatttatttttttgagtcacttttattgacccacaaaacattgctttgtttggagtttaatcaaaacagaagcaatcaaagtataacacaaaatgacattttattaaaatatattttacttctgcacatgatttgctagcagagtaaatgttaatgtcattatattcttgcttgataaggctgtgaacttttcttttatgaccaggtgctgaaaaaggtcatat

SEQ ID NO: 138118 - DNA, 1028 bp, Homo sapiens
ctcaaaatgtaacagaaattattcttagagctttgattttagctatcctaattactgcaaataaatatttgttcttatagttttaaatcaaaaagaaaagtcttgttataaaaccttaagcttgaaatcatattaataaaatatattgtacatagtggaaaattttcagtagctaatttaaaatttcagaaaatgctattaaagaattttgattcaagtatttaaactgtttagttatgcatgcttcttattaaccgaaaatgataataccatttagtttagtgatcagtatgagaagcaatacctaatcctatgttgctattgtattttttcctagttggtgtgcctgctcagaaaaacatatactgtatgtgtatacatacctgtgtatatataaaaggtcaatttatatatttttctataggaaaatggagtaacaagttccctatctcccatatttatttgtccatagtaaaatggccacattgatgataatttctagaactagtttctgagattgtcagccctttgtctaaaataatggcagtattaatgattgacttctgtcactgccatagttacctggattgtcagccttggtagcctttgtctaaagtcctaaagagttccaaaaaaaatgtgttgaaatttaattgctaaatagtggttggtgattctttacagtaggaattgtaataattttcttgcaaataagttatttactgctattgatattgaataatttgtcttttattcagatatatttcaaaaagcatgaatatatgattattcataaattgtatactttaccagtaagttttcagaggaaataaagacttttaaatccttttcagtcatggtgtcatattttgtaatacttgcatcttttatatatgccaagaatttgaagattgcctttaacctgatttatgttttaatattagtctagtatgtaaatacttaattgtcaagctgtatatttggttttgtttttaggcatctgccaactgtgctaagtttgtgagaaa

SEQ ID NO: 138119 - DNA, 1923 bp, Homo sapiens
aggactcagaaccaaaccatatcaaggctctataagaaatcatataaacaatattaaggaaattgtatttctattgatatatagaatgaatgtatttcagttctcaacaatctgaacacttgataatgaacctgatgaggtactgccatccttgaagagtggacctcaatacatgtatagaattaaagggagaagtcatagaattctgaaaacagacttacggaagttcatgtattctgattaagtactgtagcctgtttaagcaaatttttaaggataaaacacttatttttttttagttaatgccagaaatgcacacacattttaaaccgatttccaaaaacgattttatcttttcttccttggccaggctgaaacacttttccaggaaatctgccccaatgaagatttctgtccccctccaccaaatcctgaagacattatccttgatggagacagtttacagccagaggcttcagaatccagtgccataccagaggctaactcggagactttcaaggaaagcacaaaccttggaaacctagaggagtcctctgaataatggatatacaccaaactggatacccaactttggaaattctgactggtctcagagtctacttgatagaaggactgtttgagaaatgttagaaagcagcagcaattataaggcaaaataggtaatagaaatccaaaaggggattttccttatagaggacattccaagaacacacaacacttataaagcacattgacttgctcattttaaataccaaacttgtgtgactagcagatgaaaattataaatcaattgattctcaggaatgtaactgtggatatgaaagtgatcctatgcattgttaataattccatggtcttaggacaattttgcttaccactttggatctttgtttgaaagccacattttcagaaccagctcatgtattttctttggttatttgaattttattttctttatggacaagagcatcataacataatgataaaaacatatagaaaaactaaagtatcatgatctagatagaagcctgtatttggaatacaggtttgttttgctttctatgttgagaagcattgaaaatgctaatataaaggtgtttagacatttttacgaataagtcagtagtgttttttagtatcagtagtgatatttgtttgtaaattatttacatattgggaaaggtcaataatgaagaaatgaaagaatggaaggaaaggtgtggataggctcattggtatttgaatattctgtctgtcaagtaactagagtattaggctaattgtctacagacctaatttaatcctggctgtcctactgatgatatttggtaaattgtttaacttctgagcctacgtttctccatatataaagtggaaatagtattactatgcctactatatgagaatggttatgaagacaatgcaatgccatgtttagaatcggtttgccagaagaaaattgttttagaattttcccattgacttgatgaatctcaaaagtctcacgcaggaaataattgcttgctgtcagtcaacttccaaacaaaatagatcacagtgtttttattgcattaagctttttaaatgaaaatttcttttttaaagtagtattttatagtcttacagaccagtaaaaatagtaacaagtagaattgtggttttgaaatattactaaggaaaacactctataaattgttttattccttttctggtaggtaaacctgcaaccaccaaggactccaaattgtgtatgacagttggtaagccctaatatacactacataaaaacgttagggctgcctgtaatcccagcactttgggaagctgaggtgggtagatcacttgaggtcaggagttcgagaccagcctggccaacatggcgaaaccctgtctctactaaaa

SEQ ID NO: 138120 - DNA, 1406 bp, Homo sapiens
atgctcttaaatgagagaacatgtgctcaaaatggcattcactgttatgacttcatttttgatatttgttggttgtcattaattttttaatccaataagacaaagcattaggatgtgagttaggacaacaaagttttaatcctgtatttactatttttttaataataactttattgagatatcattcatataccatatgattcacccatttgaagtgtacaattcattgtctcttagcatatttgtagaattgtccatacatcaccaccatcagttttagaacatttccatcaccccaaaagaaacgtcataccaattagtgatcacctcccatttgcccccaatttccttcagccctaggtaacctactaacccacttcctgcttatcctggatatttcatgtgtatatactattgaataactatataatttatcaagttggtttgtccatttgaaacataaggaaatcaatttatgttatcttctctatagggaaaattttaggatgaatgtgatcataaaccctttgatactagtgagaagaagtaatagaagtccaaaggagcatgactggagtaaaatctaattaacttactaatcaaaatagagtgtgtagatgcaaatttactaaatgtttacatacgaagctctgatttcctactatgtctagtcatggcttaatcggtaataggctacacagtgtagtaattgacaaacatattgtattttagaatgtaaataaaatttatttctatatttagaaaatgaacaagtagaaaagccaagaattctgtgggctctttacttcaatatgagagattcgtcagacatcagcaggagctgttataatgatttaccatccaacgtttatgtctgctctggcccagattgtggtttaggaaatgataatgcagtcaaacaggtaaggctcttgatgtttctcagttttgtattaagatgttggtgtggttgggaaatattttttcctctgggaggagagaagtctagaaaagcatctctcagtagtaccatttctgtaatttgccctaaaagttttttctatgacctacaaagctactttaaatatactttaaatacaggatcaggtattttcactttcttgaataaaatgttgagttacagagattttttatgagttccatcgtgggaatgacgatagaagatgctaaaaatacatatttcataagaatttataatgccaatattttaaagaaacattgtttctaacttaaacagttggacgattgctatattattttgaaatacataaattatttttcttggtaaacagtcaagaaggttgtaactactaaggcttataaaattaattttacagtagtcttaatgcattttttaatcatagaaaataagttatagcgtagtt

SEQ ID NO: 138121 - DNA, 1034 bp, Homo sapiens
cagttatctcacatggtgcctgtgggaaatgtttccacttgtattgcatcttccacaatcttagtgatagttgtcaattggtactaatgaaacgtaatacttttaggaaagcatttaccctgtatgatctaatttgtggtcgttgttggcctgtattgagcaagttcattatttggagaagaattaaagtcacatagatgcaaagaagtattttacataattgaatttcagtagaaatgtgatagcatgttctacatgtttggttttgagtttaccttatacccttaaggtcttcagactttttgctcatttatcccttgaaccctttacaagttgacatacacagtttttcatcagaagagtcaaataattgcaaagaatataatttctaacatcgtaaatattgacttatagtaaaattataacatcagtcatttaaatgtattcagtggaatctaagtatcagggatatttgatacccatcacccatttaaaaaaataaatggaaatagaatttttttgaaactttctagggcaataagcttctaatctaaaactttcttctggatttagtaattaatgcaattattatttctacagaattaatctaactgtcataaatatattacagttttggtaaataaatattaaacagaataagtaaaatttcactgaatgaagtaggagaggtggagctgagcatctgtatgagaacccccttgtaggtgatataacttgtgaaaagtcctcttgtatcctcacacacatcccagtttgaatgctgctgacttaagtgactgactgtgccttctgcaggagattattagaatcacataatataatttagtgactaaaggcagacactctgcaggcaggccatatgggcttcaattcgagctctgagtcccagcccttccttctactaattgcatgactttaggaaatctgcatagccccccatccctgttttctcatctgtaaaatgagaataacagtttgctgttgcacaagtaaagtgaaatgatacttgtagc

SEQ ID NO: 138122 - DNA, 1052 bp, Homo sapiens
gcaccaaaaactgaaaatgctaaatatgcttattatgccataacatcccacttttggggggaaggatgtgtggaatttgacattactcataattggaaagaaatgtatattcagaacaatttgtttcaaatagaattcttggtggaaggctttttaccattctatctgaatgttgttatttatatatgtctacattagctatgtggtggaattctcatatttgtagtaattatgatgttgaaatgtttgtgatcatccatttgatcatggttttgtagaaatcaaacaataaaatcgtgtttaagaagaataaattttaaatgtaaattttatatttttaaaaaatcattaactctaaatggattttgttgtgacttattttcccttcaaacaactacttaaaataagtggacaaacacatctatacatttaaactttggttccattgtataagtgacagacatgtaatcagtattgctaaatgagtggaaccaagtgccttcccttgccctaaaacttgatgctgtaataatgaaatcatgaaataaacttattgttcttcctgttggaagaatcatttgacaaatattggcaagtactgtaactgatttagttatacttgaataaatcaaatataatcaaaatatagaccaatgagactttgtgacttgtacgcatacctcaaagtttataaaatgaattttatagaaagtaaatgatgtaaactttggtgatttaattagagttcaattgtttaacaaagaatgtgttttaaagatatattattcatgagcaaattaacttggacatacttattacaaaattatggcttttagagaaattatgggaattcttcagtaaaaatttaagcctttttgtagttttaaacactggatttcatttatgtctaatctagtttgtccattattcattagccataacaatctatatgtgaagatgtatttttctttgaaaaatattactgattttaaaggtattttccccacatagataaatccaagcagatgaggaagtttaaatttgtcacgggt

SEQ ID NO: 138123 - DNA, 1264 bp, Homo sapiens
atatgctagtatatactttcatatatgctggtatatatatactttataatatatagtatatatataatatatatattagatatatatgctatatattatatatacttatttatatattatatatacttcatatatgctgttatatatattatatattatgtaattaatatataatatattatgtaatgtattatatattatgttattatataattaatatattatatattatatgtattatataattaatatatagtatatattatatgtattatatattaatttcatgtattatatattatgtattacgtattacatattatgtattatatatagtatgtattatatactatatataatatgtaatacatattatatactatatataatacgtattatataatatattatataattatatattatataagtttgtactcttggcttccatgaaactgccctttggttcccctcatgactctggctgtttcctctctacttctttagtgggctcttgttcctttacccagtccttaaatatcagggctcctcagtatttttccctcagcccacagtatgccttgctttgggcatactcactagatgactctgtgtagtctcatgatatcaattctgcataaatcttggtgacagacacttctgtatctcccaggagtgtctggcccacatgctaagcttcctgctggacatctgtcaaatggaatacactcagaactgaactcaccatcttccctccacaaactgctcctcatccagtgttccctacttctgggaacagttctgacatcctttcaatggcaacttcttccttccctctctgacatctcttcaacttcacgtccttcaatgtacttcctaaaagttgctttgatctgccttttctcactgttcagttaggttctcatcacctctgacttgtaattggtcaccctgcctctcatcttgtctacttcaaatctgccttctacatatccttcagagtgatcagtctaaagtgtgtgtcctgattgtctttctttgttccctgtagagagttttcttctttcatcttctctctttttttttttctttttttttttttgagttgtgcagtatagatagaatgatgagacttagagggaagaataggtgtgggtccaggtaaattttatggaagtgatagtagagggttgagggaattcttttttgatggttttttatcatctctatgaggtttgagacagttaacttctcagagttcagg

SEQ ID NO: 138124 - DNA, 1040 bp, Homo sapiens
gtagttcagagtgacaagtatgagcatgggcgggtagaagaaatagtacagcagctattatattacttactccactgtcctacaattactggtttattgtctgtatctcccagtaagctatgaggtttgtgagtggatcaaagagtgccagggaggcagaagagtgaagagagcaaatagagataactcttggaggaagctaagctgtgaagagtaagagagaggaactggtctttgaagagggatgtggagatgaagagggtgtttctttactttaaaagattagtatatatttcagctgatgggatgaagccagtagagagggagaggttgaagataacgaagtaagaaggaggataattgatagatcaaggtccaggcaaaggctggggaggctaaaattcagagaacaggcaaaaatgttgcccttggatgggatgggagacacgttgaaaccagagggtgaatgcatttgtagatttgggaattcacatcttatgggttacatttattctttaaattataaacaaggtgaggtcatcttttgagaatgggggtgtgcaaatgtggatgggtagaagctcaaggaaagatgtaaaataatcaccataaggagttggagagtgtactgtctcatggtcaaattgctgggcaatattaatggcccagttgagtctgaaggtcatgaatctatagtggcattaatctgctcctatccttccagctctttcattctcttacccccacccagtctgttaagagacgtacaattcctcattccctgtttcttttcagtttatcatctgccttctgcccttttccttttccctgtgctagaccccatagtaaatcttctgaattgctctttgtctgacactctcagtacccatgttgtcatgtcctttcactacacccacagaggaagatcccattcctgagtcaggctgtaatcttcatctggatcactgatggctgcttaagaaaaccatgcaaccagacagactaaccatgccacagacacaagggtgccagcgttattc

SEQ ID NO: 138125 - DNA, 1507 bp, Homo sapiens
acatttaacagaaaaataaaaacctcgtaaaaggcctttacaggctctgaatggtatagcaaggtatttaatcaatttttctctctttcttttcttagagctgtgaaggggggaaaaaaaagcctgttttctaaacaaagggaatgcttttatgttcctaaatattaggaaatttatggtttactataattcttatcctgactttattcttattaatggcattcaaaatacatgtttaagttgtattccatgttcattttgtactttaaaagccctcaaaatagcaacaagaatatatattctgtcatttactgtcagttttgtgtcagaaaacatggaattgtaggcaagttttaaatcttgtcttcacgtgaaattcattttagattcaaaattggtagccgattacattttctcaattatttaatcattaatatgaacttttatggtatgcttatcttctttatagatgtaaagcaattatagatcagtttggtcagagaataatctctgagcatttcctcgtggaggacagttactttcctgagaacatgtgctcacgtgtgcaatacaggtaaggccccctccacccattagcaagcgaaggtaattttattgacattcctgtgtaattctgttcttcaagtaacatgcaaataaatgccaaaccaaagatatattcaatatcttacttcacttacagggtctggttttagggaagcctagcataatttcaactcctttgcttcagctggggtttgtctgtaggtcaggcattcttctttcatgagccaaggaaagattaaagccgaacttgacttggttttgggaggtgacacttttatcctgacttaaatctttgaaacgtgccttctggtggttatataactataaacgaaacttatccatggaatcagaattactgcttcactgttttgtgcattacaggcagatctccagggcagtgctgattacagatagatctgtcctaaaaacagattcagatcaacaggtaaattcagtcctatatatttttaataaaagttgtatatatgaagatgtttcggtatatatatacatggtgaactaatcactacactcaagctaattaacatatgtctttacatagttacctttttttgtggtgagaacacttaagatctactttcagcaaattttaaatatataataccatattattaactgtagtcttgtactgtacattagatctctaaaacttattctttttgtgtaactgaaagtttgtaccctttgaccaacgtctccccattttgcctagctcctggcaagcaccgttttactctctgcttctatgaatttgaagctttttgtatttcacatataagtgcaatcatgcagtactttcctttttgtgtctggcttctttcacttagcataatgtcctccaggttcatctatgttgttgcaaatggtaggactttcttcttttttaaagattgaataatattccattgtttatacatac

SEQ ID NO: 138126 - DNA, 2169 bp, Homo sapiens
ttggcacatggttgttatgctatacatttatgttgaacaaatgaactaccaatttgctagcaggtcattatcatattagacattgtaagagtctaaggcagtatcagtggagacggagagaagaggctagtttcaggaagtatttataaagcggaatcaaaatgttatagcagactagatataaaaagagatttgaggtaggaaaactgctgattatgccattgcctgacatagggattccaagggagtgggagcaggtgaggagccatgataaactcagtttgcagcatgctagttttaaaaaatgcttggctaataatactatattatttccttgagatttggtaagagcaggtattaagttcctcatgacacccacagatggtaatgatgggtggcaatagatgtgttaattcatttgtggtaatcattacacagtgtatatcaagtcattacattatacacattgactatatacaatttttgtttttcaattaagtatttattaaaagggagcttggagtctatccagaaagtagtagataatagacaattacaaatatggatacagaacttaacagaagtcagagcctaaaactatagatttgaagttatttgcctgctaatggtgtttagaactagtagagtgtttttcacccaagaaaaatgagtgggaagcatttgaaatggttttatggatgaggtagcatttgaactaatgtgtttgagaaagctcagaagggcatagtgactagggaaaattattttgttttcttcagtgattgagaatcttctaatttccttagtacattttcctttaaattattccatatgtgatttctgctttctttatcataaaattagttggtatattcattctgaagatcacagagattgaatacttgttttagtgttatttttcctcttctgggccaaattccagattttgagttttcatcttactattttcttcctcatcatcattttgctatctacacacttatatcgttgaaccaataactgaataacttgtgatttgttgatttagaaagcttagctctagaaatgttctgtctggcttgagtgttttgtatggtcagcttggtcattgtgtccctgtaactggagacacctgttacgttcctcctcaagttactatttatgaggctcagcaaggccctcaactaaatcttacgtggtttaatctttcctgccttcctcaggtttatgtgggaggggtattttcatgactctggcagcactgtttattttgctgctttctgttaattaaatgtcatctaattttttatatgaatctttataatacaaagactaaatttagatctaaaatcaatgtttttttattcattgttttcccaattatgctgaatatatgacagtaagttaaatgtctgagaggaaaacatatcttatcacttgcttaaacatgtcttgatttgagcagttttgcttaagcctagagtcttagtacttcagcgtgatattatcaggtgagtcatgttattatcatctaccagactgagacttgggcatatgtgaccatcacctcaatttctgcagaaacaaatattttatctgtaccaatagcccttgatttttctccacctagcacaacataagagatacaacagtagcagtggcacgcttgacagtgatttttttcctgggatttgggagcttatcagaatctccaggggtactttataatttcaaaaagtcccccaggtgtgattctgatttgcttccttttcctcctcctgctctgagaatcaccgtttctttagaagcatcagcataaataggcacatgtattagtatcttctcctggtatggttgagctccctaactcccaaacccccatacttgccttttgagtgatctccattagttctttctaatatcataacttttgaaacaaatgtctgtcaccaaaggtatggctaccaccaaaacaacctcgttcatgtttagaagcctacaaagcttgagggccaggtttaataatacagtttaaatgggaaccctttttaaagacttacactcaggtctgagatttatattaacactgaccccctcccccagttttattttaacattttatgatgaacattttcaaacttatactgacatggaaggaatttcaagaga

SEQ ID NO: 138127 - DNA, 1343 bp, Homo sapiens
gcttatttggtgtttatttgcttagattcttttacccttggggtcccatttcagtcccatgtgacatgaataatttgcatagctcatgtttgtttgtttgtttgttttttaaaggtatgctagtatagtaattgcctttgttgaactaaaggctaccttttccttacctttgacttagtttttatgacatgctctaaacagaggagctcttttttatgatctggtacagattccagttgcaacagatagctgaaagctaatggtctagagaccaaatgaatctctagattggtggttttcaaactttaatgtgcccaaaaattaccaggtaatcttggcaaaaatgcagatttctgttcttcaccctcagaaagtgaaattggttaatatgcttagggggaatgcagtaatttgcagttttaaagaaaaccccaagtgaatctagtataggaagtccttagattagataacactgatctgtaaggtaaaattgagggtttagtaaagggtactgtgttccatcacaaactgggggctctaggtcttaattcagtctaaggccgtatcaatatgaaactgccagatataccaacaatcaaatgtgaattttaaatagcagacagactgcttctaagaatatcttcatagaaagacatgtcttgttttgtaacttctaaggcatgagtaaaggttgtgtagcccttgaatgagaggagacttggatttccactagtgccatgaatgacagtgggcaaatcctttcctctggaccggatcctttatctgtaagatgaatgacatggactctgcagtaatctctggatatctttctagatttgacatgccttggttgagttcttagatagttctttggtaatgttcttagaaagtacttggcttttccttatttagaaataaattatcttaaagtattttatatgctcaaatgtaagccattctcacataatgcatcatcttcagtcccagtgagaaatttaaagaagttgaacaacttggatgtgcctgcttttatgaatataaattaaatagcacacagtcttcttgtgctattaattatattgttatattactagaaccccagttttccagtgaacatcatcttcttgtccatcttgttttttcagaatgcaatgattttggattctgtatatgaatctcttcctggaaaatttattctaagctataattatttatttctgtaacttgccagtttttaaaacttgacctgtaatcatagtactactgtcatctacaatattctcactatactaaattgcttaagtgatctttaaaagttttaagactcaagcaatacttgaaaa

SEQ ID NO: 138128 - DNA, 1033 bp, Homo sapiens
gtaaatactgcatttatagttcatgcacatgtgtgtaaagacttttgggatccccttcccgtgtgtgtgtgtatataaaaataaatacatgcatttagatttccctacatgtattttttcagactggcagccaccaatcaggtcaacattacaacatgacagaaaactcaatatgttgttttaaatatagtgttatgataaatgcatatgtatgaatatagttacaagaaacaaagttgaactttttgtagatagatgcaatcactgaagtcttacagtgtctcgtgacatgtaggcatgcctacttactgttggaatggaacttctgcttttcagtttacggttttagctggggtgtcactaaagcacattgatgatcaatggtcactctaatttttctcttgtaacagacctttttgtttggtttgtttttaatggaatttgatgaagagttcaaatgtatttttgtagtgacttttttggggacagtcctacctactgtgtttagtagatttcttttttagataagtcctgcaaaatttatacttgcttgcctctaggctgcatactaccctttggaagggaggtgtacagagctgtcttgccaggtgttatgttaggccttaggatggcttctgtaaactgcaccaaagatggagcctacctgacatctcagagatgtttgccatctttggttgcttaattgtccttcactaagacgtgttaacctttgggttgttaggctgccatttaatgcactggaagaaaacgtgtcatgtggaaacttattacctcccccaaaatcatggtaaagtatttaccttctactcacagctttttctttatttaaaaatttctagcttaccagtatactttatacatcacattttaaaatatggattacaagatagtcataatttgctaggtactctgaagaccactattcccatggttatactttgagtttttgcactatctaaaatgaagtcacacataatccatttaacatgtacagacagaataaacatgtact

SEQ ID NO: 138129 - DNA, 1652 bp, Homo sapiens
aatacaaatctgatcatgtcactgccttgctcaaaacttgctggttgtactactcattgtacttaagagtaaagtttaagatctttaacctggccttgaaagccttgcatgattaggcccccaactatatgcgtcctcgtttcctactgtattcctccctattcactgtgatccatctcccttagccatctctcttcttcttcaaatacactgagctagcttgcacttcaagttttgaaatttcattttctttctgcttggaatgttcttccaccctttcatgtggtcagtttcttctgatcattcaggtctcagctcagataccagttcctcaaagagactgtccctgaataccctgtctaatgttccaacccccatatcaccttcaccttatcctgttttattatcttcagaacacttaccactatctactcttatttcttgtttgttgtctctctcttgtactaggtaagttatatgacagcagggacagcatttgtctcgcatacttttgtatccccagtgcccagaattatacctggtacatagtagacctagttctacaaatatttgtgcataaaagtataaatgttgttgcttgttgccatcagcattaacacttctcttaaaactgtcacaagttcctctgtagaaggtagttgaattgaccaggtccccaagttgcttgaattctgttagaaactacagggcttgaacacctggaggtggactctcacacagtcaataagagcaatgtagcctacaaaccccacattggtggtacaatctgtaattattatctcctttgctacggaagatgatagctaacaaaagcgttgatgtatttaacatttaccatgcaccaggcagatagtaagcactttacatgtattaacccatttaatccttgtggcaagtctatgcaatagatatcattatccccattttatagtcttgagaactgaagcactgtcacacagctggtaagtgggaggaatcgggaaaggaacctaggcagtctgactcaagagttagaatgtccacattaatttcacaatcacccccacgagttgatctctttgcaatttgcacatcattactaaagttatacacttgacttctagtgacctagtaattttgattttggtgatcactgcttgctaaacaagcccactcaacttctgtcatcatgactcatatcaggtcacgcttgctgttttggcaatactggatcattgtgaatgaggctatgttgtagtggaacactcatttgaaggcttttttgatggccttgctgaatagagtaaaaccttatagataatgagtttcaagagcttgtagcagaggatgaggcctggcttgggattgttttgaacgtaactgtttcctgaggctgcaggagtcattgcctatgaaagatcatccccaacttggtttgatttaaggttttcttgacattaaaatggtatgaaagtgatacacattcagtacactcctcaacttatgatggagttgtgtcccattatacccattgatattttcagtttacaaggcaaggagcatctgtatttagctactgctcttgaggaagcattctgtttcaggccaataggaagtccatgctgagttggattccaatagcttgagtctta

SEQ ID NO: 138130 - DNA, 1066 bp, Homo sapiens
gtctctttacctttatgttatttgtacaatttgaattttcaagactgggcagcaaaatggaacaatgatttaaataaggattactcaaaacaaaaatgaatatatatcatacaggacattaaaccagagaaagagcccaagaaaggagattgagcaaaagaaatcttatagagattctaagtaggattgctgtaggctagtttgctacaccccaaaagtttgaaccaaaggctttcttttgaatttaaaaaacctatttttgaatgaatttgcttaggtatctctgtggcagataataaagatggggcaaatagcatgggtgttcagactgaaaaatgcaattttattaagagcttagtttaaattatgatgtgtttaaagagtagtcaggaaacaccagtgcttttccatcaaaagttccattgaaatgatgtccattgacatcattgtgataagctatattgaggaatcattgagttggttcggtggttctggcccttgtacaaaccaggtggtcactgtacttatgaaacatagatatggaggctagggtttgacccaaacatataagttgaccctcagtattttagaaggctttatgttttaaagattgagtgatcacttgtagtctataatttgtgctaatttattctggacccctggtacaattactaatacagatctgtttttgtcatccaatacatagttttactgtgactgtcctatagaaggttaaatttaaggacagctggaaaaactgaaagatattgaatgtatcatctacagtctcatcaagaatagaggaagctagataaatggctaagatttataaaaaggaggcactttttgggagcaagttttctgaaggctatgtgttgttttttttgacagctttttctagattaagcatgatgattatgccttccaagattgacagcagttcctaaagggcagtccatctgcccacaaccttttccttgagtgggaaatccacaccagaagccccactagactcagatacttgtactacataatttcttgaattagcagcagtgctgttattcca

SEQ ID NO: 138131 - DNA, 1632 bp, Homo sapiens
tgagtgtcagaggatcttttgatatgcggaaaggttgagtgagggagttaatcaggagtgtgtttgtgacaataccaatggaggccattggtgagcatacacatcattgctgcttgcttttttgatgtatcactgtgcttccctaatttcttacgttcaagctttctgtcttttggtatatgattttctgagtttgagactttttacttcttttggaaaatatgcatcatatttaatttgctttattgcttttatatagttgtatgactcaacagctttgatgatagaaccttagctgaagggctggggaactttaaaaaacataataaaatgaagcattaaattcaggacacagaatgttctgtgtgtaaaaatagattaaataataataatatatcaatgtcccttgacattttttctctgatctccctccagcctgtcatggccttgtgcccagtgtttatcttaaggggcagaaatggcctcttgtcacctttaggaaaaactccggttaaggcaaagacctactgttcatttttcatatatagaatcccacatgcataattttagaaatgaaaacattgccttacatattgcacttatgaatttggaagctattttcaaagattcttttatgttttcagtttctaaagcattaatacagttcagttattataattttttattttatttatttatttttttgaaacggagtcttgctctgtagccaggctgtagtgcagtggcgcgatctcggctcactgcaacctctgcctcttgggttcaagagattctcctgcctcagcctctcgagtagctgggactgcaggcgcccgccaccatgcccagctaatttttgtatttttagtagagatggggtttcaccatgttggccaggatggtctcaaactcctgacctcagattatctgcctgcctcggcctcccaaagtgctgggactacaggcctgagccaccgcgcccggccctatttttataatttaaaattagtacgaatgcatatgtatataatagttcttatgttttgacaataaagatactgaataaagagacactttcattgtgtccacacagtatatttctctcttaacaggttccctaaccctgaagcctgtcttctttcttgttatacagattagtttttaattaaagaaaactagttggatgcagttactttctgtgaaatgaagatttattttggaagtgaccttcactttattagctgaagcagtaatcagaagaattaatagaataatcaaattatatacaaactcataaatcatcttgaatagtgctgtcaaaagttcggctattagtgggtcatactgttttgcagctatgattaagaaaattacaactgctgatttgtaccttgataggaaccaaaattgcttttgtaaagcatatgtagaaggggggctaccagccaaaaattttgacaactcttagtttatctgtagtgcaatttgatgtcaccagggcaaagttgaaattcagtacatgttggtatgctctctttcagtaaaatctgactcgttggatataatatactcaattagagttatattgatttaaatgtctgttgtttggggttaataacatcaaagaattag

SEQ ID NO: 138132 - DNA, 2928 bp, Homo sapiens
ttatctcctccaaatctcatgttgaaatttgatcccccagtgttggagttgggacctagtgggaagtgttagggacatgggggtggattccttatgaatggcttggtgcgatccttgaggtcgtaagtgagttctcactctatttcacatggaaagtgttaaagaacctggcctcctctcctccctcccttgcttcgtcctcttttactgtgtgacacatctactccctctttgccttccaccattattggaaacttcctgaagctctcaccagaagcagatgctggcaccatgtttcttgaacagcctgtggaactgggagccaaataaactgctttataaattactcagcctgaggtattcctttatatcagtgcaaacagactaagacagttttatttggtaaaacttctctgattttaatctcaccaaattagaatttataacaaaacattcataacaattttaatgtttttacctcctactctgtatgtaaacagtttgatgatcaaatgaataccatgaacaagaaggtatattaccttcttattatacctactcaagaaaccaaacattactgggtatatacccaaaggattataaatcatgctgctataaagacacatggacacatatgtttattgtggcactattcacaatagcaaaacttggaaccaacccaaatgtccatcagtgatagactggattaaggaaatgtggcacatatacaccgtggaatactatgcagccataaaaaaggatgagttcatgtcctttgtagggacatcagtgaagctggaaaccatcattctgagcaaactatcgcaaggacagaaaaccaaacaccacatgttctcactcataggtgggaattgagcaatgagaacacttggacacaggatggacacaggatggggaacatcacaccaggacctgtcatggggtggggggaggggggagggataacattaggagaaatacctaatgtaaacgatgtgttgatggatgcagcacaccaccatggcacatgtatacatatgtaacaaacctgcacattgtgcacatgtgccctaaaaaaaaaaaaaaaaaaaaaaaaaaggctgagcgcagtggctcatgcctgtaattccagcactttgggaggccaaggtgggcagatcacaaggtcaggagatcgagaccatcctgcgtaacacagtgaaaccctgtctctactaaaaatacaaaaaattaaactggtgtagtggcaggcctttgtagtcccagctactcaggaggctgaggcaggagaatggcgtgaacccaggaggcggaggttgcagtgagccgagattgcgctactgcactccagcctgggcaacagagcgagactccgtctcaaagaaaaaaaaaaaaaaagctaatttcaaccattttgtaaatgactcctgcaatcttgaattcatgtactgagtgacaacacttgaatttaataaacctatattttataatatgcatccttcatttatttcatagaaattaaattttgccatgcagatacacacgtgtttgtaaacagccatccctattaaatgttttgcttttccatctgcagtttttaaaagaaaaatgattctgtgtggctgtttttcttaagtaaatctcttttcactctattagaatgtaaaatattccttctcgatccccacagtctttaattgtggtcctatctgcatagaatcttattcttcaggtgtatttaaaggagaaattaactctaaaataacccttttaaatagcacacatttattgaacaaataattagctttgatcctaactttgtgttttaacttcttgtattataaaagtctgcaaagtgtatataggcatagtgtggtggtcaagagcacagactttgaagccagactttctgagttagaatcctactgtttaacctctctgttttacaatttcttcctttataaaaaaggaatagtacctatatcatggggttattatgaggattaggaaattgatatttgcaaagctcttagaataatatctggcacatgatcagcactatatgagccattgttagttaaaataatttccaaactgtgttaagttgtgaatatatgaattcagattttttttcttatttatttattttattttattttttgagacagagtctcactaaatcccatgctggagtgcaatggctcttcagaggtgcgatcttggtgcactgcagcctcaaactcctgagctcaagggatcctcctgccttagcctcccaagtaactgggactacaagcacaccactgtgcctggctttgagtttaggttcttaggtatagtaggctggtctcaaatgcctaacaaattgagagacagacttctgattggagtgtttctaccttccatgatgttttcataatcaacacttaactgccaggctgtagtgatcctataacaagtgtaaatgtaccaagagcagagctgctactgtcacatatcttgtgtagcacctgcttgtccctcactgaattaactttcttgcttgtctttttttgtgaggttaggcctcactctttccatgcattgtggtggggcagtagtgtatgctatgatgtacttctttcctagaatatacagacgaaaacaagcattagttttctttgtgctccaaaaggagaaataaaaagtgctgtttaatgtccaattaggacatgaaagttttaatgtttgaaatgggctctttaaggtctgcaaactaaggcaatcactgtattgtacagataaatcaagtgcgactcagaagtgttttgtcatatgtttttatatgttcagtattctagccacgatgagactgcactactcatgtccagtgcagtttctgttttataatagagatttaataatatcacaatttatatgagaaaagaa

SEQ ID NO: 138133 - DNA, 1273 bp, Homo sapiens
aaataacataagtattattttttgttacaagaattaactgaaatcccatcacctgttaacaatagcacactgaatattttggtgtattttcttctacattttttagtccacacatttaaaaaagtatatagctttgtgcatcacttaacaacagggatacattctgagaaatgcatcattaggtgattccatagttgtgcaaacatcataaagtgttcttacacaaacctagatgatacaacctactatatgcctagactgtatgatatagcctattgcttcttggctacaaacctgtacagcgtgtgactgcactgaatactgtaggcaattgtgtaacataatgataagtatttgtgtatctaaacatacgtaagcataggaaaggtacagtaaaaatacagtattagaatcttatgggactttcctcatatatgtggtccattattctctgaaatattgttatgtggcgcatggttataatctcaatattttttgtatttgggcatcttcaactatagaataagcagacttacagccatcattaaaaacacacacacacacacatatatcagcttaaaatagcaacggaaggctggctagattaagaggaggtctttaaattcaggaggccttaaactgatatgcaatgtttgtaatcagttacttgggtttcaggaatttagggggtaaataccctgaaattgcatgccaaatattgtgcgtataatgtgcatagctacatttttctaggaaggaagttcatagtgtctctattagtgtctcagaggagtgtgtgactgccccctgcaaccccaccaccaaaaaaaaaaaaaaaagattaggaaccactgagatatactatctcaattgagaactgtctttactaaattagaagagtagtgtgcagtagattgacaaaaagcttctatcccaaaagtttgaaggttgctgtttgaatagaattcttataaactatggaattttggaggataaaataagcacagcaacatactttattttcagaataatttgtatatgattttaaagacaatttcctctctagttgatagtttatattagcatggagatgatacatgattatgtttgtatgatcaattatttgtttttcccttgaggaaagagtgtttcttgggataaacagaagggggtggtgagataatccatcattttgaaacctgttctctggtgatggatggatatattggtaaagtaactcaataatcttcatttttttccaggttattcacag

SEQ ID NO: 138134 - DNA, 1037 bp, Homo sapiens
gtcatagagccacgtgatatagctaaatctaggtgcagaaactgaccctgcgtcaaatgggtagatttgactagtccagatgtgtgtgtgtgaagctcgattattgaatcacaacatactatccttttgcagcactgcagctgaggagaactgcattgagatatgcgaaatgttcttgatctagcatccataagaccttgaaatttatttacaaaatgttttatgtttcttcataaaagaagtccatagtttcatcacatttcacaggcatccatgacttaaaaacaaggattgagaaccgttgttaggaatttttattatttttttaaactcagataaacattccttaagaccttataaaaggaagaggtcctaaagagtgaatacaagagtgcttctgggatttaaagacttggggttgggggttgggggttgggggctaagggaaggggaaaagttggaaaatgttgccgttagtactatgatatataggcacctcttcatataacatgcaagcagatgatatctatgccttagtcatatgggacagaaatattataagtgtagaatagtgaataagaaagtatattttggagccagaccaatgggatcatctcctgattctgctatttattaactgtgtatcattgggcaaattatttaacttctctgtgctcatcatttttggtgggataatagtacatacctcataggttgtgaggattaaaatgagctaacatgtagaagaaagtgcttttaatattgcttgcccaagtactagataagtgttagctgttattactattactgttgttactgtgattgtttttaaccattgctgctgctgctgctgctgttacagaatgccagcagggaaaatatgaggcagttagagacttagctagatttagtaatctaagttaggaatcagcgattttttttttcgtaaatagacaaatattatagtacatagtttaggtattgcaggccgcgtggtctccattgaaaccttttgtagccatagacaatatgttaac

SEQ ID NO: 138135 - DNA, 1035 bp, Homo sapiens
tatatagactgtaaggtattttatattgttttttcttttccccctgcttttaaaaatccccttcttcattgcagagtcaatacattttacggagtgttttttagttctctttggataaatcataagataaagcatctcttagaccaaaggaactaccttattttattctatgataaccattgtgtttttctacagagagttttcagaaatctaagaaacatttcctatcctggatcaacctattagaaaaccaagagaagtcttaaaattggccaaggagtatactgttggaaaatttaaagagtttatatattcaactgcatgtgaagtcagagcaacattgagatggaattttagtgtctgcccccgatgttgttgctcctctaccttaacaagttggagttagattatagatgtagattcttcaacagtacattattttttttttcttccatagtattctccttaacctcttttcttgtaaaaatctacctactattctggtagcagtacaaaaaaaattaaagttgatagaactcttttatattgttttgactggttgtctaatttttacaaatgaacaaagttaagataaaaaggctgaggctagaaaccagattttctaatatgcatttttcttgactcacctattatatttttaaacaacttttttgaaaataattaagacataatttgcaaaaatattgtgttattttctggaacttgttatatttgtggtatttcttaatttttaacaacttgtaatttgctatgacttaattattttctcattatggatgcatattcagcttccagaaaaagttggagagaatacggggcattcttacagtattctagaaacatgttccaattctgtgcccaatacaaaatgccagtttagataaataaagaatttatttcaactttctatattttaattaattgataaaggtaaaaggaaaaacaagccatgagcaaattatctcctccttacccctataacttgaatttgtgcattcgataagcattaatgct

SEQ ID NO: 138136 - DNA, 1394 bp, Homo sapiens
cactcctgtggagcttagggtaaggaacagaaacagaatgaacagatcactgggaagtgatctaaagctcactggcctccttactagtgttttacaaaaatggaatgtttagccctatttctcttttttccactaaatccctctatttctaattcatacattaaaaaatgcattttgtttttatttcttttgaagggaaaagacatttacaagttttgtttgtcatgtacagatataaaatttcagaatgtgatcttatgtattgaatcttagacaaagaaaacatttttctccaaagatggttgtaaccttaaggctgagatttgtcagccttacatatatttttattatctgcagagcctacatgtggctcagattgaatgttttttataaaaattatacctcatcctgccgggtgcggtggctcatgcctgtaatcccagcactttggggttaaatatattaaacttctgggtaattctcttgagttcttacattttatatacaagagtctgtctgtgaattataataaacatgcatttccttgacctacagatattaacttttagttttatattagattctcttcataatgctttataattccatataaatattgttttatttttatcctaaagtagtaacactattaccatctatacatcatagcctacactttttatcaccaggttatcagaataaggtatcacctgttctgtgatttctaaccaccattctatattctgttttaatataagcctcttaagcatttctcacagccagttacagcatgttctcatcaaggctactattataaatggtatgcatgcatatttatgtgaaggattcaaagacacttggaagtcatatccttgcattctaaatgatttctgcatgtgacattttaactactagagataactttcatgaataaatgtcctttgaggcttttatcaatttaaataggtagatttttttttggtaaagaaaatgaaacatatttatgttgctacctagtatccattaatatgtcaagatacaataattggagcatattggaagaaaagtcattaaaacctatatatttttctagtctagcaagctttacagttttccctaatgtaaattaattggttgatacattttctggcacattgcacaggatatatatgcagtttatagactttaaaacgctcacaatatattttccaaacagaagtcctttttaagccttaactgacctatttgtttatttgtgtggttggtaacatagtagcctttataactacattctagtttggaataagttttatatactacgtcaggtatttataacctgttaattggagcagtatcagtgggaacaaacttcacattttttttttatgtgtaga

SEQ ID NO: 138137 - DNA, 1053 bp, Homo sapiens
aggtgttaatttctttgtctttatcttgcttagtataggttgaaccatatgaaattaacattattcaaccattttagacctacattatcctatggttcaactaaatacattgtgctttttctgtctgtaaatttatgtttattgttttggaaatttatcagccaatatctttataagtattgttttttcttccttttctcttctcgcctttttggaaccctaagtaggtaagttttagaacttagcattctctcttctgtatctctcaatatctttttcatatttgctatcttcttgtctttctggctgcattctgggtacctaattaagatctgtattccagcatattgattctcttcacctgtaacccattcattttctttcttcaatattatctttcatttttagaaattctactcaccatcttctctgtcattcttgattttttttacttgttcatttttgaaattatttattcatttcatatatagatattttacattctctttctgataactctaatatttaaacttcataacgatataatattgccgtgtattgtttctactgattcatctcagtgatttgtgtgtgtgtgtgtgtgtgtgcaatgcttttccttagctgagagtttatatttgattgattttaatctggggacccaaattgggagtgcctttcttcagggattatttgtgtttgcttcatcctcacggcactacagaattaggatcattttagttccctttgggggtcgtcacttaataatgcaatacaacctccacatagtgataccattacaagatatatatatatatatatatatatatatatatttaatttcagtgtttattgctcaaagcttttatttcaggttagggtttgtattgtatgtacatggggatcagtgtttcccatggacattccccttccttcagtgtcattggttcaataacaattatttcatccaagacctagttttggtattaactggaagtgtcttcacagtatctagttcagtttactactggaagtaggtattctcaaatttac

SEQ ID NO: 138138 - DNA, 1874 bp, Homo sapiens
tattttagaaagtaatgaagtacatatactgatatgttatatgttaggttaaattattagcagggtctgaggaggaactctaactaaacacattatttctgcagtgaaatatatgaatatttatgttaatttggacaaacaaagccagagtgccttatcagtatggatcaggttttgctgctaaacatgttttgtaaaaacttatggattgcaaagttttttgaattttgaatttcagctaatcaattctgagcctgtaatagattgtgttatgtattataatatttataggtatgattgtttctacaaataataaaaaatatagcaaaattatgtatctttattgttttccaatttttctactatttcaacttttatcttgtaaaatattttctttgtacagctgctgtattctcgaggattactaattgatcttctaatcaaatctaatgttagtcgatatgcagagtttaaaaatattaccaggattcttgcatttcgagaaggacgagtggaacaggtactgtgctgatcaagaattgtaactgggcatcagcttaagttattatggtttgttttggaaagataagcaaataagattgttattttcctcataaagcagtaaattccagtcctccgtggtgatttacaaatgtaaatgcttaattaaaatttctagtgctaattttctcatggcttactctgcagcttggtgttggtaccaagcagcacacaaaaaaccaaaaagcacaccagagttactatacccaagactagtcacacaaatccttttctcccattaatcaagattttggagagggaaaagaaagaaacggtgatttttgctgtccacttgatcagattccacacagaggaggaggcccggagcctggttgggaaaaaattcttacccttatgacagctgatcagatcctgggttcttcactgcagcttccagaagagcagagctttgctatcctgctcacagcaccaaaactgtaggggccaagggaaacactccctcttaagcctctgaagtttcactgaaaaatcaactcacaaaggcagattaattggagaaaaggcataaaaatgtactaacatgtacatagggagaaccacagtgtttgttttagatagcactgctaaatttttctctgttaggatgacatgccgttggccttttaatggcatggggagtaacttggcagaattaagtaagaaagctcacaattagctctgaagttagcagagatgccattagtactgatggacggtgatgtgaaaaagcctggctagagtggaaacgataatcctgttatatgtaaaggggaaaaaagtgtaatttggaatagttatatcattaggaagcagtttcttaacttaaaatcataatatttttcaggttccgtgttccagagcagatgtctttaatagcaaacaacttactatggtagaaaagcgaatgctaatgaaatttcttacattttgtatggaatatgagaaatatcctgatgaatataaaggtatttttttcattaagtagtgctctccaattatttgacatttcttactattttaatatgcttgctctgatttagtgagccacttattactgttttaaaatgcattctaactctgcactatcaataggttagccattagtaacatttagctatttaaatttaaattaattaaagtgaaataaaataaaataaattcagtttctcagtcttattagctgtatttcaagggctcccatagccccatgtggctacagtgcagatattttcattgctgaagtggcatgctagattttaatttttattcttattatttaaatactactgtcaactggctcttcatagatgata

SEQ ID NO: 138139 - DNA, 1886 bp, Homo sapiens
gatcatatgatagatttatttttaattttttgaggaacttctgtactgttttccataatggctgtactgatttgcattcctaccaacagtgtgtgagagttcttctttcttaccatgtaatagtttcatagtttatgtggggaaataaaagtagctattgtttctagttttagatcttgaacagactataaaaaggtgcaatatattaattcacacttaaatcacacaaactcaagttattcttaggtaaaatatcgttgcttgttaattgcataaagtcatctagtttctttagtgagaagagattttatctttctaaaatattaacaatagctttatacattttctgtcctattttctgcattgtactgaacgttgtttccctttttctggtataatattaaagcaggatgaaaacttatttgttaccttcaaatgaaccaactctaatgtattcataccaaaataaagatttttttgcaataggaatctaaaattctactgatttattttgaattcttaaatttccacttaaaaattatacaagcaacaggagcttctcgaacactaatacttctaatttagatgaagcgaatacaaataaaatgtaaaatcacctgtaatttttacagtttagaggaaattactcatcactgtctacagttaagtgtgttttaggccagaattgaaacactgcccaactaaatgtggtttaaacaagtccataggtaagtgggtgggtgggtaggtagaggatttgtaattgtgctgcttcagcccatcagagccctggggcagcactccacacttctcttagccttccatttggagttacaagatgtttgccaggatttcaaagaggttctcacataagaaaaaaacttctaaacatgaggaaaaggggaagaggttttcttaacatgtttatgcttttttattttactggaaagtcttcaacaagggcccccagcagactcatcattatcttattggctgaaactggataatgtactcacttctaaatcaaacaccagcaaagggaggtaaaattatcataattggttttgatctgtcatgatccatccccaaggactgagcagcttctctctaatattggaacaaaattggagctcttaaagcaaagagaaaaagggtatttgttgttgagtagacaaccaacagtcctgctgcacaccattttatgaagttttgttcttgggtaaacatgacaagaggttgacatttcacctgtattctatagtatgtgttaacgttttaggttggtaacaaactgggaaatatatatctaccaatgtatcatattgcagcaattcaaaattgatttcactttttatattgctattttgtagaacaacaatttctgaatagtctgatttttgtaattcttatgaatagccattaaacatttattttaggaataaacagctgggtagcagtataatatatactgtgaaaatcagaaataaatggccttagaacaaagtataaacatcaaagtaaaagaatacaatgtctgcagcaagtcgtattgggtaagagaaggtgcaaatggctgaaaaataaatggtgaacacctgtgctgaataaattaaacacctgttcctcagtttttcatttgattcctctaaaaggctgttacaaggtattcataagacacatttactttgaggtgtttctttgttattactattaattgggaagcagtactagatgatatcagaatatatacctccaaactctcagagtagtatatgaattttggcaattagtgaaaaatgcatttacaaaaagcagtgttaagcagtttttattaagaaaaattatctaaaaaatattgttacattataaatgacctttggaattaa

SEQ ID NO: 138140 - DNA, 1044 bp, Homo sapiens
aatcaaaatttgatatgactagcgaccaaccttcaaagatctgaaaataaatagaacgaagttattttgactctgctgttttgaccaaaaaatgttaaaaaaaaggccctgtttttattaataagtaatgtatataacagatatacttgattctcagcagatagagggttagttgtcctagttcttaagcaatgtccaaacagccatgtccgaatgactttttcaaaatttcatataccctgacagaaatctgtaaatcagatctagtttttgatagtacagattttacacattgtttttctccccttcctttgaagttgaaacacttgttggactttctttggtgactctgaggtgatatcctttgagttttggtaagatgaaataagcatgaatttagacaagaggtaaattttctcagaaaattgcatgtttcacactgcccactttgattaaaacttcttatctgtgttttgtttaggaaaacagtgacattgtaagtgacagtccagtgtggcaagaccagatccttgaaaatgaagaagccattgctcttagcaggaaggacaaaactattcaacatgtggaagtattttgttatgccaggtatgaaaagtatttactgcaggtaaactaaattaatgactttttcactcttctttagaagaagccaacaataaagatttatgtggcattggttgctacaagtcacgttaatatgctggttttgcctgtttttaaatggaactttcagttgtctctgtttaggtaataatgataacattttaccttaacgcctccgaatttaccaagccgttttaaatatattatctcatttgatcattaaaacaattctttgctagggtagggcagatagtagtattaatagttggattttttttacagaatcctcaatggaacttaaggagattaagtagttgcagaaggtcacgtggcttggtaaacggcagggccacacttaagctccagagtggtagagctcaagattaaattccagagtttttcctagtgctccagtgttct

SEQ ID NO: 138141 - DNA, 1051 bp, Homo sapiens
tgcttagtgtgtagtttaaacccttgccaaaagactggtgctgtttttttttccactaagtaaaaacacgagaggatcaggatgtttcatcatggtgaaggagttcgtagtagcactatagaattgcactaaacttttaaagcatgctttatttttataactaatataaaaaatactagcttctatcaacatggtagatcatatgacaaaaatttttgaagagtctggaacttacagggtattaactatcaaatagaaaacttgaatttttaaaatcataaaacatcattatctttggcaatttttaatttttggttggtgctggtagaaataatatatatatgtctttttatgataatcagctttatggtatgattaagtttgattctaaagcataaatgttttgtttttatactgctatattggtcaaaagcaaaataatgtatcttgtaagcagcccctttctaaactagctgacatatttcttaagctaaaaagtgtgtgccattccccctcagaggcattgtggcttcggagttatatctgggtttaaatttcaactctagaacttttttttgtttgttctaagcattgggcagaaagttaagatattcatgtcctggttctttttcttcttctctaaaatgcatatgcatatggttatctctcagtgcaattgggagactcagatgagctagtgtgtgaacatggtttttaactgaacaatatatagtagttacagttgctcattgatggtaatttacatacaaaaagattgtaagtacttttaaaaattattttttcttgccaaattaagcagaactgctttttaaaaaatatatctggccgggcacagtggctcacgcctataatctcagcactttgggaggccgaggtgggcggatcacaaggtcaggacattgagaccatcctggccaacatggtgaaaccctgtctctactaaaaatacaaaaattagctgggtgtgcggcgcatgcctgtaatcccagctactcgggaggctgaggcaggagaatcatttgaaccaggg

SEQ ID NO: 138142 - DNA, 1095 bp, Homo sapiens
actttgccaggaatgctcctttccactttcctttttccgtcttctgcactcctcagttagggttgttagagaccctgaaagacccagctaatttctcctgttctttggagctttccatgactccctctacagagggagtgtttctttccattgtgtttctatcacagttttaaatacacttattattttaatctctttaaattcttgttacatagactctgagctctaacaggctagggattatcttgcaaaaaacgtatggcaacctctcactacctagcacagtttgttctctctctcccttcctctcccctttccccattttctttttcttttcttcagcaaatatctatggagaacctactacatgcctcctgtatcctggaaattctgtttattgaatgggtgggaagaaatatgaaatcttggccaagaagacattgttaactgtattattagtttgctattttagtcattctaagcatgaagataataggcccttgccatttaacattagaacagcttatgaatttcacaaacttatgggaatgtttggatggaagtattaaggaaaaacacaaatgatagtcattttggctttatgtaatttggactcaaatcatgttcagtattgaaatccattcttggctttgctttaatagcagagatttgacttctgacattgttgatcacagccatggaaataaccacgtgtataactgcctaccctaagtaagagttatttttgggccaaatggaggcgagtaattttattattgttcaccattggagctggcatctggtgaaaataggtttatgtttggggtagtgttagatggaaataatgcttctaaaatatcattctgaaggataataagagtagatagtgttcatagggcaagtacccttgctaacaacagaactgaattctgtgaggtagatcatgatattctcattgatagatgaggaaacaaaggctcagagaagtcaagtgacttatctgaggttgtgcagctaggtgagtagcaaaaccaagattcaagtctaagtctgtctgattgagaccatgcctgtttcattttgttgctgtattgt

SEQ ID NO: 138143 - DNA, 1057 bp, Homo sapiens
atcatttgttttcctcatagtttttggaacagatttagtatcggtcttatttgaggtatagtatgaaacactccgttgtcagcgtaagagatgctataggagtgaaagatagcctgcagattttgctgttctgaaaaatgctttgcacttcttcaggcatttattgatggaaaagtatgtttttgtttgcttccaatacctagaaaagtaaagagttatctaactctggagaagactctctgggagatgcttacccttctctgtaaatcatgaatttgagccaatacctcagagagagccacatctgttgccataatttcctctgcagcatcattttcatctcccatgcctcatgtcatttttctcattttctccagtgttttcatgatgttttggataacaggctacagtaattaaattcaaatatggcagcccaccattacattctcatgtttaacataaaatcccaatgcacagaaacaattataattccatataattgacctgttaactcatgctaaatcatctgctattcagtctcagtgcattctttaactaaaaagttagtctgtgcctgttctgtatataaatatatttaaaagtaaaataggctaaaaatcactgttggtgctcattggaaacattttgggggcgtttagttgtggccagcaaaatagggatacattgaaaggttgatgttttgtttttgcttttctaataatttcatttaaggtttggtgtaaaaagagttgataatttatcacagatactgcttttttagagcatgattatgagagctagcatgttatcatattgagggtgtttttgaaaagaacagtttgcaaacagacaggagaagagaccagaggcagcttggccagtatggtgcttaaataagtgtttcatctcatactggattttatcaggagctgaagttggtaatgtattccttgactgatttggtttttatcacattttaaaaagtactggtgaagcaggatattttcctgaccccttcatgggacttgtgaagggagcaccctgtttactcagccca

SEQ ID NO: 138144 - DNA, 1028 bp, Homo sapiens
tgcatgcatcagaaacatgaagaaataggctattagatatactttttagcagatttagtcctagttaaaatgtcataaaggaacaattgcttcatcaagtataatcatggaagataatattttataatccctttcaccttgattaacttgcattatcattttctgtaatgcaagatggaaattgttccttaagatcatattttcgagagattatggaaaaaaataaactttgtattttcttagttaagcccatttccttctgattagaaaatacagtaaatatctcttgaacatccaaagacagaagagtaagctaaagtggaattgcggaaaaaatagaagaaaatggaataaagaaggagggccaactggagtctcaagggagaggataaaaatagatatatgtggtaagggtctagaaggtgctcttcagcttgggtacagaattgtcattttcagggtattttgccatttaaaaagtcatttaaatgacagttttgtggattatagacaagtaccattggttgaacgttaaaagtcgtcccagtaacattacatctcactggaggtgacttatctggaagcctgtgtaatctgcagcacagcagagccaagaactcaacagaagagcagtcaagatggaagttataagatctatatgataatattgacatgcttcatacataggggaatccctgagatcatcacttagaacatattcatcctcattttaaaaataattctagcaagctcagcatattagaaccacccccttagaagatacaaggaatgttatcaacttctgcaaagactatgtttggtggggttgctattagacatacaaatgacagtttgtataggaaagggaagagaaaaacacctaaaatgcaaacttacatcaaacatcacaaaggcctgataacatttagtgtagtgacaaatactcatttttcaggtcattcaacccacatttactgagaacctagtcccttcccttgtgaagtttactgtattgcctattctcagga

SEQ ID NO: 138145 - DNA, 1028 bp, Homo sapiens
gctaaatgagctacagcattcagcctggaaaatgagtcgagcttttaacttacgtgtaaacattttaaatataatactgtagtcgcctgcctggaccttccacccaagaactacaacacccagaatgcactgttttcttttccgccttccacggagggaatgcctaacttgatctcatttccacaagtaatagtcacatgacacgtttcccgtcaagatggcggatactctcccttcggagtttgatgtgatcgtaatagggacgggtatgtgtagcctggtgcttcctggacaaagtttaggaagactgtcttgtttctgttttttctgtcagtggcgagttttgggacaaacatcgtgggtcgagagtgggagggagaactgaaaggaagtgaggtagtccggagtcagcgcgggagttggcagttacagggaggggctgggacccgcagtgcttatcgccatttgagtaggggttgatctggtcgatgctgattgctgaggttggttgctgcggtgattcctgttaatttccttagagggaagtggatgtgcagtgtcatgaaatggagggtcgggattttatcaacggagacgactttggcaagacattatgattccttccttattgatttcaaggtgatattccccatcattttgtctcgccatttcataggactttttcatagatttgtatgatcttagcatacatcgcagctcagacacagcttaatcctcagttttacaagaaagatgctcaattattgcccatgtgcgtatgaatttactagggaaagtaaacggattctattttgttgagaaacctagggaattttattttgttgaggtagccattattcctgctttatggtgcttaaagcatcttgctttctaccatcaataactaaatgtgctgagaataaggtcctgagttccagttcaggtgtgtgaccttatctaactcttgttttcccgtcgtttgttcttcatgttttgggtggaaccagaaactcctctgcagtttctag

SEQ ID NO: 138146 - DNA, 1109 bp, Homo sapiens
ccagagaataagaagcaggcactgaaagaaaaagagctgaggaacgatgcctacaagaagaaagactgacagccttgaagcattacgacaaagccaaggagctggaccccagcaacatgacttacattaccaatcaagcagcggtatactttgaaaagggcgactacaataagtgttgggagctttgtgagaagtccattgaagtggggagagaaaacagagaagactatctacagattgccaaagtgtgtgctcgaattggcaactcctacttcaaagaagaaaagtacaaggatgccatccatttctataacaagtctctggcagagcaccgaactccagatgtgctcaagaaatgccagcaggcagagaaaatcctgaaggagcaagaacggctggcctacataaaccccgacctggctttagaagagaagaacaaaggcaacgagtgttttcagaaaggggactatccccacgccatgaagcattatacggaagccatcaaaaggaacccgaaagatgccaaattatacagcaatcgagctgcctgttacaccaaactcctggattccagctggcactcaaggactgtgaagaatgtatccagctagaaccgaccttcatcaagggttatacacggaaagccgttgccctggaagcgatgaaggactacaccaaagtcatggatgtgtaccggaaggcgctagacccggactccagctgtaaggaggcggcagacggctaccagcgctgtatgatggcgcagtacaaccggcaccacagccccgaagatgtgaagcgacgagccatggccgaccccgaggtgcagcagatcatgagtgacatagccatgcaccttatcctggagcagatgcagaaggaccccccaggcactcagcgaacacttaaagaatcctgtaatcgcaaagaagatccagaagctgatggatgtgggtctgattgcaattcgacaatgacttgtccatccccgcttcccttcgccctcatgcggaaagaggagcggggaccgcggcaagcagcacggagcggaagggagagcagggggagagaaggcctcacctctctgtatttatacgtaagcccaggga

SEQ ID NO: 138147 - DNA, 1057 bp, Homo sapiens
ggagtcagggcgagaaagcgagggccggaggacccacgatagagacagagtgaccatggctgtctccgcatctccagtgatctctgcaacttccagcggcgccggcgtcccggggggcttattccgggccgaacccctgtactcgactcccagagagccccctcgtcttactcctaatatgatcaatagtttcgtggttaataaccacagcaacagtgccggaggcggcggcaggggcaacaccaacaccaacgagtgccgcatggtcgacatgcacgggatgaaggtggcttcgttcctgatggacggccaggaactgatctgcctgccgcaagtctttgatctttttctcaagcacctggtgggaggcttgcacactgtgtacaccaagctgaagagactggatatatcccccgtggtgtgtactgttgagcaggtccggatcctccgcgggctgggggccatccagcccggggtaaaccgctgcaaactcatcaccaggaaagacttcgaaactttgttcaccgattgcaccaatgccaggtgagacactcgtttcttggctctcccacttctcttacccctttggcctcttctgcatgcctcaccaccctcatccaactttgtttgtagagtgagtcttaactagtttgcctctattcttcacgctgtaaatcggtggggaaagaggactagaagctttcattaatgctggtgccttctagtccacgctcagtgcaagggcttcggtctaaaaaagtcccgcaaacttgagtttgcagtcctctattgaaactttccagccttttgcccatatcttgcatggcttttggctgttcgtggttatttgttaatttctctatttggttttctttcctgctcttttgtggccgcacgggtcggataggttttcttctgaacacggataccaagggctttctctgggggctggctgagctgtaaactgggctcctaagctggcaagccagaacacagcatttggggcatgcagggggtgggaagtctagaatccatcccagagggtgattcgatcccc

SEQ ID NO: 138148 - DNA, 1009 bp, Homo sapiens
aaaactagcttgtaaattcttcaacttcaggaacagtttgatatgtcattttatcattcacagtgccaaacatagtacatggatgtaagtactgaaaatgctttcagtttgttggtttgacagtgtaactatgatttattataattaaatgtatttattctgggaagtgttcatattttaagaaaatctattgctatactttaagggtatgtcagaataacatacccctaaatagaagcctagaaaattactgttttgtctcaggcacagttgttctgatattaatgctttctactttctagatgtatgaccatctaagcctcagttttttcatctaaaaatgggaataatattagctacataaatcatgaggtttttaagattaataagcctcatgtacataaagtgcttgacacaataagatcatagaacattagctcttatttctgaaattggtgctcacaccaagaaatgtgaacacacacatatatgtacattcataacacaagaaaaagagcaaattgcagaataaaatgaaacagttttcagaaatgtttgcaaccaagactaaattaactggttgactgaatgacactgtgtgcacttcattttctaggaaattcttgtatgttgactttctaggctgatatggcagctggtaggccatttattactagttctgttgtggaaaattcagtcttgtgtgtcatttagagtttgtgacacatgtaccctcccaaggcttaatgagttgtctgcagatggaccgttatttattacagtcatgtagaataaaattgattgtcttctaaaattaatttttcatttgcctccagccttgctttaatagggcacacacagttgcctgtttgcagaaatactgtttaatcacattaatatctcagccccccaggctgaagaagatagttgtatgaacgaacagcaaaatctgtatctttaccttctttttatgattaaattatgcaaataacttatctcctgcccttct

SEQ ID NO: 138149 - DNA, 1036 bp, Homo sapiens
cttctttattagtctggctagcagtgtatctattttgttaatcttttcaaaaaaccagctcctggattcattgatttttgaagggtttttcatgtttctatctccttcagttctgcttttatcttgttatttctagtcttctgatttttttttttttttgatagagtttcgctctgttgcccaggctgcagtgcagtggtgtgatcttggctcgctgcaacttccgcctcccaggttcaagggattcttgtgcctcagcctcccgagtagctggaattacaggtacatgccaccatgcctggctaatttttgtattttttggtagagacagggtttcaccgtgttggccgggctggtcttgaactgttggcctcaagtgatctgcccacctcgacctcccaaagtgctaggattacaggagacatccttttgtttttaaaggagccaaagaagagtttgaatatatgggaatagtagtaatcaattttataaactctggctttaataagttttccacaacatgtcatttgtacatggtgatagaacttgatatacaaactcatttttcttactttataatggtaaaatgaatatttttattatttattatttacacaaaatattttaaaagatctgtgttaattggttgagatagtccccagatctctgattcagttacaccatcgagtgctaccaatatcacttgagttcttaaagcacttctacagaatctgagggctaccggacacagattttaaaacacaacatggaacaattaagtgctttataagtattatcaagaaagttggacaataatttgaatctttttttttctttattcaaaggctagaataaaggatacataaaacaatctgattatccatcaaataggggattaggtaccctttatgcaagaggcttatcttctctgagaattgaaaacaaactcagagaaatatatcatctgttgttgcattataggtagaattatggcatcactttcttaaaattccaaatttttactgttgaactttta

SEQ ID NO: 138150 - DNA, 1033 bp, Homo sapiens
gattatttttcatcataacatcataaaatttagatattagtgaaaagctggcaaacttaaattatctatttttaagtctcgttttccttgacctttctgcagcctttgaaaagattgacattctttccttccttgccttctgtgacaaaataatattatttcctctttgatttctcttcatttgttgggcccaatttacgcccatgcctaaggaataataaaattctgttcttggctctctgttcttatacttctatattcattgccaggaagagttcatgacttaaattaccacctcgtcagaaatgatccacaaacttcagaaacaatagcttcttttcttccctgtcttaaaattccagctgccttcagtattgtctacttcatgtatcccaaactgaactcagaattcccatctctaaatcagccttcataattgttcatattaatattaactgcttatataataagtatatatattcttaagaattgtgtatagcatctctatgtttccaatttaagaatctcagggttctcattcatactttctgacttttgaccccattttcaatcatttacctaatgtaacccaaactttccttttcaacatttttttccgaattttcctctttttattccccttccttattttctatttcttgtcaactcaaatgtaccacaactataatgctttgatagccttctaagtgtttcagtttcttcttctggtttatctttcacattgcttataggacactcattttctttttaaagttgtatggtatgatgttattctccttaagaatctttagtaaatccttaagagacaatttagttgcccttagtaacaaatttgaacacttgagccaagcattcagccttttcatttgattggttatcttatgtctataaaactttatctgaccttcagagttttaatttgcacatcttcagttgtcacctatgtgactcacaaattaatattttcagtttgatgtgatagaagaaggatgaaaccggtaaatcaagttac

SEQ ID NO: 138151 - DNA, 1043 bp, Homo sapiens
tgaaaatgaccatactgtcaaaagcaatctacaaattcaatgcatttcccgttgacaatcttatcacctcttaaaagctgcttcccaaattcccttctattattttgctattgctcaagttatcaatacgtattgcctttttgcatgttgatgtgcaaatttaacaatttttgaaaaccttcaacaagactagtgagattcagatttgccatctaaatagctccagcatacaaagttctaaaccatttttgacagaaggcctaaataatgatttttatgtcttcaggtcagaaattctaggggagcttggtataacgtgtgactcccagaagaatgtgttatttgtgtctgaaaaattatttttgccttaccctgtgtttgcagtcatcattggtttaagaaccagatggattttgaaaaccaggaaactctgggatgtaagagaagaataaggaaaggcaacatctataagaccctataagttacccagacatctggttggattctttatgcttactgtatcagggcaatgatgccagaaaggaagtgacacagatatttgcaaattatattatttgtaatttttgacacattggttgataagcttctaatatttatagaaaaatctattaaatcttcataaatatttttgtaagatgtattgggtttctaaaagttttctatggatattatcaatcagtgaatattaagttaaaaagaatcagctccagaaacaatccttgggtataatgggaacatcaaacttcttgttagatgatcagctttaatcaaaatatattctttgcatgtggcatttacattttagatcatagggaaattggagttctgacaattggctaacaatttctaatatgttttgtttagataaatttgaccatgtattaaagatcatcctacagagatgtaacagtgtcactttaatattcttatgcctacttcatagtaaggcaaataaaatcttcagaattgttgctggctgcctaaacatgggttactgtttattaatattttctttttcttgt

SEQ ID NO: 138152 - DNA, 1063 bp, Homo sapiens
attttttctgcttttgtttgatatggtcagctaagatgctttctctttcttttctattcaggattcttgggatggtggaatttgctctagttagtttggttagaatcaccacagatatggatacagatcggatagggtctagatagccttaaactcagacaaattctgcctcacagatatgcaatatactaattccagtctgctcctttaagaacacatgtcattggttattaggacaatcaggcaagagaatgtggatagctcactataaaccatccatagggatggttgagtactaatgacattttggcatattggaaaaaaaatatttttcagaataaagaatcgagtattgatttcctcaccatcatacaattctttttaaattttttaaatcagaaagttgttcattttttaagcttggctttgcaggttaggttttttgaaagtattcaggcacattctaaacttcccagatgtgaggaaattgaaagcacacaatgtttactgacatgtaaaactctgggacacagttttcattagttaaatttaaaatcttttcttttcttttttaccctttgtaaatgtgaccagtgaggcagattaaattagctagggaagtcagaggctaagggtcattttgcctctcatctgcacgtgcaatatcaactgaaataagtgattatttttcattacaatcaagattattatctattgtattttcataccatttcctatagtgaaattatgcgttatgctttttaaatctggtatcttaatagaaactcacgttagaaatatagaagctagccgtgagactgtgttcttaaaactaatgatctagattcatgaaaggataggaatacttagtttaatacattttccagtatatatatttatttgccatctttaacttcaaagttgtgttctttgaacaacttgttctttaggaatgaaataatctttcagaaggtacccatgttagtggtgacaagacccattaaatatttaaatagtgttattaggtacatcataaaaatacatgtagaaattgtctatttta

SEQ ID NO: 138153 - DNA, 1034 bp, Homo sapiens
gatcttttttttatttcaattgagtcttgattttcagtttatatacatatacgtgcactcatacatttgacccctgaattttatgtttttgtctacattctctttaaatccaatatacactggtttggtaatagatcagtatgtcttcgccgattaaaggcatttgaattataacattttgttcataggaggatgtaaaccctaaccttaatcagtgcatttcaggggacaagaaccaaacaaaagagaaggaatttcctaataattcatacatagcaagctttgagaaaaatctccatgcctttgcctttgactttaggttctaaataatatgacatacttccctaaggaacatcttctatctgtatcccacacgcctactcactccttcaagaaataaaactgtaaaaaaaatgtcgtttaaagtagaatcctgaaaaataaacagtaagcttctagtgtaatgtttcagaggaaagaaagatcttgtattcattgcaatttatctggaacacaacttatttgactttctgtggtcctcttgaaggtgattaatcaccaattttagagcaccaagaattgcacaatattaatgtttaattagcaaaagggaagcacctggagtgtggaggaagcgactctaagattagactatatgctttcaggttataacaaaagacaaatttaatgaccatactatttatccttagggaaaatatagttgataagttgttagatagcctcaactcaaggagagtacaagcagtaagtaaccttttgcatgcttatttcattgccgactttttaccaataaataccaatgaggcatatttgtgagctttcctatccttccaacacaaagggaggcagattgtgcttgggatgatgagacagatctatgacaccatcagtttgatgtgtcatgctttgcacttgacatgttgcttctcaccaaaataaattgatttgtcttcccccacctaattatcttcttcgtcaaccttcttgtattcaaatggaaaagattattctaa

SEQ ID NO: 138154 - DNA, 1078 bp, Homo sapiens
tcctggaaccttcactaaccagatccaggcagccttccgggagccacggcttcttgtggttagtgaccccagggctgaccaccagcctctcacggaggcatcttatgttaacctacctaccattgctctgtgtaacacagattctcctctgcactatgtggacattgccatcccatgcaacaacaagggaactcactcagtgggtttgatgtggtggatgctggctcgggaagttctgcgcatgcgtggcaccatttcccgtgaacacccatgggaggtcatgcctgatctctacttctacagagatcctgaagagattgaaaaagaagagcaggctgctgctgaaaaggcaatgaccagggaggaacttcagggtgaatggactgctccagctcctgagttcactgctactcagcctgaggttgcagactggtctgaaggtgtacaggtgccctctgtgcctattcagcagttccctactgaagactggagcactcagcgtgccacggaagactggtctgcagctcccactgctcaggccactgaatgggtaggagcaaccactgactggtcttaagctgttcttgcataggctcttaagcagcatggaaaaatggttgatggaaaataaacatcagtttctaaaataaaataaaataaaattacttcttggtttatacatattaattgccatcatttagcattgttttccttttctgtttacttcacgaaaaacatttccagaactccaagttgctagaatagtctgattggtcaaagtttttatgaggccagtatagtagatcctaatagagttatgttgccttgacatttattttgaatatagggttggctttttcataccacaagcaaggcttagtcatccttgacacagttcccagttctctgcctcccgtagttcctcaagcagatctatccatatatctttcttatacaatcacctcctactgaccacatctttatgggacagctatatactacctgactgatccccacatcctacacaggctttgcagataagccatagcggtcacttttcagtcacagtgggaatcca

SEQ ID NO: 138155 - DNA, 1078 bp, Homo sapiens
tgttttgtaaaggtaggattcttcccccttccttttcttcttccctttgatgaaaagcttccctttcatgacgtatagctggcagcaaacttaaagttgctgtgcgtctgaaatacaggaatgggaaagaaactccgaccaagcataaaacacactcattttctagagctcagtcatttgctaagggttgaaataaactgtgcacccccactccctgccccttccccctggctccttggcctttttgtcaccggactggattctgaaggacgtccaggtaatgctgggtttcagcagctgaaagccctggcagaagggattgcaggtttcacattcttccttctcttggtattcaaaactttatttttttttttgcgagatagaaattcttgatagagagcttccagactgctggtggcagggaagaaatctggttaagagattcagaaagcagaaaattctttttctctgcgcaagcagtccacaacagcatttagctaggatttataagattcttggtggagcaaggggaggcacatcgacaaaggagagtttatataagccactggctttgagctacattgaaaaaatatgtatggcagccacgttttcttagtgggaaagaaaattattcagggaatgaaattttgaaggctaattctctccaagaatcttgcttcacataatttaaaggaggtgtcatccctgtatttgttcactgaagagtccacgaactttaattagtcacctactgtgccagacaatgtgataaatggtgtaattgaacataatggagagaggaattaatttttgttaagaggttgagaagaggttcataaaggagagagaggtctgtggctttaaaaatagtcattcctagtcagtggctagccaagaaatgtatctggaaggtcatgccctgtacagaataagtaaggaagggcatgagggcttgatgtcttgttacaaagtttagaggtatatgtgtgttttgtagacctagaacatctttgaatatttttttccagcaaattcgttaaagtaacaacaacaaaatagcctgagaaaattgggcaat

SEQ ID NO: 138156 - DNA, 1046 bp, Homo sapiens
agtgaaatggtgtgtgatcttggctcacagcgacctctgcctcctaggttcaagcaattctcctgcctcagcctcccgagtagctgggattacaggcatgtgccaccatacccagctaattttgtatttatagtacagacagggtttctccatgttggtcaggctggtctcgaactcccaacctcaggtgatcagcccatctcagcctcccaaagtgctgggattacaggcctgagccactgcacccggcccctgaatgctctcttttaattaatcattgtaaatacatatggatctgtgtgttcctaaaagggtaatgacatgccatactggccacatcaagcatgtttacaaagtataggctagtaactcatatctattttaccaaaacatctctaaaaactgctctcctgtcttaatcatattttgatcttgactttttttgtaacttttctgttagaattatctattcacaccttggctcagtatgtgctttttgttgttaataatttcatgtgtatagctttttagaaacttttactgaaagtctgtatttgcgtggaaatgaaaccaattaagaaatacaaatgacatttctttccagcttgtcagaaactgtgagagagaaattaatgacaaaagtttattgctgtgtcttcttttcagtatgcttccttcaaacttcatggcagtaaatgccaaataacctcatgtatcaaacttaaagcaagctgtgagccaggtgtcttcaactgcaggtcatatgctgagctacattcatcattttaatcttttgaattaaattctctaaaattgaataaacctcagtgagactgtggttgctaagaaattctttaattctctgactcctgaattctgtaataacttctgcctagaataaaaatggagaaagaataaggtgcaggttttggcccatagaaagcaaacaatacatgttttgagttaatttagtgttagcaacttgagagcagggaccagagccattcttttacacaaaacacaaaaatttagttcaatttttgtat

SEQ ID NO: 138157 - DNA, 1032 bp, Homo sapiens
acacctctccacctttttaatggaaattcaacagaatcaaagccacaatatagaaaatagataaaaaggctagtttctcaggatcatgtctgtaagccaggattcctgatccagagacaatggccccgatgggatggagcccgaaggcgtcatcgagagtaactggaatgagattgttgacagctttgatgacatgaacctctcggagtcccttctccgtgacatctatgcctatggttttgagaagccctctgccatccagcagcaagccattctaccttgtatcaggggttataatgtaatcgctcaagcctgatctgggactgggaaaatggccacatttgccatatcgattctgcagcagattgcattagatctaaaagccacccaggccttggtcctagcacccactcgagaattggctcagcagatacagaaggtggtcatggcactagtagactacatgggtgcctcctgtcatgcctgtatcaggggcaccaatgtgcgtgctgaggtgcagaaactgcagatggaagctccccacatcatcgtgggtacccctagctgtgtgtttgatatgcttaaccggagatacctatctcccaaatacatcaagatgtttgtactggatgaagctgacgaaatgttaagccgtggattcaaggaccagatctatgacatattccaaaagctcaacagcaacacccaggtagttttgctgtcagctacaatgccttctgatgtgcttgaggtgatcaagaagttcatgagggaccccattcggattcttgtcaagaaggaagagttgaccctggagggtatccgccaattctacatcaacgtggaacgagaggagtggaagctggacacactatgtgacttgtatgaaaccctgaccatcacccaggcagtcatcttcatcaatacccggaggaaggtggactggctcaccgagaagatgcatgctcgagatttcactgtctccgccatgcatggagatatggaccaaaaggagcgagacgtgatcacgag

SEQ ID NO: 138158 - DNA, 1312 bp, Homo sapiens
caccccgcccccaccttcgcctccccctccgcctccgcctgcggtgcacattaaagatccaaagtcatgactgactccaagtatttcacaaccaataaaaaagcagaaatatttgaactaaaagctgaactcagcaatgaaaagaaagaaaagagaaaggaggctgtgaagaaagtgattgctgttattaccgtggggaaggatgttagttctgtctttccagacatagtgaactgtatgcagactgacaatctgaaactaaagaagcttgtgtatctctacttgatgaactatgccaacagtcagccagacatggccatcatagctgtaaatagctttgtgaaggactgtgaagatcctaatcttttgattcgagccttggcagtcagaaccatggggtgcatctgggtagacaaaattacagaatatctctctgagcccctcctcaagtgcttagaggatgaggatccctatgttcggaaaacagcagcagtatgcgtggcaaaactccatgacatcaacgcccaaatggtggaagatcagggatttttggattctctatggggtctcatagcagattcaaatccaatggtggtggctaatgctgtagcagcattatctgaaatcagtgagtctcacccaaacagcaacttactcaatctgaacacacagtacattaataagctgcggacagccctgaataagtgcactgaaggggccagattttcatgctggactgcctgtctaattacaaccctaaaaatgatcggaaggctcagagcatctgtgagcgggtaactccccagctatcccatgccaactcagcagtggtgctttcagcggtaaaagtactaatgaagtttctagaattgttacctaaggattctgactactacaatatgctgctgaagaagttagcccctccacttgtcactttgatgtctggggagtcagaagtgcactatgtctccctgaggaacatcaacttaattgtccagaaaaggcctgaaatcttgaagcaggaaatcaaagtcttctttgtgaagtacaatgatcccatctatgttaaactagagaagttggacatcaggattcatttggcatcacaagccaacattgctcaggttctggcagaactgaaggaatatgccacagaggtgaatgttgactttgttcgaaaagctgtgtgggccactggacggtgtgccatcaaggtggagcaatctgcagagcactgtgtaagcacattgcttgatctaatcaagaccaaagtgaattatgtggtccaagaagtgattgttgtcatcaggga

SEQ ID NO: 138159 - DNA, 1364 bp, Homo sapiens
cctaaagaaattcctgaggtaaaggctgaagaaaaagcagattctaaagactgtatggaggcaacccctgaagtaaaagaagatcctaaagaagtcccccaggtaaaggcagatgataaagaacagcctaaagcaacagaggctaaggcaagggctgcagtaagagagactcataaaagagttcctgaggaaaggcttcaggacagtgtagatcttaaaagagctaggaagggaaagcctaaaagagaagaccctaaaggcattcctgactattggctgattgttttaaagaatgttgacaagctcgggcctatgattcagaagtatgatgagcccattctgaagttcttgtcggatgttagcctgaagttctcaaaacctggccagcctgtaagttacacctttgaatttcattttctacccaacccatacttcagaaatgaggtgctggtgaagacatatataataaaggcaaaaccagatcacaatgatcccttcttttcttggggatgggaaattgaagattgcaaaggctgcaagatagactggagaagaggaaaagatgttactgtgacaactacccagagtcgcacaactgctactggagaaattgaaatccagccaagagtggttcctaatgcatcattcttcaacttctttagtcctcctgagattcctatgattgggaagctggaaccacgagaagatgctatcctggatgaggactttgaaattgggcagattttacatgataatgtcatcctgaaatcaatctattactatactggagaagtcaatggtacctactatcaatttggcaaacattatggaaacaagaaatacagaaaataagtcaatctgaaagatttttcaagaatcttaaaatctcaagaagtgaagcagattcatacagccttgaaaaaagtaaaaccctgacctgtaacctgaacactattattccttatagtcaagtttttgtggtttcttggtagtctatattttaaaaatagtcctaaaaagtgtctaagtgccagtttattctatctaggctgttgtagtataatattcttcaaaatatgtaagctgttgtcaattatctaaagcatgttagtttggtgctacacagtgttgatttttgtgatgtcctttggtcatgtttctgttagactgtagctgtgaaactgtcagaattgttaactgaaacaaatatttgcttgaaaaaaaaagttcatgaagtaccaatgcaagtgttttatttttttcttttttccagcccataagactaagggtttaaatctgcttgcactagctgtgccttcattagtttgctatagaaatccagtacttatagtaaataaaacagt

SEQ ID NO: 138160 - DNA, 1006 bp, Homo sapiens
cttttccccttttgtaactgcagatatgtggtaaaattatattagaaaattgaattaatattaaatattcatgtattcttcaaaggatactttgaaatatttatatctgaatgaatgatttaaatttttgttttactaactgtactattttttcacatagttcagtatcaacttttgtctcatgttgacattacccaatatttatttcaactccccttattatgtagcccattttgcttattaaaagtaaaacatatataaagttcccactttagtgcctggcacacagtaagtgatcaacaaattttacctgtttttatttttatacatctatatgtagctataagttatcctcatgtcttactagattattcatatagagaataaatatcttgtaacattaccatataatttaccctcaaacactccatctgtatcattttcctacatatatctagaaaaaatgttttgaattggaatagaaaagaaatgcactaccatttatttattgcttactaagacaatcatcatgagattgtaatattgttgtgggatgaatgtttgtgactccaaaaaattcatatgttgaaatcttaatccctaatgtgatggtatttggagataggacctttgggaggtaattaggccataagggtgagactctcgtgaaggcattggtgccctttacaaaaagagatgagaaaaagcatgtttcttctctctattctccatcatatgaatgagaaaatgaccatctgtaaatgaggaaaagtgcccttaccagacaccagatttgctgacactatgattttggacttactagcctccaaaactgtgagaaataaatgtttatttttaagccattctgcctatagtattctgttagaacagaccaaactgactaagaaatatatcatttactattcacagcaaaactcaatgagtttggtcttgttattaatgaaattttacagataaagtgaagtacagagaactttaatagcat

SEQ ID NO: 138161 - DNA, 1101 bp, Homo sapiens
tgaagaattcatacagatgactgcaaaatgaagacctattttcaactcctttttctcccttctagaaaaatcaaattgaatcttttacttacctcttataaaaaaaatagaaaaaagaaaaaagttcatttatttatttctacatagcaaaactgaatgtcagaagtaccttctgaccacacaaaaagtctgtatgtattggttgatggtcctgccccctgaagatcaagctacacatcagttttacaatataaatacttgtactaccttaatgaaaaggactccttaaagtgccatttgctaatgattaatacactgttcggggtggccagttttttatgtatgcaaattgacgattgagcacagtcaggcatttgtattaaaaacgaaaaatggaaaaacaaattcaaaacctattcaaatgtgttctagttcaatttgttcagtataaattgtcatagctggtttactgaaaacaaacacatttaaaattcgtttacctcaggatgacatgcagaaaaatgggtgaaggataaaccatgagacatggcctcactagtaggattggcctcttttacttcatgtactctgacccatggtgacaatgacacaccctggtggcatgcccatgtatgtttgtttagcattgtctgcattgttctagagtgaaacaggtgtcaggttgtcactgtccacacaaaattttaataggaaacctttaccaatggagcatttttggactctctctttttaaaaccttctgaaccataacttggagcctgcagaataggctgtggctgtagacttcagcacaaccgtcaacattgctgttcaagaaattacaatttacatccattccaagttgtaaatgatagtatttttttccaattaaaaacacccttaagttaaaagtaaagactgaaatcatacagtgtcttctttctgatgatagtaaaattaagctagatactaataatgcaaaatttaaaaactcatatttttgaaaattaaaagcatttacttttattaatcctcaaatcaaaaatcccatgatatattttagaaaatttttgaaacaaaagaatataaaatgtaatgttt

SEQ ID NO: 138162 - DNA, 1035 bp, Homo sapiens
ccgggcctcagtttccccatctctaaaatgggctacccttcctttctcttgactagttccctccctgttctcgctgggccactaggaagtgaaatcagtgcctaaccgcagctgaaagtgctctgttaggctccagtcaccgcgccgggcatgctcagtagctggggccggctcggctgcgggagtaggaagcagctttgcgcgcccgggcggccgatgcgggcactttgaagaatcacgtgtgttgaggccctcttaaagagataggcacctacttttccctccaccctaaacaccgccctgagggcggcggcgaccgtggtaattgcaactgctcaggggcagggcttgccccagcgccgagtagtggcaacggcgtggttgcgtcgggggtgcctgggagcctggagtcccgggggcctgaaatcggcagcttcccgggcagacactctctccctcaggaagaggtgccgccgagtcagcgcggggcagtgtgagcgccccgaggtgctttctcagttgaggagaggtggggttacagggcacaggtgacagggccggagaaagatggagcagcccggggcggcggcgtcgggagcgggaggcggcagcgaggaacccggtgggggccggagcaacaagcggagcgcggggaaccgggccgccaatgaagaggaaacgaaaaacaaacccaaattggtgagtgctcccgcagcccccgccggccttagggacagggagagccccgggatcctcctgccattgaacacgggggcacccggggccccctcccaaggatgaccgcgacctcgctgtgcaactcggggagccgctaaaggagtggccacgccgaggcgcggagacggcgtgggggcggaagagcacccccttctctacttaacccctttctcactcttgtcagcccgggaggcggtgcgggaaggagaaaggcccagccccaacttggggacaccccgagtactgggtagggctgttgtttgtctaacttgtgggcgcaaacctttgcgcgattcc

SEQ ID NO: 138163 - DNA, 1225 bp, Homo sapiens
cttgagccactgcacccagtcttgatttttaatgataaggtatgagcaacaatgatttcatttatgcaatacaggtttactgagtacctactgtgtgctaggcataattctaagggttggtgatacaaagatacttgtagtctactgagacagacagggaagttaattaatgcttaaaatgcaatgtgagccagacgtggtagcttgtgcctataatcccagctacacaggctgctaaggcaggaggatttcttgagctcaggagtttgaagctgcagtgagctgtgactataccactgtattacagccttggcgacagagaacccatctctttaaggaaaaaaaaaaaagcagtgtgataagttgctataggaatatgcatggttgggggtggtcatggagaggcatctacgtagaattgcatgcttgagtaagaaaaggcttatcgcagtaggtgacatttgcagctgaaggctgaagaaaataggtgagggaaaggcattctaggttgaaaaaacaacatatacaaaggtaaacagataagggagcatatccaataaagaaagttcacttagatgaatatggctgaaacaaagggtacacatggtagacttgctagaaaagagacggggtccggatcatgatggatcttgtatgccatgttagagtttcaacttctttctgaaagtaggggtaacccattaaagagattaaggcggagaatgacctgatcagatttgggtttcagaaaaaaaagtactttggagaatttcttggaaaagcatgctagaatggaggcaggaagaccatttagaaggagcagagtagcataaaagagtttttgatatttggagacctggattccagttgcagcttatccattcattcatttaccagctcatccatttactaggtgtttttctctgcacctcagtttccttctgccacctcccttgcctctccttagtaccacacaccctgaacatccccaccaaatctgaaatggccacccctttctcttttataactttcaccccctttcacagcccagctcatgtctcaatattctctcactcttccattaaacaccgattacttcagtttagtgagggctttccttcttctggactcaataactgtcatgagtctgaatgttacatgctgatcttgtctctgcaaatattttaaactgcctctgggaatgggtcccattttatgtctattc

SEQ ID NO: 138164 - DNA, 1555 bp, Homo sapiens
taatatggttatatgttgaaagattccttattctctccccaataccatttgtccctttggaggaatatgcattctatccttttactaagatttcattctgttgaatgaatataagatgtgagtctaatttttttccatgataattttttggaggactagtctacccttttctttcattgtgtcaatttgaggcattaaaatttttttaaacaaaacttccatttgatatctgtgacattatgccttgtcaggcagcttactgcctttgtacaaataaagaaactgagtcactgaaatgttaagaggactgctttagagataagtttaaaagctacctcctctattgtagaaattatccgtagcactgagtcattgtgcttcagggactctgaaggtgaaaaagttattcaatttttcttcttttgttcctttttggaacaattctaattgtaatccacctagatattattaagctctggcagtagcaacatgttactgaagtgaaatcatgttcttttccaacctgctttcaaagaacactgtaaataacagcatacataatatatgctaatttatataaatcagcacatctggttaaatgttactgggtaccactagcactacaggggttattgttgaagacccaactccagtctaccatgcagaagaaaccggttccttctgctggatttggggtgtttgatacatttttttcccctcaagacaggagaaactatgatgatgtccaggtaacttaaaatatagttattagcttgatatccaagtgggcatgttgtggaagacacccattgtgggatacagctcaaaactgatgcatttaaagaaagattaagatatattttcacatagctatttattgtgaatgtcagtaatggagagaaattaactcatactgatttaaaacttattttcctcatcaggttgagtctgtttccaaataatatactctggctgtagcttaaacagacaactgaattctggtatttaactgactttgtgtgaggttacctggcagggaaaggtattggtccctttctcatgaaagaatgtagaaaacaaaattcttacttatcaccatttgcacagtctttggtttactgaagattttactgtattgctttaaggagagtaagctacattgctacaaatacataccagcatattggccaccagctgtatacagtgtggcctatgaatgagtgagaagcttctaggtagctattaaggcaggcctaggtaggaatccaacactttattaggaaggaattattccgaaatggctgttgactcaatcacctggcagttctggcactcacccaagggagaagagattttgggtacaatcctttttaaaaaatctatttgttgttctgtgatatcatagacatccaggctttaaaaagaaagatctgctcaaaattaagaggaattttaacctacccttaattcgttggtctgttattaagctaaaagtaaaagaaataaacttttaaacttcataatatgagccagttaatgagacttttttacaaaa

SEQ ID NO: 138165 - DNA, 1162 bp, Homo sapiens
gtctatctttgtttttcagcccctttgatatagtctaggttgctgaatctggataattgggtgagtaaacctttacatagaagttattcttattgagatgtttgtgggcttacaattgaaaatcagactacactaatgaggtgatggagctggggatgggtggagtaggtaaatatgagaaatcaacttgggcaaatggcctagactccacacagatttgctaaagaaattgtgtaactattactttccagacagcagtttagtgctgttattgtgctgagaggcaataggcaaataatttcactagctgtagactcaagtagatttaggctagtaatctgtctccactctgcaacttctagactgaccatttactaacccagtcagttgggtagttttcctcaaaacagatagatgagtgataattgttggagccagagagctggcattttcttcttttgtttggcccgggagggaaaactatggaggtggtgttttatgtgctctgaaatcaatcactgataaagtcttaaatgcttagtagtctattgtgctggctgaaactgtttacaaagattctatatgtagataggaagaccttgtataggctgtacacttgcattgtgagctttaataatgtatacgtataacagagaccaggtcggtatgtatgggtgggccctgaccaagggtgtgagaccacagaggtcacaccacttaccaaatcatgtgccagttacaagactatgtcttcctggggctgcgttttctgattcacacagaggcaccatatgggctagctaatacatttaaagccagatggattttagtctcatacctgataagaaattcagcaaggattccgggcatggtggctcacgcctgtagtcccaggactttgggaggctgaggcgggtggatcacctgaggtcagaagtttgagaccagcctggccaacatggtgaaaccccatctctactaaaaatacaaaaattagctgtgcatgatgggagacgcctgtaatcccagctactcgggaggctgaggcagaagaattgcttgaacccagaaggcagaggttgcagtgagccaagattgcaccattgtactctagcatgggcaacaagagtgaaacttcattttgagtagggatttcttattt

SEQ ID NO: 138166 - DNA, 1095 bp, Homo sapiens
ggtgccctcagcttgtttttcattgacattgcattagtttacattatctacctccccacccccactttggttgactagctaatggtcttttttttttttttttttgagacagagtctcgctctgtcgcccgggctgaagcacagtggcatgatttcggctcactgcaacctccacttcttgggttcaaaagattctcctgcctcagcctcctgagtagctggtatcacaggtgtacatcaccccacccggctaattttttgtgtgtttttagtagagacagggttttgccattttggccaggctggtcctgaactcctggcctcaagtgatatgcctgcctcggcctcccaaagtgctggagttacaggtatgagccacaacgcctggcgctaatggtctttaaacaagctgttacagggaagaataagtttatgattcaaaaatggcctggattttatccatgctggcagtttagattttcacgtgtttgttttacgaaagtagggcttccctgtattctcttatctcaaattcttaggcttcttcattacagcctatacttgcttcatcaaactgcattcagatggtcttgtaagttcccatgagagcaaaatcctacattttaatataagctgagttggtctgggacaaaatactagattttaaatggccattatctctgtataaaatggagctgaggtattagttgcactttacagtaggaactgtgtagggctctgggcccaatttttcacattcttcctatgggttctgttatagctaattgtagatcaagatatgttacaaatccctactttcaacctcctctctcctccttaaataatgttactacttgcatgtttataactctgaagggcatcttatttcttgttgtttttactgatttctgtgactattatcaatggtgtatcctattgtctgaccacggagataacaggcagaaggatggccattggatgttaaatcgattactgaacatgacagagatttattttaaagcatttcctatcctcactcatcaccacgtagttatgaactagtcaaaacttcattttgatcttagcaccaccact

SEQ ID NO: 138167 - DNA, 1070 bp, Homo sapiens
gtataatttagaagacagagttcaggggccattcgttttagtgccattgtcaaaaaaaaaaaaattctttgaatcactgccatgaagtaatgggtcagaaatgtgaccactaagaaaaagccaagaggacaaaagtgatatggctgtggattttaaggctacttgaacacagttcttaaaaataccagcctgtgatagcccaccactggggaaaaaaaaaatacctgtctagcagtctggcctttattaactaattgcatggccagcagaaggcctgtgtactttactactgttgcatattgcatatgattttcttgttgtttgtacgtcagccttgcagagactagcttctgaagaggttacattgcaagttatactgcctacttcatgttttagcttctctctctcctctattgcccacttcctttctgtttgtgatcttttgcatgaagtaaaagtgctttggaaaaattaatgctatctcctgttaaacaagtacacgatatgcattgtttcttgtttaggggagtgccaagaaccacctaccctctcctgctgcttcctgcgtgtgctttgcctaaagattggctgctataaaagtgtggtatattcagccaagtgctatctttttaattagtttgcagaaagtgttgtgacaaactatttttgtgttgacttgtgacgagtaatagacccctaaactacgggcgttaagtgccagacaatatggaagtgcataatgtagtttgagttctagtccccttagtttgatccatcatccttccccaaagaaaaagcccctaatttttaaaaatgtgacaggtaaaatagattacgaatataccagtatgtgtctggagcctgaaattggcctatttcttataattactaatcttaaacttttttttttttttttttaagagatgaggtcttgctctgttgcccagactggaatgcagtggcatgatcatagctcactgcaaactcaaactcctgggttcaggttatcctcctcccttagcatcccaagtagctggtactacaggcatgtgccaccatgccccactaaa

SEQ ID NO: 138168 - DNA, 2763 bp, Homo sapiens
atatttccatattggttctgttcatacaactgtgtacaacacagcatgaaactagaaagtgaaggatatcttaagctctcataatgatagagacataactgggaaagctgataattaagcagactaagaatcttagtaaatttttgtttttcaaatacttcttatcaatttttacaaattcatattttctctaaatatagtcctggttgttgatgttcttttgtttttcactccatctaacccaaagggcttcgtgttacggataaatatgtaaggaaggatatagcattcccatgtcccaaaaactgtgttgttctttttatttagaccagtgattttcagtgggggctaattttacctcccagggaacatttggtaatgtctggagacatttttggttctcacaactgggggagggtgctacactggcatctagtgaatagaggcctgggttgctgttctctatcctacaatcataggacattctctccagcacaaagaattattcagtctaaaatgtcaaggttaagaaactctgctttagaccctataacattttgtatatttagtgtgaaaaactttttgtatatttagtgtgaaaaatttctgtggctcctcagctgttctttactttccattctctcctttcctctctattcagacagggtcagctaatccctgtcttcatggaagcatggtttgtttcattgattcccgccaattttatttgcattttcttcttttctgctactggaaatctggtggactgcactgttgtgaactttttagttgtcaactataccttttatcacttacctcatttctgacatctaaggaaaatattcattttcatcgtagtgagtttaaaaggctctttttccatctgtggattctttgatacttcaacaacttttgatgctggtgacttttaactcatcatctatatgaattttatttatttatatatcattttgagacagggtctccctctactgcccaggctagagtgcagtggcgcaatcatggctcactgcagcctcgacctccctggctcaagccatcctcccacctcagcctcctgagtagctgggactacaggcacatgccatcatgctcagctaatttttgtatttttcatagagatgtggtttcgccatgttgcccaggctggtcttgaacccctgggttcaagcgatccacccgtctcagcctcccaaagtgattacaggcctgagccatgcatctggcctgaattttagattctatggtacagtcttctctgacaacttctgcctcttgatttgctgactgctaaagtgccagctttgtttgccttccatctcaaaacttctcactgttatctgttcttctccacatacaattgcaggcaatcatatgcctcttcaaataccacctggatgcagatgcagatgcagatgatgccaaacttttctatctactttgacatctaagtttgatactttgtcatcatttgctgagaggcatctcctgactgtgttgcagttctactaaaaactgcataacacctcaaatacttcatagtggtgtttttaatatttttcctttttacaggaaaaataaaaattaacttgatgctctcaacacacatacatacacatacacagacacacatggacacacacacactgtttatcaggtttaccttttcaagctaaggtttacttgcttcacttatcaccagactgtattattctgttgttagtcactgactgacctttatgatttctggtccagttgaatgaaggttaacttccctatttgaccagtgaaagtcagtgactccttctcattcaactcatcaggtcccactgtatttttacatttagggctactattaggcacctaattgtatcttcttccttttttaatttgctccccttttaaaagttgaagccgttaggtgtattgtctcatatgcctgaaataacctcttcttttttctgttctcagtgaatcctaagtactttctttctagttctttatataactcttaaaccctttattgcctacttgaaggtgacatgatcatttcattccccttcaatttcccatagagagccagttcatttctgcagcatgcatggccatattaacaattgtccttattataaatgtatgttatagtgttcattccagacacatcaaatctttgttatgtatggggcatcatgctgagggtataaacataagtatatacaggtcttactcttgaggagctcatggcctaatgagaaaaggacagatacatataaagtagtaaattctataataaataggtatgaggagaacgctcttgggaatgccgcatactgtgcttggtagggagaggaaagacttcacagaggtaacatttgatttgggtcttagggatgaagaacagctttgtaagattaaaaggcaagtttttttttttaagactagtcgagtgcagtagtgagaagtggggaaagagtagaacaaggagttagatctgtaactgactgtgaacaatcattcgagataacttactaccttcagaccagccaaggcaagccattcttaatagtgggattatcatgtatgcaagtttagagttatgtaaaggcacatatttgttttaagtgtcattgattttaaaatattaagatcttagagagaaggttgtgactgaacttgttttatgactgaacgtaggtgatcataggaaatatttttcaccaactcagaagtgggatagagaga

SEQ ID NO: 138169 - DNA, 1537 bp, Homo sapiens
gtatcctcacatggtggagaatggagagcgaaagcaaactctcttgtgagttttacagagtcactaatcccattcatgaaggttctaccttcatgacctcatctaatccttattacctcccagagacctcacctcctactaccatcacatggggtgggggttcagtttcacggtatacattttagggggaaacagacattcagtccatgacaacgcataactgcaagagagctaggaagttagggcatgtttgaggaaaaatatgagttagtctagtaaagcccagatgtatgtatgagagtggtggaggtcagtctggatggagagactgcagcttgattacataagcattcagtgctcaccataaacaatttggaattcattctataacccatgtagagtatttgagcaggagattgatgtgatcagagcttacaatcatatcttactttagacattttacagttggaaatatgaagtctaaaatcttatgtccaaactttctggtaattggcctgtttgtagtataaatataaagatatttattaattctgataccttttggcatgctttaatttgacagctttgaacttgcaaaattaaacatgtactgtaaatagtgtgtactttgataacttactgttttacagcaacttaattggcccttgctcccagcctactattctgtagatctgtgcctctaagtctaaagatcttgttgttgtttttttcctccacaaatagatcctactctaaaggtcaggtagcttagattacaaggctgctgctgtcaaactgaatgtgttgggtctaggctgaattacagtcttatagtccctggaatattccaagagaagctgcaagatttatgacatacaaaactaggtaaagttatcctcactagataaagttgtcctcaatcaagtgttatcatgaattttttttccgtttgcatatatcaatcccctatgacaaaatgagaagagatacattgcttacaactgtggcaaagtagtcttagggctatgatttgaactcaagtcccctacttaagataattcacttaaataagtggaatttttattaagagactccctccctccttttcttttcttttctgttttgagacagggtcttgctctgtcatcaggctggaatgcaatgttgtgatcatggcttactgctgcctcggactgttgggctcaagggatccccccaccttagcctcctgagcagctaggactacaggcatgtgtcaccatgcctggctttttttatgcagtgggttgtagctatagaaagaggacattatttcacaaggtataggctgggaaaatgttcaggttccttgtggggttacaaaattattttaaaaagatataggtctttaggacatgaatcatcttttggtagactactttctcatgagggatttgtgatcctggcaaaatcccttttgagcctttgaaacatgaagagcattaactacaaatgaagaagacaggaacttcctgagttataaatacctggccatatg

SEQ ID NO: 138170 - DNA, 1002 bp, Homo sapiens
tgagttgggttggggatctggatgggagaaggaagaatgagtgtggtggagttgggagagatgaaagtaggtgggaagatgaatttgtttctggatacagtcacttgaggtgatcgtgggacatcattgcgaggtactgaagtatagcttgctatggagcagagactctacagtgttggagaggatgactcctggatggagcatatgacagactcctgggtgtatgtgtagactgagaaagcatattcagaagcctaccatcttttcctaatgcaagctgaaaaaaagtagagatctatatgtaccctataaacatgtatgaatattacatatcagtgaatgtagagatctacaaaattgtggctagcataaatagcatatcctcaactttaactaaagtagaaacacacacagaatctttgggtggaggtatatccaaatctctggaggataggagattcttatccaaattgtcaaagattattaaaggttgacacattgcaggtgggcacggtgactcaagcctgtaatcccagcactttgggaggctgaggcaggcagatcacttgaggtcaggggtttgagaccagcctggccaacatgatgaaaccctgtctctactttttgattgattgattgatggattgattgactgatggattgattgatttagagacagagtctcgctcagttgcccaggctggagtgcagtggcgtgatctcggctcactgcaacctctgcctccggggctcaagcgattctcatgcctcagtctcccaagtagctgggattacaggtgtccgccaccatgcccagctaacgtttttgtatttttagtagagacggggtttcaccatgttggccaggccggtcttgaactcctggtctcaggtgatctacctgcctcggcctcccaaagtgctgggattataggtgtgagccaccatgcctggccttagtaattttaatttttagtacaaaaattaacctgatatggtggc

SEQ ID NO: 138171 - DNA, 2617 bp, Homo sapiens
cctcttttctgaccataggctaaatttggaaactggtaaattttatctttgggatgctccaaatccctttctgtacctcttttccatataattgtacccctcccctcaggtgacacccatcctcctgtgactcttccccaccccccacccagatcattttttttttttttttgaggtggagtctgctctgttgccaggctggagtgcagtggcgtgatcttggctcactgcaacctccgcctcccgggttcaagcaattctctgcctcagcctcccaaatagctgggattacaggcgcctgccaccgcgcctggctaatttttgtatttttagtagagatagggtttcaccatcttggccaggctggtcttgaactcctgaccttgtgatccacctgcctcagtctcccaaagtgctgggattagaggcgtgagccaccgtgcccgtcccccaccccctgcgacatctttcccattcctcagtgtacctacctcttcccaaacttgatttctgtcacatctctgctgagtgttagaatgaactaagttatgcaattatttttgaatgtactttattgtgatttaaaaaatgattattaacatccattaattgcttggtgaaatatctgtcaagtagcacaataaagtgaataaagcctggcagtgcagtagaatgttctggggaggtaggtaatcatataagcagtcttgctttgaggttctcccctagggataattgtttctacttttcaagtcttgccttcattcacatataagcctatttttcagaagttctcttttttcatgactgcctctatgagagcagcagagaggcttccggggttgagggtaggcaaatagggcaagaagagtggctgtatgggatgggacttccgtaagtctaggactgcccatatggccttttgaatgaagggaatattccataatggcttattttaagcagtaattaacaaatgaaaaaaatttcatatttcttcccataaatggtaacatgtaatttgtaagcttagacaatttgatcactgaggtaaatgatgaatatcattaaaagcattggttcctaataatttgtaaagtacttcgtttctgtttgttaatttgcttaccaaatctgtctatcagtcacttgcatttgttcccaaacctatatatgccagtggtaattgctattgtaactatattatttaattaaacatgcaatttgatgaaatgtgtgaggcaaaagaaatctttctatgaaaattgagaagtcttttgcataaattgataaaggcgctaaaaggattgctactgaattaagcataggtgaggtaactgaaagcctaggaaaaaaataacaagtccaaaaggattcatatggctttgcaggtgtctccagtttctatcttctaaagaaaatgaaactacatatagtagagaatgcattaagggatggtttatgaaaggaagatgctctgatgtagctctacatcaaaatattgataaatgtgtattttgatgtcataaattaaaatgttgaaggtaatgtttgcttttaatgattcctccattaccaactttaaaaaaattaaccacacactggaccttatcatgtctgtataatactttacagtaaaagctcgttttccatgctatgaaatgacgttctagttaacatttcccttctttgccatttctaggtgtagtgaaggaccagcataccttcgaatcaaagtttgttgaatgatcatcgtagtcaaacagattttattctaattatttagaatttactaatcacaaattgttgctttgttataacattctttccatgacagataaaggcatttattgaatatggtaattttattttgtgaacatgataaagtagggaatgatttcagtatatagtgactgagtccttgccattaaagattttttcaagtacggtacttatccagggacatactttctggaacatttgtggttcctcttaggtaatcttgaggaattctatatatttgtaccttgacattatcttagtactcctgctgtttttagtaggatttttgtttgggaggttgctaagtattatttagaagtgaaatctgataaggggattctaaaacctttctcctaccacaatagttcttttcaaatgcagataaactgtcattcagtgagactacctaggctcagccttcagggtaggatgaataaagcaatatatttgctggattgactttttgtccaggctgtatcgaaaaaataatgtacttagccactgaccatttatgtctttttaatgattgtatgtatagtagtcaaatggttagaatttatatgcagaaggatataccatatcacattttcattgtaaattgctgctttactctcctgtctgccacattctttctggtgattctatatttgtgttgattgcttttcatggataataaagaaatttacatttttctctttttactttgtgtggattaatgctctagatttgaatgcctaatgctagtcaatctttggatcacatatgtaatactcctccataatagcacccccctccactcccaccatatgatgaggagggaaaattttttctaaatatt

SEQ ID NO: 138172 - DNA, 1020 bp, Homo sapiens
tgcaagtgtccttttcatataatgacttcttttcctttgggtagtgggattgctggattaaatggtagatctacttttagttctttaaggaatctccatactgttttccatagtggttgtactagtttacattcccaccagcagtatgtgaaagtgttcccttttcaccacatccatgccaacatctattattttttgatttttagattatggccattcttgcaggagtaaggtggtatcgcattgtgggtttaatttgcacttccttgataattagtgatgttgagcattttttcatgtttgttggccatttgcatatcttcttttgagaattgtctatttatgtcctttgcccactttttgatgggattatttgtttttttcttgctgatttgagttccttgtagatgctggatgtcctttgtcagatgcatgggaggaaaattaacaactggttagagtaatagttttagaatttgtgtatatagattgctggtacaaaatgattgaatgcctatgtgttatcctggctgtatagtgaatcaaatgggtaaactattagagatagtatatgaggtaaagacaacttttttttttactttttttcattttcagaaataacttgctttttcttttagctctgctgttgctgtgtttatctatattagtttttagatgtaacagtctattcaaatgtcataatatttgttagaattttctgttcttgcacagggtggactttctgtagacagtaggtctgtggtaaaaaataaatttaaaaacccctgaacttctaaatgggtgatatccttggcaaactaaagtaatcacatggctagatattgaatttttagaatattgaactgtactaaataagcagatttattacaaagaggttgtaaaggtagagttaggttctaatcttaactcctctgtggctttagctacatcactatgctggctcttcttcatgtttgtatctgtcatcttctctgtcatcatcatatattgttctcccca

SEQ ID NO: 138173 - DNA, 1029 bp, Homo sapiens
catggatcatgtttcatttgttgctcagcattttacctctagcacttagcctggtgtctggcattttagcaagtatttattaaatatatgttaaatgagtgaatgaatgagtaaataaataaatcaataaattgtatcaatgttctttttttccatagtgattgataactatgttttgatttggcaagtttattttgcttggagaattttacctataagatagcagaaaagctgggcaaaatcacttgaaacttcatatcagaagagactagacacaaaagtttttcaaaccccattttttgtatatatgtgtctgtgtgtgtacatatgattgtgtatgtttaagtattaaaaatggtgtgttttcaagtgaattaatttgtgatagctattgacctggcaaggaaaacattaggtaactttttaaaaattgttattattaagcaagggacatttcttgacttctcttaaatgccatgaatgattaaatagtgaattagagagttctgtatcttttaaaaaattactacactaaaactttgcttgcattcttataggataaatgtatattgcacacaaaatcacatgtatgatttaaatcttagtgaagacttgcatgcagcttatttctgataatcatttgattactcctcagtccaaataaaaaaaaatctaggtagcaaggcatttattcacatcattcatttttgtgcaacaaaatagtcttgcagttgacagtgaacttcagaatgcaggttttcaactcagggcaataattattaacatgaatattcaccttatgaatattgactatatgaatatgcaagctattaatggagtcaaatgtctttgaaagtcacactctagggacacttgttgcaattcttcactctttatggctggattatatatgctttcccgtggcagtattgattacacagtgaagatttattctctttcaccattggagttacatagtcctagtgaagaggaagtggggcacatgcaagatgtaatgtgctgctttgc

SEQ ID NO: 138174 - DNA, 1076 bp, Homo sapiens
ctcacataccacaggctccagctcaggcacatattgtatttttattaaaaatatagcatagatacagaattttggtactaacaagaacaatacagtttattacttacactcgaagagattgagagcatacttctcagtctctcttctaggttttgccttgtcacatgatgcttaaggtattttcacccttgattattggaaaaattcagcaaaaccttattagaatactttaaatatatataatacagtttggggattattttattagcataactttgtatgttctttaagctagaacattctcattggtcatgctggcagggaaaagagaagccagaagaaaattcaagtcactgttccgtaagaacaaatgttaacatttgggctggatggtcacatcaacatggattttgacagaaaatgtcctgtcaatttgatggattttacttgtgataaatatacttccagagagcttgcaacaaaccactcggttataaatgggtatttctgaagtaatcctttctgatttgttttcagttctagtccctccccaataaaactgtaccctagaatgatgtaattaaaacatatgagatgtagagactaggaaactttttagtaacatgttatacatgtgacctcattgtatactggttttccttgtcctgattccattcagtaggactcttaggcctgtggttctaccttcttactggaactggagggaagcttctgtttgaccaagctaggtcaaagaaaatgaatttttttgctgttggctgtctccagagtttatcttgaaatcatcaagtacctgagggattaagttaatatactcattttgcatgttgctggaactaaaattaggtagaagaaagcagaaactgggaagtttttatgtttgtttaaagatttattatgtattatgggtgtatctaatcttcttgtcatgtaatttaaataaataggataaatatttttaatgcaaatccaaactgaaaattcactttgcagagatcattaacatttatttcatgtcattgtccttctatagttttaaaatgcaaataccatgg

SEQ ID NO: 138175 - DNA, 2015 bp, Homo sapiens
taattcattgtgatattatttgtaaaacacagtgacataaatgatattttcctacaatgtgttatttattattttgacaatttctgtcactatgttgagaaagaatctcttatccaaattaaaactaagtaaaaaactatttaaggaacattatgagacaaaaggttttttcagttatcactactcagcatagaatctgaagcccattgggggaaaaatgaagtttataaaattgagtaatttataatattaaatttttccaaaaacactttttaaattttctgaaaattattttttgttcaccatataatcacattctgtttaagcttctacgttttaaatatttgatataatatttagtgatttttaaagttcttcctgtgtgagtaaatgagctgtttttgttttccatgtagagaagtttgtctgctttcactctggaaatgatttcttatgggttaacgcctttggatacatgtgttccaagagctaaacaactgctatacaagtgaattttgagacatggcccattcctgaattggggattgtttgcaaattcaagaccatcagttaaaagtactaatagtgaagttaacttaaatcactgtatgacttttatgtattttttcctacaaaaaatataataataccttattcacaactcaggtataattttcagtttttggcaatttatactcttgaatttttaaagcagtgaatcattttgttttgtcagattaattttgcaactacatcagaaaactaaatgatgtggttatttgtaaaagctgcttgaagtagacagatagcaagtcattgtgaggtgaagtatctccagagtgataatcatagccatttagaggttatttttgcattataaagatagtaatcataacaacagatatttaaattactctatttaatacaaacagcaatcatatgtctgggtacattgcttcaataacaagcgttattttaaacaaaattatatatactaactgccttatctatttatattgctcccatcctaggctaagcttttatcatcttgcaactggatcacattctctctctgtcgctctcttcctctgtctctctcctcccccagccccaattctgtcaatcatcacaggtttgagtacttactatgtgctagaaatagtgcaaaaacctgaggacacagtgggaatcgagaaaaacctggtccttactacattgagtttacagtattgcacagaagactgatattgataggtaattaggatttgatacgtggaatgtgttgcagaaggaaccatgggagactataacaggatcaactgtatccttagctgagagcagaacagttgagtagaagatggctagatgattaagaaagaggtgaggtgggatggagcgggtgctgtaagcagagcaaagagcacctggaaaggccgagactgaaaaagagctggagctctaaccagtattgttatactgatgaagactgttgcacacagatttcagaatatagatagatgttctagagtgtgtgttctagtcagacctgaatgctaatctggactgtgtaatttattatctttgtgatttaggcaaatgacttaatgactgtaaaccttgatttcctgatgagtaaaacaagacagtaccttcttgtacataggattattgtgaggatttaaacaaggcaatgcctgtaaagctcttagcatagtgcctataaatgctcagtaaatggtagctattagttaggtagaatagaccaaacttgctgatctctgcaagccgcctttttagcctttgattccttctttagtttattctcaatattacaggtccataacccttttctgaaattctgaaatatgaatgctctgaaaacactcttatcatttggccacaagccccaaccttcttaaggccgtataggtactctttatttatcctgttttgtgaaatatccatgttttccttttaaacttgaatacatttgagttaatgtgttaccccagatc

SEQ ID NO: 138176 - DNA, 1468 bp, Homo sapiens
acatgaaacatgctgagttccaagacgtgtttggcttgaaaggtttcaaataaaagattgtacacgtgtgccaacccaaagtcagctttctaaaataccattttctccatgtctgtcttcaaatcagaaaatcataagaacgcctagtggttttccagtttagttttgactattccttgtggttttcaagactgcctctaatccaccctacatattcaaaatttaatacccttgtacttgaaccatttgtttcataagtctgttctcttcaacttccctgaagtaaaatgttaatgctgctccttttgtctgacttccctctctttctctctttgtggctcttcagatccctacccaacaattaggccacaattctttgtagtttctcaatgaagctatatttatctatttcttctctgaattcttattgtgcttaaatgaatttatttaacagtatttgagcagatattatgtgccagctactgttctaagtgtcagagatctgaaagtgaataagacagttaaggtctctactgttagggaacttgttttctagaaagtagaagacaacctgtaatcccagcactttgggaggctgaggtggatggatcacgaggtcagaagttcgagaccagcctggccaagatgatgaaacctgatctctactaaaaatacaaaaattagccgggcatgatggcgggcacctgtatccaagctactcgggaggctgaggcagggaattgcttgaatccgggaggtggaggttgcagtgagccgagatcgtgccactgcactccagcctgggtgacagagggagactccgtctcaaaaaaaaaaaaagaaaaaaaaaagtagaacacaaataagtgaacaatatcatttcagataacagttaatgctgtcaagataagacaggaggatagtgccttgggagaagcgacatacctgagaaactcatagtttcgcatttagttatttttgtttttatatggttagttttttttttttggtttgacggagtcccactctctcgcccaggctggaatgtaatggcatgatctcggttcactgcaacctctgccttccaggttcaagcaattctcctgcctcagtctcccaagtagctgggattacaggtgcccaccactacacccagctaatttttgtatttttagtagagacgggggtttcaccatgttggtcaggctggtctcgaattcctgacctgaggtgacccacccgccttggcctcccaaagtgctggtagtacaggtgtgagccaccaagcccagcctatatggttagtttttactccctggttagactgtaaatgccttaagggaagaatccttaaacttctatgtgccataaagtgttgggtataaaatgggtgcttgattaaggtttggttgagaaatttgtccttttttgacagagaaggtaaaaatctatttattaaatataaagc

SEQ ID NO: 138177 - DNA, 1038 bp, Homo sapiens
tcttgagaagagaatctcaaaaggatttttttcttgtcataaaaatggtggaatgaattttgatttgtaatagcaaagaactctggtgggttaaaatttgaggcttttgaattgactgtacttctgagatggtgtgcttatggtcacaaaaatacaaaagtattgctctactaaaatgatgaaatggacagttcaagatgttaacaatggcaaagtaaggtggagaactggaacttcatatctgtaacttcatcttctcaactactaggcttttgagctttgagggcagggccatatctctctaaatccccagtgcctcacacaccaccacttgatctagcatctattcttaagtgctaatggtgatagaggactacagtgcctaagatgaagtgtaggtggctgaaaatgactcttacttttagaaaggagatgaaagaatgattgggagtaattttaagtacacgcagtaaatagttcagtgattgcaaaaggaaaaatttgttttctaaaaggtcatcttagactcaagcctgtactttgagcttagttctaaaaataaaattagacattgctttcttggtgaaattaaacacaactgagaggtactcaactaacagaaaatctttataataaagcatttgaatgcctgaacagaatgttcagcttggttaccaggtgattggccttgagttgtttggattggccttactggtttttaaagttcaggagtgagtatagggtctgaaaagttggaaggcaggcctttgaatagtaactacttccctctgtgactgctgcttatctgaatagggattgggcagggatgtcgtccagagaaatcaaaccctgaatcattggttgatgttgattacctttctcaaggtccattctgacttggaaaatatatggagattataatagagtattaccatatcagaactctcagaagctttatattgtgattgttctttcattcttctgatcttcaactagagtgtaacctccttaaaggaagacagcatgcttaccttgttt

SEQ ID NO: 138178 - DNA, 1075 bp, Homo sapiens
cgttttataggatttgggtaggtaaaggaaaactacagtcaaagggggttctctggcgggcaggagtgggagtcacaaggtgctcagtgggggaactttttgagccaggatgagccaggagaaggaatttcacaaggtaatgtcatcagttaaggcaaggaccagccattttcacttcttttgtggtggaatgtcatcagttaaggcaggaacaggccattttcacttcttttgtgattcttcagttacttcgggccatcggggtgtataggtgcaggtcacaggggatgctatggcttagcttgggtccagaggcctgacaaacagatgcatagtagatgcttaaatatttgttcagctgaagtgaaggttgttttttgtgtcctattgtacctgccattcttggaacgcaagaaacttaaggaaggtaaagagttgacccttcatctctattgtaatggccaacttaattcattttctttaagagagaagaaaatagtcaaatagtgcgaatacgtttttgagttggtggtgagacttttgaattatatgcaacttagttgtccaatttctgtggtagtagagtaattgcacgatgtttataaaacattgtattaccatgtaacattagctataagagagttgaatctttacatcttgctctttttgttaatttctgcctgattgagaaaattaaaacttaattttcttacaataatgactcttgcattgcaatcacaacttcagcattagagtttataagtaagtcagtcatttctcttagtcttaaggggttgagactctggagtgatacttttatagttacacaatattcatataatactgtgctaagttatatttaatatagctgatcataaatgaagtttaataaactctgattgcttgactaatgcacagtcttattgcttttccagagttgattttaatgaaaatatatggtcactatatttattggtacaatatgccctcattgtaatgagcatgatcattagatttgcataataaaaacttacaaaaatgactttaatcagtgcttttaattcaggggtatgac

SEQ ID NO: 138179 - DNA, 4456 bp, Homo sapiens
attccaaatcaaagggaacagtaggggcacaaagaggacatcatgggagtatgcattgggaagaggattttaatttttgttttctgtagaatagggatcataagagaagaagtagaagatagcccagggctgaatcatacagggctttgaattccatattaaggatattcatctttattctataggtcatcaggaggcattgaatatttatgaacaggagggagtatgatagtcattcatactctttattgagcctcaatgtgccaaacactgctttaggcgttagggttacatccctaaaccagatgggcaaaaatccctgtccttgtggagcttatattttttgttggaaaaacagaccaagataatgataattaagtaaattatagactatgttagaacgtgctaaatcttgttcaggagtgccaggaatatgtggagggaggcagatgtttccatttgaaataggatggccagggtaggcctcactgagcaaaaccttgaaagcaggaagagggagtaagccatatgggccatggagaaagagcattccaggcagagagaagagccagtgcatgtggcttattgcctcattggggagccgtgaagtggtcagtgtgactggagctgggggaatgaagggagagtagtaggagatgaggtcagagggatatggagagtgtatagatcagtagggccttgtaggtcattgtaataactttgacttgcactaggagggaaaatagcccttggaaagtgttgagccaaggagtgacatgacgtgacttcagttttcacagtatcactttgtcagctgtgttcaaaattaactgtaggagagcaaaggtggaagcaaggagatagattaggaagtcactacagaaatttagttaagagctgatggtggcttgaaccacatctttgcaaatggcagaatgattatcatgggactggatagctgcttggctattggaaatgaaggagaggaaggagaacaagatttggaaatcttaaacctagacaagtggaatgcaggtggagccactaacaaatgttaccctcttgtttgtaaaatgagaggctttgactagattatcttgaattccatctaacttgaatagtttctacctctatactctgtggtttactatagataaaaagtatgttaattccaaagaagagtactgaggggaagggaagacttcagtctcgtcccataggaccaagtgaaaatattgctagcaatgctttttttcttgtgtctgtctcccatgattaaactgtcaacatgtattcaattgagatacagatttgaaacattttaaacatatgtgtaccttaatttagataatttgactaaagcaaaaagtattttcccttcatttacattcttgctttggagatatagatgggtttccagcctggagtttataaccccaaaagatgggaagagaaggaaagcagtagttgcatgaagaactgtataatctgtctcaaaaacacatgtggacaagcgcacatagggatggtagcagaattagttcaggcacttttgatactttgtcattttctctctgatttggtattgcaggaaatcatgaaattggccattgtgtttaaaacagttttctataacccactagaaaaattaaggagaaaatacctggtagagagagttgcagggtgaattcatccttcttaaagtggtttcagttctgatataaataattcccacttttttcctaggcagtaaagattgattggggtttgtgtcagcaggatgtgatgaagacatggtatagagattagaagtttagatccctgagggaatcagtggattaaaagtagaaaagaaaagagttatacatagaatagtatatttgccccagctgatctggggaggatggtctttaacagcattggattggtggtatttgaagacaattttctgagatccaagcaattttcattcacttaaaactcataatggaatcctccccactgtgagaagaccctattttttttttagtgtgcatgaccaagttgatatacattattcagcttctgttgtaagaaataaatgtataggatctggcagaacatttaattcaatttctaacagacaattaaaaaaaatctggttctttcctaatcacacccctaattggcacttcaacatatttataataaaaactatatttcatgcttatcatacattattgtaaggtcttgaactatcccgtgaatcatggaacataactacattattaggtattgctttagtattgctgtacttaaattcttcaaataatgttgctcatatatgttcaattttatgttcaaataagttcaattttatttagaatattttaaaaatatttctaatttatttataaggatagtttttaaaaataagttcaattttatttagcatatttataaaagtgtcctttaaatatccatcaggaataacacagttcttaggccaagctgtttcattatatttcattcttgttaaatgtgacatttttcctattgtacgtggtgttgttttttaaatttaggtatcttagcttgaggattcatttccaaacttatatatagcatgccagggcttatgattttgttgtatcttttctcacatttcagcactgtggtagtgacgtctgatttagatctgatttgggacattgggagccgtatttaaaaacaaatatatacacctttgccaaaccttcatttttaatcattaaaaagatttttttctttaaagaatgtattgtttatatgtttgaactttctgattctttttgactgtttacagttaataaaaatgaaaattattaaattattttattgtttgatctatgagtttctcttatctgatgggttttttttgtttgtttctttttggttttaatagaacattcaaataaaaactttggcagatgatgtggtaaggtggtcttagcatgttattacattacttatgcatgttgccttttaattaaaatgggtggacataaaagcattgatatatgtaagatacaaaatgtctggatatttacaaagtatagtagaatggaataattgtcaattcagtgacttccttttcgaatattaacacaaacaattatatgagatcccaacagaattttcatatcatcctaatatttaccttaaccaaatgttttttaaaatcttgtgaatctagactctggaaaacacagatgcttccttttttgatggccaaataaattgtgaatgtattaaacattaatattggaggaaattaatttccattagaaaggaaattaagttcactgttagtcagatgtgtgctactaaatttaaaaaccagtattttaaagctgaatttgtcatagtatatctttttaaaagttatgggctcaaaatgtaaatatacccttttatagctaaactataaaaaatggtattttaagccttgtcagttttttttttcctatgtgaaattacctatttacaaataatttaaagtagtgatagtgctcaaaggagatgaaggtatgtggcttaactacattttctttttgagacagagtctcgccctgtcacccaggctggagtgcagtggcgcgatctcggctcactgcaacctcgcctcactgcaacctccacttccctggttcaagcaattcccctgcctcaccctcccaagtagctgggattacaggtgcccaccaccacgcctggccaaattttgtatttttagtagagatggggtttcaccgtcttagccagactggtctcaaacttttcctggtgatccacccacctcagtttcccaaagtgctgggattacaggcgtgagccaccgcacccagccaactacattttcttaccaaggtatagctgaaatcaaaagctaattttctagataaactgaaagacacagtggaatatcaaatatatatgttattaatgctactcagtaaaaaggctagtactggaaaagtaaatattaagtgatatgaagggaaaggagaagagatatgttgatttaatggtcagttgcatatttaaatgctttcatgtccaccatatttttagtgaaatttgactattggatatatcctcagcttattttggattacttaacttttttcttgagttgtttgaagatatactatataactaaaccaacttaatttccctcaaaaagttaaaagaaaatgtgaaaatatagttcaagatgattagaagaaatgaatcttaagttaatgtgaagactgggataggaaccaggggctgttggatttaggaaaatcaccttctctgtgaaatgaggggattggtttagattatttttcaagtttcttctcagctctaaaatactatgatttatataatgtctttgtcagcaactgtgtactcaaattgcttttgtaatcctaaataagctgcttaaaactgc

SEQ ID NO: 138180 - DNA, 1067 bp, Homo sapiens
attggaaatcagtagctctttttcagtttctttctcttttttcatagttctaaagttgccaccaaagacacactctcccagaaacaaccaacaggactttgatccgagactttttttttcacttatttactgtgcaaaacagaaatgacaagggactaagttttacttttgaagaatacttttcacccccagagttctgaggctgaagagtacttcaaggtttcaaaatagtacaatctctaactggagcttgctgcttaaaatagtattttgtcagaagacaataatgatatgtattatactaagtgccgttttgatgtttcaattcttcatgttagtagttcttgatctttttctcagggctttttatttatttatttttgtttgcagcgtgaccgaattacaagttttagaaaatctactgtcaaaaaagaaaaacctcttattcaacatcctattgattctcaagtcgcgatgagtgagtttcctgcagctcagccattatatgatgaacgatctttgaatttgtcagaaaaggaagtattggatctctttgaaaaaatgatggtaagttatacccctaattttgatgtaattttaaaatgtgtgtgcccagaatagcactgagttttaaggaggtgtgtttgtatggacagtgtttatatcacataaagaagagaccagaaacttgatataacaaaactatttgcaaaagtatcctttttttttcttttttcttggcaaaaatgtccttacctgtctatctcttccactgtgagctcctaaaagtagaggcagttttatttatctttgttttctactatttagtagtctctaggacatcgagtcagtttttcagttaactgatttgtgtgtctgtttctacaaagcaaaagaggcctaggtcctctgctgaaaacatcacaaggtctcttgttgggtatatgaaatagacttgggagggtagagagtaacaatagaagggacagagaaattaattcatccaagtttgttctattagcaacattcacacaacctacattttctagcatgtttcctgtgtttta

SEQ ID NO: 138181 - DNA, 1043 bp, Homo sapiens
attatggaaacaatctagcaaatactataaggtgaggtgtttttaaaaaggttatatttttatccaactgtatagtaaacctcctacactaattgcttaaatacttgctttagcaaattttcagtaatgatctatacgtgtcttctgatacgtcagtatttgctgacaaagaaatgtacttcagcttcctgccatgttgttttgcatggattgtttcagctgcttttaccaagtgtttctctaatgccatggtaccttttgtcagttgttattaaagaaaattcatgagaagcttctaaacacatatcattaagtttacaaagtatcactaaggtactggatttgagtataacattctaattattgcggagaaaaatgacgaatgactgagaattgaagaatgaatgaatgagaatacaaatgaatgaataggcagctggttcaacttttgaccttctcatttgatcctattcttatggcttctcagtaatagctttaagaatataatgtttgctgaagtgaaggaatttgtctataataggaaattgtatcatggcatatgagaagcataaaaaaatggtttagtatttacaaatgtggctttaaaaacattataggctgggcgcggtggctcaagtctgtaattccagcactttgggaggccgaggcaggcggatcacgaggtcaggagatcgagaccatcctggctaacacggtgaaacccagtctctactaaaaatacaaaaaattagccgagcgtggtggtgggcgcctgtagtctcagctactcgggaggctgaggcaggagaatggcgtgaacccgggaggcggagcttgcagtgagcctagatctcgacactgcactccagcctgggtggaagagcgagactctgtctcaaaaaaaataataataataataaagaaaaaataataaaaataacattataaatggtcaactagacttcagtgttttgtttttttttttttttttttgagacgaagtctcgctctgtcgcccaggctggagtgcagtggcgggatct

SEQ ID NO: 138182 - DNA, 4703 bp, Homo sapiens
cttttttttcttttccaaatccaacaacttcttgtgaactttcttcagtgacatattatagatatatagaccctgacaatttgcaaattgtatttgctttcccaggtaataatgatcctaagggagcatatgccaaacagcattttgtgtgtgtatttgctatcaagataaataaagagctttgttagcatagataccatgtatatctatgttataaactgccaatttattctgtggaatagttttaaaaatatttttttctttctgctcagtagttggctaggtagagatgtgaaccgtgaatacatggtagaatttacacaaaactgtggtatctagagtgaaaaataatagcgaagtatcccaaaaaaggatttttgacattagtcaccacatgaattagtattttaagacatagaaattattaatgtttactaatcacttttgaagctcttaagtggaaatttatcaatgcccacagtaaatgttatctcttacaggaggacatgaaccttaacgaagagaaaaaagctcctttacgaaacaaagactttaccaccaaacgtgagatggttgtccagtatatttctgccactgccaaatctgtaagtagggagatttttctagctccaacagaatgagcaatgagcttagcatcattttgcttaaaaataaacaaacctcagctcttcagattacctcattgtactcatatagactgttcagaagacaatttatatatgttatacatttagtattaagtatatatttttaaactattcatcattagaaatgggacgtttccattattacaagcaagacaaaggatacaaagctctgaggtaatccagtccagtcctgagcttttgtgtacatactaaaaatcgactgcattttgcagatattccaccaaaatgtggtttgttagatgaaaatttcggattttgaagaaggtacaacttagtatagtcacagcttaagtttacattaaagctacatgtctggtgtctacttgcatgaaacttttagccatattttttaattcgcagttagcttttttcataattttatatgatgcaaactaagctgcctcataattgctattgtatagcttcatttaatgtaaaggatgtcacctaataggagctttaatcaaatctgtttgtgagtcccaagacttgaaagtaaagttcattgaaaggacttgttgttattaggaaactgtgtgttttagtggagtattttgctctgttctcttcctaatgcacttccaaatatagtcttaagctttgatttttttttttttggtaagaaaaaattgtatttttgaaatagcaaaatgcatcttttacatttctgtaaagaaaaagcttttaatacctagagttcataaaatcactgtatgtgtgtatatgtgtgtatatatatgtatacacacacagtgatattttgtgtgtatacatatgcatgtacacacacatacactatttaggtcatgtgttttaaatttcataagttgaccattgcagaaaacaagtcttcattgaaaaaatatattctaaagttatttggctatcctattaatgctatttcagtacagcaattccagtggcaattactaatgcattttgccatgaattctacgattgtattgattctatattgtacttgaaacaagctaaatctgaatgctgagctatttaaacataacacattgcagctccgccatagcagagcaacagcatgtttttaaatttgcttctggtatccaagggcagaaatatgtttcaagtgataagtgaaatttgccatgagcgtcgttttcaatagaattaggtgatgcatagggttttactttgaaattctgatgaatctcttctcatttttgcactcaagttattgttcaccataaaatgctttaggaaatgcaggatgtacattcaatgttatttttcaaagacctaaaggctgatacactagtaaatctatatgactgaatctgagtgcaaagtacagataataacatatgaataatcatgtggtggttttaatgataagattttgttagagtctctggctcatttgttgttgtttgtgtaagtgggactgaatataatgattatatgaaactcttattccttgaccttttgagtattacatgatttctgtgcagaacttgttttcatttattctcatattatttcctcttcaagtgaccaaagaaatgcacacttcaagttatatactgatttttcagattaaaatgcaaaaaattggataaatattagatgagctcacttgaactgcattattcaaaagatggaaattcaatgttcctcaaaagacatgaaaattctatgtttaaggcattagcctcaaaatcagaactacttaagggcccttatttgtttcattcagtgtacatatgagcacctgaaatatgcacagcactctgataagatttccaggattatacatatttttgctaatatttttcgtgggccagatactatgatggaagaaagcctgttgacaagcatttttgaagctttctcatcttggaaagacgttaattagtactatgttttctatcattaaaaccacaaaaattagttatgtaatttccttttgaaggtgagagggttggccttcagtgacaaacaataatctaacctttttaccttttcattatcacagcactaaagtttgcatttagagtagacatgatagttaccactactttatgaaaatgctttctagttagtcacagctttcatcttgaggtagcaaagttaagagctagagtccctggtggagaaatgttttatagtcacatgtaaaacatgtgagaattgtagtgaaatttaaacgtaaatcatacattttccccgtttaacacctgcattaatcattttgtatgggatctaaaaccagattttagatagaaatgtctatcatgctcctgggttcttgagtaaggacataaaagtaaaatgaagctatacaccaatatgtggtcaaaactcgtttctaaagcaaacaagagtcttttgtcgtataattaactttgctaaaattagcatggaaaaggagactataaaggaaaccataagataataataaaaactattgcttagttttttcttctcgaagtcccataatagagaatgttaaattgtgtgaatgttaaaggaaaaagtttgaataactctgtccatgatgaatgaactttaaatagagggatggagaagaaccttctttctgcattttatcctccattgttcattgtaggaagcgtagttatggatctgacgtagggtaataggaatatgtagataatttgaccacaaataacctggaagagtctatattttcaaaacaccagcatatgttttcagaaaatggaaaaccaagctttgttaatattgcaaaagttgtcctaccgattggtaatcctgaaacaatatgttggtaatttagaggggatctcacgggcacttaacagcacatatagacatttatgaggaaaagttattcaccgaagtcccaacgttagtttgtcaaatgccagtgtcattcctagaatgttaagggattggtttattttgaatttaaatcataatctttgaaattttaaaatatgtaaagttatattttttaagacatgtgaaccattgagaggcagcattggtttttttttttttaatctcagtaggaaataatttaaaatagtggtgctagctacatctgcagatttgttagactgacctgtataatgagtagttaaaagttgcagtatatctatatgtgtatgtgtatacatgtattatggttttgcttttgtcattatcagatactctttcagctcttttccaggtatgatctggatatgatcaaacagttgaacccagacatggccaaaatattttctcttagcttctgttgggtactaaatcttatctattgccgtttgtgctttagctaaatgcagttattttgcaatgcaaatgaatcattaaatgggccatattctggttgtttcactgagtatagacctgctttaattgttaacgcaggctcacattcttttgttagtctcatgtctgtgctaaataaacaagggacaaatacgacctctgtcttttcggtgggaggaaataattgaggtcaatagcatatcttttaattcagaagactgttaatggcaccaaagaggcttttattcaactaaataatcactgcttgtaaatagtctactgaatgaatatttaagaaagctgcttctgtattctgagattcatggattcttctgaaataatttacttggaaactgtcattatctttttgtattttatgatatccttttcaacataggattcttactggggtttcagttaaatttgatttttatttttaaagcactagctgaaaaatagaacacattttgataataactgctatcggattaatggttttgtattgtggcttagctgttttttggacactgcttgatattcaagtgtgggaatctgataacagtgatttgatttatatttggatttttggataaaattatgtttaggactatgagtttacttcctgctttcttaaacacaattctgcctctcagaaattcttttatcacttatccattaggaaagctcagttggagctgcaatttttgaactatttcctccttctga

SEQ ID NO: 138183 - DNA, 1686 bp, Homo sapiens
atgtaacatttatatactaaaataccttaatagtatacctgccataagaaggtgtactatttcaaccttgatagtatacctgccataagaaggaaagaaaagaaaaggcaatattggaaaaaacaaaatttctattgataattttttcagggactatgagctggtaaaaaaatctgatgcctgattacacttaacattgcataacttgatatttagattatactatatgagaagcccattatagtacattaaaaaaatcctcaaatagtaattatcacttatttgagaatccttattctgtagactttacacatttttgaaacatagtagaaattaatattgatgtatctattttagcctgtatatctaaagtatcaaaaatataaatagggttagctatttactaatttactaaacacttaacctctgtgaaaagcttctgactactaatattgttgctgtttgttttttttttacaccataaccactcttcgttgaccactgcatgcagatagttggaagtaaagttacggtgagtacaaaagatgtgttttacccttagatatgaatttgtggttttgtaaattgtgatttttgcttgtagtattttatatgtttggttcttttggtatatattttaccaaagcaatgagatgaatattatgatcaggtgattagaatttagcctggacaagtattttttctgtggtttttgggagatgttttagaactagaatatgcttgtatattttatcttagaagttttcacctttttttttgtttttggaattatgcctgtgtcagtctttatgattctgatgaaattgtatgttttacctcaatttatcaggaggagaatcctaaaatgttggtttatgctaacaggaattcttattaaaatatgtcactttgatttcagtatgattgagcacatagagtaatgaaaacaaccctttccatgcagtcgggaggcctgggtgcttgtctttgttgtatgctactaatcagcttttgctactttgggcaagtcatgtaatttctctggggctcaattattaaatggataaattgaaatgattagctgaaattatcttttaaggttctttccatggctgtcatttaaaggttttatattcaaggcactatatttcagtgctataattacatgatacactattatataacacgcccaaagtggcccgtactgtgattgagagctgtttgtaattaccttatcttcatgactaagcactccctagagaacagggtggtaggaaacattatctttaacatcaccgagtactgaggtatctagaatagtggatttatttgttcattttgcttttaaaaattgattccttcttttcattatcttactcttcttttttttttttttaaattcacgagacatctagggggaaaagccatcatcctttcaggataattttaaaaatcgaatatttatttagtgcttattatatgccaagaattattctaggtgcactgatgactggaaaataagaatgagataggacctagttgatatgtgttgaaataatcaaaccttaaattatgcatgctgactataaatgtaataggaattcataagtaggagagagaagtaaggttggagtaattagagaaaaatctgtgtaaatttctgcacttaaattgggctttcaggga

SEQ ID NO: 138184 - DNA, 1796 bp, Homo sapiens
tgtgttcaagaaactaggtctaacggggaagacagacaggtaaacagaataaagataggacctgaagatgcaatatggtaaaatggcaggccagcaggctatatgtagtgtatatatatatatatacacatatatatatatttcccagagtgttttgaaaaacagtataatgaggtacgtgttttgatccacaatgtaaactatttcatacccattgtcttatctgtgacctcctcacatttgagtttgcaaatcctgctataaagggaagaaactataggaattagcttctagaggaaatgattaggggtttgttctagagtttaggtgggatggttgtcttaaggaagaaatttttttgtttgtttttttttctgcaactaaagggaataagaaaacaatatgtaagatcactggtgaaaaccaggtacaaaagggcttttgcatcatggtctcaatcttcaacagatggagaggtttattcattgataaaaagggcaggtaggaaatttatagaggtgtttcaaaaagaaattctagaataatcactttaagtattgcatttgcccagagattacgtacattggtccaaaaatgagtgatacgaaagctagactgaaatccaacagatggaatatgtaatgaactaggaggtcggcatgggcctgttttgcgtttgtctaaccaatgttgattagaagcagaaatggaggcatttgaggccctcctgatcttgagctaccatcagtctttacttttcactatcctatataaattgtactttaaaagtcaagccaggaaactgcctgttacctgaacaaaaccacccccttagcctcaggcagtattgcttctgactttgctcaagggatcttttttgtatagaatgttttctttcctttgtcaacattctagccatcctccacagctcttccatgaagcctgtcttgatcttgatccgctctcccatttccacctacagtaatatatctgaactcctatagcactttatttttaactcttagggagtcactcttaactttatcttatagttcctatttctttatatattccttaagggctttcagaatactcctattttactttatgcctgtagtaatttatatccttaaataatactgtctcacatactatgagtctttgtatatccacgatacagactctatgaaggaaggcaaattttagtagcaatcatgggtttagaggcaaatggacctggtttcagattctgtctctgctatccaaggtcacatactagctgtgtgaccttggataatttacttctctgaatctcagtcttttcattgataaaatgaagagaataatactaaatttgtgatatttttgaagtatattgtttatgtttaatatatttaacatgtaaagaatcttgcaaatagtaggtctgaattacatttttgttaaatgtcttgaattctacaaaatgcttgatatgaaagacataaaacataaagactacatggtaaaatgagataagactgagctgccttttttgttgttgttcagtgttcaagatgtttgctatttgaagatttaaagggaaaaatgggatttattctgggtcaagaatggtgggaaggattcagctggatgctggaaggagaatgttttgcctgtttattggaagctatttgttatgtggtgtggattattgctgggctttgaggaaaaaagtaaaatcatatatgatctcaagttaatattgacaagattattttaaagatttaataaaatagttgaggatttggtataga

SEQ ID NO: 138185 - DNA, 1033 bp, Homo sapiens
aatagtgaaggtcagatacaaatgcatgcttctttgccctaatggagcatgggaatcatgagcactaactgaatgactgttgcaagagttttctcaaaatagagccaaatgaactcccacccgccagccggccctcttccaggctgacaatgaaggtaatactgagagtaagtttctgttaaaagtataaacatggctgggcgccgtggctcacgcttgtaaccccagcactttgggaggctgaggtgggtggatcacttgaggtcaggagttcaagaccagcctggccaacatggtaaaacaccatttctactaaaactacaaaaattagctgggcctggtggcaggcccctgtaatcccagctactagggaggctgaggcaggagaattgcttgaacccgggaggcagaggttgcagtgagccgagatggtgccactgcaccccagcctgggtgacagagcgagactgtgtctcaaaaaaaaaaaaaaaggataaacatatgatcaggcttaaaataataaatttagtgttatctatgtattacttactataagctgcctgatagtaatatacctaaaataccaccaagtgtggcagcatgctttgtaggctgttaagctgctactacattaataaattgaagttttattagtttatttatagaatagtatttgataattacctcacgtaatattacacttgtgtcaggccaattatttgaatatgttctgtgaaaaaagattaaatcttatttttccttttttctcctttttataattgtgtagtccagaagggggagacaaaacattgattattggaggttgaagtagctgcttcgtgatgataaaacattgtgttcttgtattccaatttgatttttttaaatgggtttagaaattgtaggatagttgctactgtaaaatatttagttttatggtggtgataattttgttaaaaatctaaattcagtcagaataaaaataatgccattattttaaactagcatatataaaatagaaaaactcatttgg

SEQ ID NO: 138186 - DNA, 1051 bp, Homo sapiens
taaaactaaatttcttctattgtaatttaggtcccttgcctcttggtaagttttctatttctgctgaggaccgttgttcatcatcacccatgcaatctctcttagagtactcataggtttaagtggtccctcagctgctgcttctcccacttcctttaatttttccatataatactgccttctttttaattgcttttagagtgtctacagtttggggcctcagaagtggaaatgctacttgataatacacccaatctaaatgttcattcttattttactcaacgtgtgcttgtgtgtgtgtgtgtgtgtgtgtgtgtgtgtgtgtgtgtatacttcctcagttttggtggtgcctcttctattgatggtgattgttatttttttgttatacagatgtgactaaaattgagagttttttctccccgttctcttcgcattatctaggaaactccaaagatagctcttcatcataccaactagaaacatcttgagtgttcacctggagtttttctccagttgttttcgcttatagcttggtgtgcgaagttaatcatacccgtaggaaaaccaccacatgaaatggatgcttagagcgtacgttaaaacacagtgaaaatcataatatttgggctttgaagacctgggggtttaggtcatggctctctctcttaatggctaagtgattgggggtaaaacacactcaacctttctggagcctaagtctctttatctgtacttactctgtcatcctaatagagttactgaatactttgtaaactgtaaaacacagtacacatttaaatcattatagtaatcagttaaggaagtgattctcatggtaattcctaatatatatatttttgaagaatgtgttgatcacaactactgccaccttttagtgacacatacatcaatgcatttgttcctttattactcagtgttagtttagaagccagttatagttataaactttgtaaaagctgacgtcttctaaggtagcccctaggctacagactacatgtaaagttaccctttttatgaaaagccacaa

SEQ ID NO: 138187 - DNA, 1005 bp, Homo sapiens
gttgttgcctaatatagagcccgtattcaaatttctccaactatcccaataatgccctttataacttcttgttttctagaatctaatcaaggattgcacattacatttatttgtcatatcttcctaatcttctgtagaacaagtcctagacttaaaaaaaaatttcatttcattaacattttcaagagaccaagacacttattttgcaaaatgtttctcagtggattggtttcattgtttccccatgattagattcagggtaaacattgtgggcaaggatgctacacaggtgatgttcttcctcagtacatcacatcaggaggcacagggatatcagtttgctccattattgatgatgttacatgtgatcatttggttggagaagtatcttccctatttgtctttgtaattaataagtgatatgtaggataatactttgagatcatgtaaataacctatttctctgaaacatttcacatggttttaaaatctgttgatgagattcttgcctgaatgaattataactaggattgctacaaaatagtgatttttctaattcattgttacttctgtatttatcatctggtattcttctgtaaagtagaactttcccttacctctttaaccttctttgactttttaaaagaaatatcagcatggactcacagattctttatttaaattcaattaactaccctaccttattgatagaaactctataaaatccattcaattgtttactgaaaataacacataaaataaagaaatcaaacaattaacatctgttggtttttactttatgaggtaactatacccatactaactcattaagtctcatctagaagcagttctacttttccccctagaagaaaacattagacaggtgcagtggaatttgaagtaatgaaatgtctgatgtgatacatttattcactgcatttgttatatttaggccttacttatattcattgctgcataatccttctgaatatcttaaacattaaa

SEQ ID NO: 138188 - DNA, 1027 bp, Homo sapiens
gtggagagggaggggaagaaaaaagggagaacatgagggccagccagagttaaagaagactctggaattacatttttaattgttaagtcattggtttaacgacaagagaaaaaggcatgttctggctggtaactgacttcagaagcctagggcttcttggacagaagatacaaaggaaaaaactaagagaccaagaaggaagagagtgaacatgatcgttcatagtggtaacatcgatggcttgtagatattaaagccatcactggcagatgcaaactagagatggtggtaacaattttctgatggactttaggagtagtgaccaagctagttggatggagataaatgtaatgaagacatatgtagaagagctctttatttcagcaggtcaaggagtaaccaggcccaaagggcaaggtcacaaggcattgcctctgtgagttttcaacatgcagatgagtgatgtcaccagtttgagaagcctactcaccctcctcccagtcttgattctgaggacagatacttgtaacttgaaaaagttctctcccttcctcctttgggaatcactcctctattctgtgggttttctgactgtatagaaaaatctgctggtatcttaaaataactgctaaggatattgtgtgaatgtagaacctgtaacacacactgttcggtcatttggccctagttaccatccatctgcatctgaatatcccaggcatatctatagcagattgtaacatgttcagatcactgggaggtataatagtacattgtagacagacagagacatattttaacctaaaatcttaaaaatagatgcattggaatggatactctgatctccccagaatattttattttcctaaaatgcctcattcttttccgatctttaggtaaggaggtattttgctttatcaatctgctttccagctgtttgggatttaatattccacatagatgcatgcattttctttgtaaataatgacaaagacagattacataattacaggcataaaattatctc

SEQ ID NO: 138189 - DNA, 1912 bp, Homo sapiens
ggactaacattcaaactgtagcagtccttatataggagccacaacccaaaccttagaaaattttgagctccctggagcaaatggaagagcagaggagaatgtccttgaggactacagggaacaagtagatgagtagggtcaagtagaaactttcacaaggttaaggacacctgtgtatgtttgaaggtagagttggagaaaccaagggaggtaatccaaaatgtgattatacccacaggcccttttccacagaaaggtactgagagtcccctgttgccatcagtgaaactttacactattatgtagtattaaagttatttagtgcagtagtagtcaagaatttggcagctgaaatgagctaaatgcccccttgataacctgtgaagatgttactatcctactgtaagtgctcatctgattaccagggagtcatgaaggtactgtggagaaaggggcttcaggtaattagaacttggaagtagccatgtctgttgtgaagagctgggattgtaaacacattttgcaacagtataaaaactgataacaaatataatttagttattctaaatgtaattgttactacagcggagataacagatgtatttagatcagcttctgtttgtgtaaagaaaaatgtaaactattgattccaatttaatgagcactcacaatggttatagctgtgttatttacatagctatgtaacagaggaaacaaatacctagagaagataaatgagagaaccccaaactgaaacacctctcactgggctttactttcactgctgatgacactaatccttttactttactccagcaataatttaatgttttgttttgcatactagaatccttctagtattaggaagaattcaaaaggtaagggagaacccttgtcaatactatataggtaattgctagtaaattttcttttaatattgcctatgccaaattttagaaaatgtaataatcgaagctagtatgcaagcagtagcttctgtaataaaataactttatattatgtaccgtgatgtaaaccttattgcttgctttgatttatatgcaaatatttctttttcttatagtttatactgctttcagctgctatcttagtttttgtgctctagacagtctccattttttccgtgattaccacaataaaataggcaagcaggaaaaattatggctacttcctgtctaattttgtgtatttgtttcagtagcagtaccaatcttttaggcaaccagtgttgtcgatgccatgaatttacagtaaacctgtggaattcacgtatataaaacatagatgtcatgctggtgaattcaacttacaaggcatggaatagaactcttgcagtgaggctattagtttcaggtaatttaaatctcagtgggaaccaataaatggattttgaactaatatatttttgaagtcttcaaagataggagaagattgtaatattctgagtaaagaaaaaaatcatgggtgatttttttaaggtaaagaggtttaaatttaatgaagtgattaaaagtaatttcaagctttattttccctctataaacattgtttttagttgatttaaaggaaattggttaaaaaattaggcttcttttcaatataatgccaaatagaactaaacatatctttcaatgttgagaactttttctaatgggaggaatgtgaaatgacatatttctgaggacctacacagagcctaatgtaatttattcaccaatcccattgttgattaggatggtagacattactcttttctcttttttttttttttttttttttgagacagagtctcactctgtccctcagactggagtacagtggcatgatcttggcttactgcaacctccgcctcccgggttcaaacgattctcatgcctcagtctcctgagta

SEQ ID NO: 138190 - DNA, 1315 bp, Homo sapiens
tctatttctgtcctagcatgttcggtaggcaagcctccaataacgtttactgaccacttactgtgcttgccaggcaatgtgataaatgtttttttttggatgacctcatttaattctcaccgtaatcctttggggagatcatttttatctccagtttaggaggcggctgaaattcagagaagttaactaacttacccagggttagttgtgcctgatgctcaaccctgatgtcttaattgctatactgtgctgcttcctacccaaatgtgctctttgagtttcatgatatggtatttagtaggtttgccccagtctctacagggaaacagggaagattgtagacgtaagaatatacaagaaatgctaagtggctctttattcttctgagagtttctagtaggggaatttacctataataaatgaaatatagacctatcattccttacttttatgttccaaattgtgaaacagaatgttgttttatgatatttacagatctctatatggttttgtacagttatacttcctggattgttttgatactttcttacaagcagtccttgattgctccttttatagacggtttatgtaacctcctgaacaagaatgcatggccaccataatgctggagctctcctttgttgtttttagtgtcctagtgctaccaaagctggaatggtggtcctctgctcctgacaaacaactccattttcagggtttcctcttgcctccatccttccctgccagcagttgcaaggggattcagagcttagtacttttattattatgggagtatttttcaggatagctttactgcttaagcattttatttaaacttacttttcttgtgaaatatgtcccagagggttttattttttattttttgccaactgatttacaaatagactttagaatacaaaccacttataaattgggactgcttgtataacacatagaggtttgaggatactttttctatcagattagattgaatattcttattaatttgaatcctgtgataaatatgatattgtgtatgctgcagttagtttaacacttcagttgctataaaagcataatttcaatagtatgtaaatttaatgtaactttggagacttagagttggtttgttcattttgatgttaatttatttaaattttagatattttaaaataagtttgtgtaggcctggtaatgtattttattccaatgtcattatattttgaaattaaagttactttaaaataggctccaaggaggtgttagttaaattactagtaatgcatttggatgctctgaaaaaagtatacttgtc

SEQ ID NO: 138191 - DNA, 1335 bp, Homo sapiens
cctctctatcattaacatggttgatcgtcagtgagagctgcagtcaaacaaaaatggaaactttgtaatttatgtatagctttaaaaaggcaaagaaatgaaggattattgcagttggtgcaatccccgatacaattaatatcaaatgcatataaatcctattagagatctgtcatgggtgaaaaaggaatatgaaaaatgcgtgacctatctttattagattcagttagagagagaccatacagagctaaggagctttacgaactgcatattaatcataaccagtcttctgagataaacctatttcttgtaacttatcaaagccatacagaagattagtcattccctttggtaaaggaatgttttacatattgttctgagttttgaacatcacagctttaaaagctgattaacagatattttaatactaaaatatatctcattgaattatatagcttaggcagctattatcctgtaatgctacctcaatagggagatgggctctttgtcaaaacctctgcatcattgttttgttgcatattgaacaagacactctagggagttgtattagagaccagacaaaagaactttgctacagcaagcaatcattaaatcatgcagaaatatttctttcttaaatctttactttaagcaacaattggtagatgccagcaccattttttaaatgtcactttcaattcctgaagtcttttatctctttgagaaggaggggaattagcttaaggggacggttaagaccatcatgttaatacacggtattactaaagataggggatgtattaacagctctaatctgacaaagataattaagattgtattttaaaaatgtgagagagggtttcataagattatgaaacttttagataaaacataaagactaacaggtataaaatggattttgtattactgtctcacaaaacttagagatgttgagtgatataagcatttagtttctgacctcctgttaccacttcagtgcccagaatttatgtcatgtcaataaaaatacagaaccatctcatgatgaagatttctatacttgataatatataccattttatatatttgtttttatatttctaaaataataatcttgtttaaaaagctaaaaaatactgaagtatatgcattagaaataaaatctccccaccctacatggtagaggtactactattaataatttggtatataatccttctaaatattttttaaaatacatttattgaagggatacatacacagaaaagtacacaaaccataatattacagctcagtgagttatctcaaagtgaatgcacacatataaccaatacc

SEQ ID NO: 138192 - DNA, 2084 bp, Homo sapiens
ctcccagtccactgactcaaatgttaatctcctttggcagcaccctcacagacacacccaggaacagtactttgcatccttcaatccaatcaagctgacactcaatattaaccatcataatggtagattaatttacacccctaccagtagttatactcatcatcacttgatattgtcaatcttattaaaagatgttttctttactaacttagattatacataataaatgataattttatttttaaaattaaagaatgagagaccctatatatcaatttatgtttgcctgctcagaaaaattcatacagaaaatctgatatgttagcccctaatttaaccaatatgttaaatcttaactagcctttaatcttaaaatgataaagaatctccacagcgtatattatgtaatttatatactgaactgattttcattctcaacagttgcctagtagtaacattagtgtagctatgcagaacaaagaaagaatacctaagccctagataacaatttctgcacacatactctattaatagcactttccaaaattatctacgatctttttcttagaactcaaatccaaagtccttttttcaaatgtaatcttcaaacttgttttggcatttgataccacctactacccattctttcataaaattcctgtgctggctgggtgcggtggctcacgcctgtaatcccagcactttgggaggctgaggcgggcagatcacaaggtcaggagtccgagactagcctgaccaacatggtgaaaccccgtctctactaaaaatacaaaaaattagccgggcacggtggcacgcgcctgtaatcccagctactcaggaggctgaggcaggagaatcgcttgaaccctgcaggcggaggttgcagtgaaccgagattgcgccactgcactccagcctaggtgaccgaaaaaaaaatttcctgtgctttctacttatctgtaccctgcttctctgttgtctgtgtcctagtatctcatctccctgaccggaataattttgtctgtttcctgagtttttgttcaaggctgtttgttcttctcctattaaaatttgcctggcatcttgagttcatattatcagccttatttggatgctcctaaatttacatcttcaatccagacttctcacctgcctaatggccttatattttcagatacctagaaggtatcaccttttatctcattttctcaaatttaaatatccaaagtaaaactcaaaatgttgatattcattttctctctctgcctctgccatcctctctaccaccctaaagtcccaacattccccattctccatttagcaaataaagatagtagaaagaagtgttttattaagcattgataagtagcaaaagatagaataatttctattgttggttaaatgaaagataagggaaggaatgacacattttatataacgcttattaggaaagaaatgtgctgtagtccaagtaatatgaaatattattaattttaatattcattcaccaaacaccaatcattttacagtgataatttgggatagttaggcaagttaattttggaaaatagtgcaaaagtagagctagatcattctaattgaacaatgataatagttcagttcttttagtgttccaaaaataaaataataaatatatgctaaaatttaaaaataatttattcagcataaataaatgataactatcatcttgaaaaagtaattgctctgggtagtaacaaaaagcctgtctttccagtgaggcactaatgtcctctgaatctaaatggagttattttcaaacttttgagaaaagcatataatttatcagggtgtcatttttaaatgtggaagcccttaatctcataaggaatgaggagagccactgaaattctttaatattctctaacatgcaaacaaaaagtagggtaatactgaggtgagttccctggtgataaccctggcaacttattagggtttaatataggcaaaataatgggaatgcctagatgttccaggcattattctagcagattatcagtacattctagtaggacagattaaaaaaatgtatgtattcatgc

SEQ ID NO: 138193 - DNA, 1345 bp, Homo sapiens
aaaatgcagaaaccagaagccagaaagcaaaagtacattggatcatatatagacaggacaaatgaaatataatttctttgtttcttttttttttttttttttgagatggagtttcactactgttgcccaggctggagtgcaatggcacaatctcagctcactgcaacctccgcctcccaggtttcagtgattctcctgcctcagcctcccaagtagctgagattacaggcatgcgccaccactcccagctaattttgtatttttagtagagacagggtttctccatgttagtcaggctggtctcaaactcccgacctcaggttatctgcccacctcagcctcccaaagtgctgggattacaggcatgagccaccacacccgactatgaaatataatttctaatctttacattttcaaattacaagccctcaatgttctaatttcagcatcagtggtgaaatgccatactagaaaactgaggatttatctgtaaaattacatataagtaaaaggaaaattcccaaaacagattataggattctggatactgaggtagaaatttgtgacacgactattaggtttctgcatagaataatcaccaaacatcctgtaaaactacacctgtgtttataccagtgatagcagcaacataacaaactaagagctcgctattcaaatttctcttgccaagctttctggttttcccaattatagtgatggtgaataatggggaaagtcagcaacaagggcagcttctacataattggaaaaggtaatttcctatactatgtgatttatgggctaccctaaggtcttatctgccttcccctttatctaaccagaaataatcagcattattccactcaatagataataacatcagaagaaacgtttccaaagagtcactgttacacagctatacattacctaggattttccattgaaccttctcatattctctcttatttgatttttagattagaaaatctgcacttaaaaagaatcaggctcaggggctaaagtggtgggatattttcaatctaagtcaatttcataaggtatagaaacattacagtgaaatactccaccccgtggcagcatggtaggtaccccagtgagagctctgacagtcaaacaaaagtttgacgtagcacttccccagagtggactaagttctctttagcatggtccccctatattaccaaaggaataaaatgttaatatatcaagtttttatttagttttgaccacctaaataatgcaggcactgaatcctttcaggagtaaagtgagaaacaagtaaaaaaaaacctactaaatataaccataccagatatcttcttgg

SEQ ID NO: 138194 - DNA, 2015 bp, Homo sapiens
aaaaagaattaaaatggaaagatgtgatagtgatagactaacccctttatagcgatacttagaaaaggctttcctgatgtagtgatttgtaacctgaaacctgaatgatatgaagaaaccagccacatgaagatcaggaggaagacctttctaggctgagggaacagttaaactaaaagcctttaatattggaaagaacttggtctggtggcaaaacaataagaaagccagtttgggtaggaagtagtatgagcgccaagtgataggagaatcgatcacagagtgagggggaggccagatcaagtagagctgtttacttatgttaactgaactaaaactactatttgtctttaaagtaaaatgctttctgagtagccagtcctgagtactttccagctgctcataagccaaaagtcaatcacaatagtttaggcttcacttaaacacaggcaatctaatgttccattctttcatttcatttcattatttgttttatattctccttcactcttttttttctcctggtgaagcagcagaacccattgactttttgctgtactttggatttcagtctctgacttccttgcacatgtgcacacagaaggaaagagctgtgaaagagcttcagccaaggggttgggaagcaggagtccagaactttctagtttgctagatggatatgcagtcagtgatgatcacacccatgtctcactggtgattgattgaatcaaccatttaacatttttgaggttatttaaaaagttggaaataaagtgaaatctctaaagaatatactaatatttataattttgataatgaattttttttgttcttttaagttactttatggttgaaatgcagcttttcagtcttaaatctcatatcagtcaccttcccataattttaagactgcagtatttatttggttctattatataacttttatggcctttgaaagtaagagagtgaatgtaactgatagttttctgtcacttatactggtactggatctgacttttagctcttttaaaagttattttcactttggaaacactttaaagatgcattgaactctttttctacagctctataatccatttttatacacaagacatagtagcataaggctcccacatacaaggctcacaacaggcaaaattccatatgtctgcttcagatttgcctgctgaatacattgttgtggctgcttctaaaacattaaagacatacctgccaggttgtggatttttttttttgtcttgactttttgaaagtttctgcactattttttcttagattacatatagaatataaagtacagttaagtcctatgaaagatgagaatcttatagaccttctggccacaagaaaccatcaaatttacattaaactctacttctctgtattatcaatttctctcaataaaaatatgaaaataattattatggcatgatacagtaaaacacaggaatagtggatttagttccctgaatactgtattcctttcttccttcccttcctagtacccactggcttgctgttggattgtgcatgaaattaaaagaaacttgaatacattgtgccctggaattgtttgaatgaaagtgattgcattaattcaaaggtttggatgcctttaagcatacgttgtaaaatttttaactggagagataggtgaattttaaaaattagagacatttcaaatcagtaaaatgttactagagcagtagacaaagtggggggaaaagataaattgattccctatatcataccatttaccagaataagcttcagaacaatgagttataaatataaaaccatacacaaactaggcctgaatataggtaatatttacttgaaataagagcagctttgtgaaaataaaaacaaaagtagaagataaaagaatatatttttgactgtacacaaatgaagaacttttataaatcaagaacatagtatatactattaaagggcaaatgccgattttataacaattttagacaattttgata

SEQ ID NO: 138195 - DNA, 1076 bp, Homo sapiens
cttggtggaaggggcaaagtaagccacagcaattcttttagttagcatttcttttagatattcaaaaggacaagtatgttatatactcttgatttgattaaaggaaaacatatataaagaaatataaaggtatatatataaataaagaaatatatatataaagaaagatgtataaagaaagaaaatagatatataaatatcttcacctttccctccacactctgatcattctagtcacatctggtcttaaactttagacaggacatcatattagtaatttattttcaccacatctgtaggggtcttttatttgtagattctatagtgataattaatttaatgggagttaacatttagaaatagatttgtagccaggttttgtgctcttttaatgggctgggaagctaaaaataacgccttgtaagggaaacaattgcaaacagatgaaatttaactgagcaccagacattcagagttgaagagcacacatgggggaaattgtatgtccttaaattatcaacttactggaaatgaaatgctttggtacagatgtgaagagtaaaacaaaaacaagtctggtagttggttacatcttcccgtctgctcttcgtattacaagtaggagtcccactgtccaagctcatgacactaagctcttaaaaaaaaaaaacaaataaatgctttacaatgtcagctttagataatatattcagaaagagatgataacatcatgtatagttgtaagggacaaatatgctagttcaatttatctacagatgttcattgggatgcttcccctcaaagtgtttttgattttctcaaaagaccaatctcaggagctatttaagaaaatgtcatttgatttgcatatgtaaacaatcaggtctatgaaccatatgattttatcccctaattatttatgtaagggtttaaagtgagcatacatcacctatcacaaacctatcctgcaaattagcaaatgcatacactaacaaagacaattgctctgcttagctatatctcttaaggtgagacatttaatcccttggtaagtggttgtttatatgtaactaaaa

SEQ ID NO: 138196 - DNA, 1449 bp, Homo sapiens
catctcagcctcccaagtagctaggactataggcttatgccattgcacctggctcaacactctttttttaaagagggaaagggcagggtcttacccaaggttatatatctagttctagagctatattgctagttatagattacttaaatgtactatgtgaaatttaatgtttaaattatttggttgaaattattaaacatttgaaacacaattatttttaatgaagtgacaaatatgtattaagtttaaaatattttttgaaacacattcttgtacttgaacacattttcttgattaaatattggtataaagcaggaaatgatctattaaaacaaaacattcttagaaaacttagtagcagttactccatatcaatagttgagcctagattagatcataggtttaaagcatacttctgatattatctgttatctatctaacactttgaaatgatctgaatgtcttattgcaaaacacggggaagatattagctaaagatttaaagagaaaaagcaaaccaagggctggaaaatgattctctgagtagcaaattggcagagttaaggagtttattgcaaagaaaaaattattatgtctattatatagctattaaaccatagtccaggtgaagagagcatgttagattaaaaatagcattagcaccccaaaagatctggaaggctacttttcaaaggatagcaaaaccaattgtgttacagggacaaaccttacttagaccaataagttataatgcctttcaaactttttggtcttaggggccatttacactcttaaaatttttgaggaccctgaggaacttttttgtgtggttcatatctattgttattttctgatttgatttaaatctgagaaaattgtaaaacataagaacagtccatttgccgtcagagtgatgatgccattccaggtcatgaagcctctggaaaacaccactgtacacttgtgagaacacaggagtgaaacagacaaataacttttttttgttttggaccgagtttcactctgctgcccaggctggtgtgcagtggcgccatctcggcttgcagctgggactacaggtgcccactacctcgcccggctaattttttgtgtttttaatagacacgaggtttcactatgttgaccaggctggtatcaaactcctgacctcaggtgatccacccacctcggcctcctaaagtgccgggattacaggcgtgagccaccgcgcccagcctcaagtaacttttagtcttgttacaacaatagttttgaatttacatacacctctgacagggtcccaggaataccctggaatcctttgaccacattttgagagctgctgctcttctcacggaggtcagtgtatatggacccagtaaggacagcagtgaagcctgggacagggatgagaatgggcctgtattactagaattttgtcattttctc

SEQ ID NO: 138197 - DNA, 1286 bp, Homo sapiens
ttgagtttttgttatttactcaacactacaattaagtgtggagaatacagaaagaaagtgtaacatatctttatttcagttaaaattttactgtttgacctgccgagagaggttaattggatagtcaaattggactttaaaggatcttcctgggagaagaccaacaagaacggaattttaaaaagtggcagtgaggaaactggctcaatccaaacacagggcatgtcctcagcaaataagggaataacaacaaaaccaacaacaataacaatggtgcttcacattaatcgaatacttattacctgctgaacactgttttgaagtgcctttagttcatgaactaatttaattctcacagtgcctccttccaaatagaggaaaaagagatctctcccctcttccatggctacctgggctgaccccaggagggcattaaaagcacctaaatattcttgggttggatggaaaatccttgtttgggattttaaagacctttccaaaagaggagtcaggggcattttgtaatcagctttcacctttccctaccctgtcaggcctaatgccaaatcggaaggaggagctttctatattttatacattgtaaacatttattgccttggaaatatattcttataagattttgttttagattttatgtttaaaggattttaaaaattgagtagagatttgcttttatcacaaagaatgctatttatgtacaaatgcagttatctgtttaactacaaaaaatgagttctctgtgttgtacatgggagggtgatgtccaagtatcacacttgaccaccagtctagttttaatctttttcttttacgttttttgaggcagagtctcactccagttgcccagactggagtgcagtgatgtgatcatggctcactgcagcctcaacttcccggactcaggtgattctcccatctcagccacccgagtagctgaaactatagatgcacgccaccacagctggctaattttttgtatttttagtagagacagggtttccccatgttgcccaggctgttctcaaactcctgggctcaagtgatctgcctgcctctggcctctgtcactgtgcctagccaagcatggaattttttttttttcataatttacataggtttttggagaacaggtggtgtttggttacatgtgtaagttctttagtggtgatttttagtcatttacccctcatccccctcccaccgtttctcctaagtctcttaaccacagaggtggtaagggccttgaaggctaggcaagaatttat

SEQ ID NO: 138198 - DNA, 2526 bp, Homo sapiens
tgtgtgtgtgtgtgtgtgtgtgtgtgtgtagtactagtagtagtagagagcatagtcaaggaaataactacaagatgagatagtgaaaccttttgtttgatcaaaaaaagcaactctttgagcaattcagctccactggggcaggaactatgttttctttattcctccctctgtgcctagaattggtagatatttaaaagttttgattgtatcattgtaagtaaaagggggacttggattttggttataaaaacgtttatgccactttcaggaacagatatattgtatcataatgcgataattcttaattgaaatggcggcctttttgaactcttgtgggcacatcagaactattttactatatttagattgttcatgtgtggcttttggaacttatttcccatcgtgtaaatacagtgtattcatctgttgatcccctacttattaggcaccatgccgctactcttatagatgtcatcttatttaccagatatcttcagtatgtgtctgaaagcagatattttaatctcagtttttcaaattgggagatcgtgactcagaatttaagaatgctgcccagtaagttgcttggcagtaagctcttgggcttacatttgaactcaggttgtgtttgtcttgaatatccttgatggtcataaatctttatcttctaagaatggaaataatctttgaaaatagccaaaattttctcccttaaatttgatgaataagatgagtgactaaattgatcaaattctggccttaaaatataaagcaatgagacgtgttttattatttgggtggtaaactgtccctgaaggtaatttcttcagaatcaaaacagggatattcagcaatgttttcagcagtggcagcagaactatagtaagcatgtggcccctgagataactgtgatagtcaatacacattaggaagattaacttctgtttgttataaaacaaaacagaatagttattttatagtaacattttcatgatgccaaaataaatactttcatgtcattatctaattgtatacattgttttaagaaatgtaaagaaatactgtattagtacaaaattacaccatttatgttagtgtggaatgtttgatcattttatttctaagggaaaattacaaaactgtttagttcacctcagtttctataatgcagcctctaaagtctcatttctttaacagggccttgtgggtgttctaaaggaatgattgaaatgaaaagaaatgagagagtcaaacagtgtaccgtaatagatgaaatggaaagtaattatgttaatgttgactcattatgaagctctaaccatttttacctgctcatttctgtgtggaaacctgtgcagctgagatgctgaataagaaattcttgtacaaatgagcctagaggcatgtttctagtataggagctaggtctatgcagaattataatgaatttccctaagtcattatttaaatatgctatcagagtaggtgattctcctgccagaaaatttggcttctaatgtttatcatcaaatttttagatgtatatttgaatcttcattgctgcatgtaattctcatttgttaattagagagaaaaaaccctatattccacaatacatctatatcatatatagtgtcagattttacaggataacctgtaaggaagggatttatgagaaaaaaatgttagcagggccaaacaatgtaaataaaaacatgtaagtgcttaagaacgtgagatttggagtcagatgggctagattgaaaccaaatctgtctgactccaaaactgaagcttttattcatggtcagaaaattttgaaagtgtcactcccctaaatgcctataccattccccccattgcgcttaaatgtttctttttgccagtattctgtttctaaagcatgcatttttcagtcataatgtataataaagcttaatggtcttgcctcctatgactaaaatgtcctgccagtattctggaaataaaatattatagagaatctctctgattatgttaaattgctaacgatggcttaattacttgttagaaaaatggtacattgtcatttttaatttacagacacttaattttttcctatgctaataagtgacttctaaaacaattaaatccctgaaacaattaaatacctaatttttgttaaattatattcaacattaatttaagagtttaattaaagctaaagaacattttacctcgggcatgaactttttcccctttctgtcagatgtgaatgcttttaagtaataaacttaaatttcatgttcttaaaattaatgttggtgcttataatgttattttgtatttggtggtttttaatggcagtcttttatgtttggaatttcaatttttgtattatttcctacaaagatgcaagaactagttatactttacttttaacagtgaagtcttgatagcatagaattattacaccagaaggaatgtaaaaatttcatctagagcagagctgtctagaagaaatataatgcaaaccacatatgt

SEQ ID NO: 138199 - DNA, 2107 bp, Homo sapiens
aaggagttaggggtggggcagttttataggatttgggtaggtagtggaaaattacagtcaaagggggttgttctcttgtgggcaggggcggggatcacaaggtgctcagtgggggagcttttgagccaggatgagccaggagaaggaatttcacaaggtagtgtcaccagttaaggcaggaaccggccattttaacttttgggattcttcagttatttcaggccatctggacgtatacatgcaggcttgggctcagaggcctgacactttcctgcctctgttcatgatgttcttcctttacagaatgccctccttccccaagctacactaaaggtccagtgccatttctgttggtgtaatgtccctccataaagagtaattagagttactcttttctttttattctcctaacacgttttcatttacaggtttcttgttttccactttgtgtggtaacttcatgtctcttgcttgtttgatagtaaactccttgagctggaaataaacgtagctggcatttattgaacatctaggtgctagacatcatgctaggtatgtttcctttatatttgcaactccagcatcagaatagtttatagtagatgtgcagtaaatatctgtggagttatatgtttgcatttttaaatatccattggaattcctttaggaatcctaacttagcatttccataggaggaggaaaatgccatgtataaaatacctactaggtgctttacaaatattatttcatttagtattgtcaataacactgcagttggagtatccccattttagagatgattaaatgaaactaagtaaagtggtctaattacccaactctttcacctagtaaatggcagaactatgatctgaatccaggtatgactgaagagtgtctccttagatttgaaagtacagatgtagagtaaagaaatatactttagtgggggtaggaggtaacagtctttgctaactagatcaattgattcatgcaaaatgggtattaaggtgcaggcatttccatctgatagcctttacttccttttcccaaggtgcactagtttagtcatgttacttaatgtttccattcacctgtgttggtgaatactaaattttgggaaggttattattggtaacatactgatacagtttggatgtgtgtccttgctcatctcatgttgaaatgtaattcccattgttggaggtggggcctggtgggatgtgattggatcatgggagcgtttttctcatgaatggtttaccaccaccgccctggtactgtccttgagatactgagttctgtgagagctggttgtttaaaagtgtgtagcactctccgtgccttactctttctccatgtgacatgcaagctcctggttcgccttccaccatgattgtaagcttccagaggcctcccagaagtagatgccagtgctttatttccagtacagcccgcagaactgtgagccaattaaacatcttttcttataaattacccagttttaggtatttctttatagcaatgcaagactgacctaatacatgtacacatgtgaaatttcagttagtaagacatgactgtggaagggaaaactcttctaagttagtaaaaagtctgaattataggaccttttcttgaaagtagagtggtcgggagtaggccagcatcattgctagcataggactgttgtaggaaaagctgggttcttgtcacatgaccaggaaaggttagactcacagatacttggaagggcaagacaaatggaatttatggggcgaaaaaagaaaaagaaaaaaactttaagcagtgcacttaggaagcctgttaactactctcgccccactacacaggaattcaagagcccagctcctccctgcggcaaaaggcaggaacttccttggctcaaccctgctctcccagtatgcatgctggtggaagattatccgtggaccctccccgttatctgcctcctgcatctatcaggaccttaggaagcctgttttactgaatgtatgaaagcttttagtaattagcatatcaattatttgtccataagaaggggcttcacaagtacttgagggcatttgaaaaggagtagaaaactagc

SEQ ID NO: 138200 - DNA, 1041 bp, Homo sapiens
tttaaaaattattattattattttttttagagacaaggtattgctctgttgcccaggtcagagtgcaatggcgcaatcatagctcactacagcctctacctcctgggcttgagggatcctgccatctcagcctcctgaatagccaggagaataggtgcacaacaccacaaccaggcaatttaaaaaatttttttgtagagttggggtctcgctttgttgccaggctgatcttgaactcctggcttcaagcaatcctcccgccatggcctcccaaagtgctgggattacaggcatgagctgttgtgcctggccaaggttagtaattcatggagagaaaatgggattgatgctttgctttccagacttccacaggctttttaagtgaaaatgcaagttgacatatgggaattttaaaattatcattttgttattgattgctatgccaaccaatactcttttgtttgtttcttcccttactaatttaagctatttgacctggaactatagttcatgtagatcttgtgggcattttccaagtcgttatttctacaatgcctattaatatgtgtcttctatatcaagcaatggcactttttttgttgaataaatggatacaggggttgagctgttcataatttgatgcattttcaggctgttgtaagtgaattgaccatttgctcaaaatcagtgaacattaagctattaaagtaattttcatgtctgcattactgatgttttttttggaaaaagtatgaaattgaggaggatcatgataaaatgcatttatctttattctgcctttttgaagagaatcttaaagggcacaagcctgttggcagagatattcttaagtgataaatgataatgacaagagtggcgatggttttttccatcacagttttggggatcaaggtgagtcagagagaatgatatcctaaaccttagcttcttcattaaatgacaacaaaactgtcatttgctgatttttggccatcagaagtattatctagatcatattatctatttataactttgggataa

SEQ ID NO: 138201 - DNA, 1048 bp, Homo sapiens
tttatgccagaggctgcagattttttatgtgaacaatcagaccttggcgatgaccttgagcagtaggatataataactcccacaagcttagtgttccgatactggaacagtaggcataagtgggttagttgtgtgctgcatcatattggttggccagagaaggcctgtgcaaagaggggatatttgaatgatgggaaggagacaaccatgttcaaattcaggaaaggggccctctaggcaaaaagaagaacacatgcaaaggtcctaatgtgagaatgggttttgagtgtttgagtgccagataagagaccagtttggaagttagtaatttggggcaggggagggcatcagatgaagttgtagaaagaggtaggggaaaaattacccagggcctggcaggcccctggaaggagtccaaatagtccatagtttggatctctcatacttactagctgtgtgacctcagataaagttttttaacttgtgtgaatttttgttcccatttataaaatgtgtgtgattactgcttttcaagattgtttctaaggattaggataataaatttagtgagtagtacagtgaatggcacatagtacactcaagaattggatattgttgatgatgatgtttggacaggaaataaatgtccattgtgtacctaactatgtgtcaggcatagggccagacactttacatttatttatatttaaatcctcaaaacaattctataagatataatgaaactgggaaaaattgttacttgtacagttaaacagtggtcttaagtagcagactactggattcaaatcaaattttcatgactccaaaattagttatccctcactcctgtatcatatcgagggagtcaatcagttgtaatgtgttggttgcttttgtatgtaaatataatttgtgactagacgtgcttttagagatgaggccagtctttgaccttacatgaacagctcttgccaggtgggaagtttgtgaatgttcatattcctctcaatgcttaggatcatgcctcgttcctcctagaatttcttat

SEQ ID NO: 138202 - DNA, 1869 bp, Homo sapiens
tgatatgaccgcgaaaccaatcgaggcccgacagtggtttggtagagagaaagtcaagcaggtgactccattgtcagtcggagtatatgtcaaagtgtttggtatcctcaaatgtcccacgggaacaaagagccttgaggtattgaaaattcatgtcctagaggacatgaacgagttcaccgtgcatattctggaaacggtcaatgcacacatgatgctggataaagcccgtcgtgataccactgtagaaagtgtgcctgtgtctccatcagaagtgaatgatgctggggataacgatgagagtcaccgcaatttcatccaggacgaagtgctgcgtttgattcatgagtgtcctcatcaggaagggaagagcatccatgagctccgggctcagctctgcgaccttagcgtcaaggccatcaaggaagcgattgattatctgaccgttgagggccacatctatcccactgtggatcgggagcattttaagtctgctgattgaggcagggaaaacatcctttcatttttcgaagacccttgcatccagctgtgagtaattttgacctgttgactttttaggaagtaggactaaaaaaaaaaatctcaagtggcattctttgtcaactcgctgcttttctaactgctttgaacttttcggattttctgtatttgaagctcagagagagacggtgatggataaattgacaactctgtaggatttactagcaagctaatggaaacatgattttcggggaagaaaaactacagaaaatgtagaaatttattatttaattgtgttggagcttctttttccaaaagaaaaactagttgcagtcagggagccagcgaaaagacaaaaaaaaaaaaaaaaaaaaaaaaagtcttgcttgtttttatgttagacttattttccgtgtttggatttagcttattataatgatactgttatctcttgctcaatatagtatttagtatttgattaattcaaatgagctgaagatactaatttgtgaattctaatgctcagttcaaacatttatgtgtgatttgctcttattactatgaatttatgttttcttaaaataagattatactgtgtttaaataaaccatttttgccaggttatctttgaaattttttaaaatgtggtgaagttcaatgattatttcatatatgatgtggtatttggatgaaattacaatttattgtagttgtatggtaaatggatgccagagtttctgtaagtttgatgtgctggtgtattatttattttactaaatgctctgttttatgtataaaaaggtaatttttaggacgttagggaaacagctcataggaatatgaaacttactgagtttaacacaaatttattcaaatgttttattaaagtagtttacaaaatcttaactttcctgtgtgatttttttttctaagtacatttgaaaaagcctttttgttttatatccttgaggattaatagtttcacttatccagaattttttcttttctatatataaaatacccagaacatatgctatagcctagttctaacaatacattttagtgtagattatataaattatgtgagacttttaaataattgaccattaacgaaagccctcagttacctatacactaaagatggtgtctttcaagatgctaatttttttacattagaggaaataaaaaacatatactttttaatgaatatatgttatattttatatatgtatattcatatataatatacaaatagaagaacattatttgtcaaattgaatcatgaaaactgcaacaaaaaaaaaatctcttaaatggaacattgccagtactccgtactttcaggaaaactttcagaaaatggcctgt

SEQ ID NO: 138203 - DNA, 1701 bp, Homo sapiens
tatctctttactaaagtttatgaaaggaagcagtgcctgctgagaaatgaccaatgagtttggacagttttattcccagccaattcattgcaagatgtataggtatttggcaatacattttatgaagatccaaagaaatacgtagcaatagatcattgtcactaaggtttcccagcacatgacaaaaacagcaaatattgctttgaagaatagtatcacagaattgtgattgcctagaattcttgttagagttgttgctgaaattgcctcacagctttaggggtattttaccccacgaggaaattgttttttctgtttggttgggatccacttatctgccaaactcatggcatagtgtctgtattcacatcctatgatgatagcttcctcagccaatatttccaagccagtgaaaacataaaatatcttttcaagttgatacatgtgcagttatttgcattacctctggaatatttgtgtttatttgatgctatcttccctttagatttaaacatatttttctagtgtatttacaaatgtgcattttaacataatcataatgaaaatagatggatcttgacaacaatacaaattaggactagaaagcactttctgaattgtaggtcttaataagtatttaaacaacctgtattaaacttattaaaagcttggcaaagcggccaacagtacttagaaagttaatataaaggtaggtacagatcaatactcttagaacattttgcaggggactaactatgaaagatggaataataaggatactttttacaatgtagaaatgtgaacacggcttaaaattgtgagcacatctcataaagcagcattatgtgcggtattactaaagcaggtttttaaatattggtatttggaacttctttgctttcactttcaaatccataaatcattttagaatagcactagtatatttatacatacaatacgaaatggtaaactcattgcagttgtcaatttatatgccttttgttaaaatcttggtcaacaattcaaattcgtatcaagtatattcaggctcatttgactaagttgataccatatatattaagtgacatggaaattttaattatatactattagcttcaaaacataattctgacttcggcacatgcaatgatattacctcttaatagaagcaaagtagatttatgtgtcatacattattttaaaaaagaattaggcacagcaaatactcgagtttttgaagtattattaggagaaaatgctacaggcattaggataaatagtggttcttgtgttggatttattttattactatgtaagctccaccaaggcaatacattttctcgtttaaatgatgtgttttaaactagaaagccaatttttatataataatcatctaaaataattagaaacatgtaactggtcatataaaggtatgtataatctagcagcagaatctaggcacactgattatatggatttctgagtagaagcctaacttccctcttaaaacacttatatgcattttctacttattcaaaattagtcttgggaagaaaatgcttataaatatgtcatttgaaatatatttatttcgagttatatgaactaatttaactaaaggtcttgggcacatactagagttttaatacttctctcattattttgagaatattgtaaaagtagttgcagcttaaaataaaa

SEQ ID NO: 138204 - DNA, 1617 bp, Homo sapiens
gaaagttggaatgataaaagttaagaataaatcgctatagaggagttcatttggggagcaggaaaaaatcgcatatacagattagtttttcttaatttttttttttttttttttttttttttttagtttatttgtttgttttgagatggagtctggctctgttgcccaggctggagtgtagtggcgcaatctcggctcactgcaacctctgcctcctgggttcaagcgattctcctgcctcagccttccaagtagatgggattactggcgtgcgccaccacacctggctaattttttctatttttcgtagagatggggtttccccgtgttggccaggctgttctcaaactcccaacctcaggtaatccacctgcctcggcctcccaaaatacggggactacaagcgtgagccactatgcctggtccagactggtttttaaaatacgtgactggaaagttctgaatcatattgatataaaggatattagataaatgtgaattatcaaatagcactgtggagattacaagcattatgctggacacatactgcagaggtctatataagcatgatattgggcttattaatctgtgaactcacagctgatttggaatcacataataatgttccactatttaaaataataatccttagtatattctttgtcttagaaaactcatccatgcattcaggatcttggctctgatccttgtgtgtatgatttagcatctttgatattcctcgtatgtcacatttgctcattttttcacttgtgatatctaaatggcttttacatttccattggcaataatctagctcaggcctcactccatttggagacaaaaattgatagaggaagtgattggtctggcaaaacatagttactgggtttattgaaaattcagtataaccaaagtgaataaggtaaagtgcaaaaggataatgaagtcaaggaagttagtaggaagcaaccccaaaatggctgaccaatgtctttcatgttgagtatggaagcaaggaagggttaccaaggactgttattcccaaatgaaaggcgagtggctttattttttcaaactgattcctaatatttgtgaagtattttgtgtcagaccaaataccaactaatagttactacattttttgaagtgggtatttacaggtatatatcattgacatgtctacagccaatagtcataaattgtaatatgatagggctcagtattttatctattggtacatggaaaacagaaagaaagtatattttttggacatctctgatgtttttattatctaaagtatcctgtgccttgatgatgcaacccaaaattaataattaaaaagatgaaaaccacctcattggtattgtttttacttctacatataaccattggtgatatttttaatatattaacttttatccaatatttgttcatgaaaggaaaataaaatcttgtaacctctaattaatgatttttatgttgttgataatatagtttaatgagagtatataagaattgagaagtgctggattctattgttttactattaggaagctctgtattctaagataagtcactaaccttctttagtttcttcatctacaaaatggagtaact

SEQ ID NO: 138205 - DNA, 1809 bp, Homo sapiens
gtatctttctcagcattaggaggaatggattttaaaatattatataaaaacaagaaaagactaaagcagtacctgttacagataacattctgaggaaaaagaacatttggacttgctaaaatgtttttgacatctacattgaggacccaagaaaatgattttctttttaggtttggtttcagttatcttgtgctaaaaatgtctgtgaacattaaatttctttgatctttgtctacgtagctatcacactctgtaataagtctttaattatatgtttttggcactgcacctggtaggtgagaaggactgttgcatttctgttgttcactcatcaaatagcaattacccttcaactctccttacccctgttactgtgaaaaaaaaaaaaaattcaccaatttctctgctgcccactagaatcagatagtataacatacaaactggtttaggagaaaagaatatgtacaggtggtatatgctaatgcctctatgtttcttcattgcattcaaataacttcttactttattcatgacataaacttggtatgagctctgtttcatttgcagggcttatggattgggaatgtgattttttggaatacgtttactttaacaaaattccacaaaactaaatgaaattggacatcctgtggtgtgcatgatagaattttaactatattacttatcttaggaaaataaaccaatacatttttcttgtggaagttaacattttattataagtttgactggttatgttactaagaaggcatctttaataagtgtcctaacataattatatctactatttcaaacatctgaagaagatagaaaatgtgagtagcttttacttgaatatttggaatactctttcccttcgcttcccttattgaccgtagattgaagagtctattttcattgtcattcaaattttttggtaattttttcctcatcattactttggaacaagaccttctcttatacttttctaccaataatgtttaaaggaaggtggggaggaaaatattcttgattgttagcctgttaggcattcagatagatttgggcataagccatttcttagactatctccaaagtaacttagacagcttatgaaattgattttaataaataaggaacttttatccttttagagagtgtttacttatactgttgccctcaagagatttttatatgtaactagagcatttaaaattattttgtaaatatgtaagaggaatttgtctttatgcaatataaacagctagaaagaatgcacatttcctactttgtaaggaactcctaaaaatggatgagaggcatgaaacatagtaggatttttgcagtaagactgatagaataaacgcagccagagagaaagatggaatgtcttctttggtgtttctaaggcaattgtaatctatcacaacattgaagtcaaaaccactcagaggtagaactggtaaactgatgcattcaaactttctatgagtcacatgaaataaatgatcagtgactgtcaggcttcgaaggtttatgcacaaatgtctgaaaatggtagtgttacgtcaaatagatattttataattggtcagagatatctcatggattaatctactatgatgaatagtttccaaggacattcaaatgcccaaagctattgtgtttgctttcatgtagagaaacctgagtggacgtatatgtttttatggatctaagaccaagtcagttgtagtgtacacaaatccacgtatatattatacatgtttatatattttttagtgggtatatatattgacagtgaaactgttt

SEQ ID NO: 138206 - DNA, 1283 bp, Homo sapiens
ctgcccattggcctaaaatattctcatttaagacttttccctgtctagcttgtaataataggtcctgcctcctcacacttaagttgtatgattgtatcttattttttttaagaaaaatagtaattttccctgaataaaaccaaagtaccataaactgcatcatttgaaacaggggatgtgtgggcgactgatttcaattgaacaaatatgaatcatgttcttgtgaatcatgcttccctacaccaagaaagaaataaccctaataattttaatagcagtagacataaagagaatataagtaaaattcagaattttagaaacaatttgtggtaaatttaaagaaatcatggattatttcatcttcccaaataccaaagcggatattgaggactatatataaatttgttcagaattcctattatgtaaaggttattgcagggtacagtgtgctgtagtgatatctgctgatttttctctgtgataaattatatattacatattatttaagtatattatacttaaagctgatgtccctttatccctctaccaccacctcactgattatcgaggctttagagaaaatagctggttgcactagatgattacatgcctcaattggatagtagcttgttgccaattatcattacagtgccatattgattttttttcttgtttccattatggaaattaaagcagaatttgtttaaaatgagcttctatgtatattgtggatggcgattggttctgaatatgagctattttaaaaatatattttcttcagtggtgtgatgtctctgatattcccttaaaaatttaggtctctgctttgttgataagatttaccttaggtagctatgaaatggataaagactggaatggaatggtttaaatatagacagcatagatgttattatttcacataagtctatatattgatttatgtttatgatgttcttgggtagtatgagattgcttattctattaaccatacagccagtaaatttaattaaatttaaattagcaaatacttacttagtgttggctctatttaatataaatatttagtggctatatatgagctaccttgctaaacactatgaaacatagaaatattaatgaaatgatataactatctttagagaatttacatgccaaaggggtaggtaagacatggcaagaatcattatgattatgtcaagcagtaagagataaatattacatggagattttgaggaaaaggaactcatttgatcggaggaattacaggggaaaacattaatgac

SEQ ID NO: 138207 - DNA, 1494 bp, Homo sapiens
agtagaagtagaatatttgtgaataatgctctacattagcagtgtttcagccttctgccacacaggagaatttatgtccagccaatctcctaaacctgcgtactcagctcctgccacatgggtctcctcacagttcctggaacattctaaacacactagctaatgcctcatgacccaatttgcccttaatccttctacttggaaagtcctcactttcagagttctgctgaaatacctaaccttatcaaagaatctttcctgatcacacaatgaaaaatagcagcctgccactcctttcattctattttccaaggtttatttttcttcattgcatcaaagcaattattacatttattatatagttagttatttgttcactgtctccctatctctagatagtaaagtccatgaggctagttgcttagttttgttgcttgttatgtatctctctcacctagaacatgcttggaactttgtagacactcgacaaatatttgttgactgaataaatagaataaatgcaaaggtgaaagaaatgggtcatcaaataattatgccagtatttcaagtctgaagaattaaaagggtagtgatgttattaataaagtatcaaagagtggaagataagttgacttaggggtatggagacagaggaagatgaattcagcttgtgaattcatgcttaagtatgtcatgctggtgaaacaaccaaggcagtgctgtgtaatgggcaatctaaaatgtggagaagtctaggattgaggcaaagatcactgagtcatcctcatagagtcaatacttgaagcagtgggaattgaaaaaataatgacaagcaatattgagacagaattatcagatttgaaaattaaaattttattttggatatttaatgttttaaaattactaacttacttatacatctaattttttgtttatttctcagctgggttaacaactttggccatgaaggtcttggactcttattggatgagctggaaaagcttctggacaaaaaacagtaagaataaacactgaaattaaaatcaccaaagggaaaatgtttcagcacaacataatatacatttttcttttatttaggcaagaaaatattgacaagaagaatcagtataaacttattcaatgcctcaaagcatttatgaataataaggtaagtagtatttatttctgcccctgtcacaaaaggtgggaacttgcccaacactatgaaagtatgaaatgaacaaaatatttttttattattttttttaatttccagggtacatgtatataggcgaacatgtgccatggtggtttgatgcacaaatcgacccatcaacctaaataataaacccggcatgcattaactcttttccctcatcatcttccccaccccgtacctattttttacttatgtttctgctgtactaattaattgtagactagttattacaggcttataaataataagtgtttataaagttttacagtgaggtt

SEQ ID NO: 138208 - DNA, 1069 bp, Homo sapiens
atatagtattcaaaagagccttttaaaaaaaatttctctttttcttcaccttaatttttcatacaaacatattggacaatttaaccacgaattccagacatctccagggagacccagtgacataagtagaatcttactttagaaaatcatatcagtatgcgctttatatgttattctttgttgaagaaatactgattgttcccatatttctccaaatttatggaatttttagggcaggctaatggagatatatctgatcaaggagcaacaactccaagatgcagtgatttcatataaaaaacaaagacagataactgcatttgaagaatattcatataattaggtagaacctcattgtgggggtatgggtttttggaagatcattgtacgttgcttttttaaattaaagatatattccatagacattctgaatgaaggttttttttttttttttttagtttggattacaaaggattctaggagatgaaagaagtcttttactattggcaagagcaattgaccccaaacaacccaacatgatgactgaaatagtaaaaatactttctgctatttgcattgttggagaagagaacatgtaagtattgctatattattatatttgctgcatggaaaatgacacttaagaaattaataagtcctacttttgttctctttctttggataactttcatgaaaacagtattttagataatttttgattgaaatttttatcttgcctgtttatattttggcttctttgttgacattatagaaactcagtttaaacagataaaatcctagtgggaaattcttgaaagttggattcaaagtgattgagcagaattttgttttgctggaggtacagcaatcattagaaagtggacaaaaatcagagagttattttggcaaatacacacacatacatacacaaatactgtgctgcatatcacacaatttgaatagatgcctttattttacattatcttataatagtattttactttatatgccatggtaaatgaaaattatttgtaaagtgaaataaacccacctgttagaaaaaaacggt

SEQ ID NO: 138209 - DNA, 1040 bp, Homo sapiens
actgaatgaaaatgcaaatatagaaaccaattgtatttactaattaaacatcagaattgtggccctagcatatgtattaataatggagaaaattcactgattttttgtgactttaaaattttgatcctcatggaagctgtatttgtaacaatagatatggcggaccattttgaaacatagccattataaagacactaagcaacagagcaactctggataatggactttgtgatattcaattcaagggcatttgttttctttctaagatcaggagaaatgatatcaagcaagatttgtgcgatataatgtggtagaaaaaatgcaaggctaaaggtcaagagagctgagttctagttgtatcattggggcttattagttatgtgatcttgggcaaatcatccaatctttctaggttttcagtttctttacttttaaatagcatattggaccagagtattttatgttctgtctagctttaaaatctcatgattattttctgtctctggagttgaattttttttttttttttttttggaaagcagattgattttgcattgttagaggacaatagagtacactcatctcttaaagatttatatacttggaagttgagcatatgaattttgaaattttcattattcagcaatgagttttgtagttctttgaagtgaaggtttcagagattaggccagatctctttttttctttaaaatctccagtgtagtgctattcaatcaaactttctcccatgttctatatccctgctatccaatgtggtagctactagccacatgtggctgttgaacactggaacaatggctagtgaaactgagcaactgaatttttaattttatttaattgtaattaaattaaactgtgataagtagctcccatatagaatagcacagtactgtagagcgtgtgtgtgcgtgtatgcatgtgttcacatgcatatacatgctgagtgtggagtggggtggcagaagtaaaggagaggagtggtagaccattattttggatgatgggatgccatttatact

SEQ ID NO: 138210 - DNA, 1106 bp, Homo sapiens
ttaaaataaatgtgtttatacatcttttcaagccatacttgggactgttgtgcttgaatatatccttgcatttgttcttcattaatacaattgatttgtatttgcattttttgccagaggcatatgtgaatgttctgactgcatgagttcttttgcaatctttgattagtgtgtttagtcaaaatgacagcatttaatttgggttgttagcaattagtttttttctgttgtagaactgatcgttaattttttaatgtgaataatcaaaatgtagggcatggaaaaaatgaagtgaatgcaatgaggtccttttatgttgaaacagaaaaatttagctacaattactttcagaaaaccaagtgcccgcataaatatttgaaattgcttctgtgtttataaatgaataattgtgttctgccctttattacctaaatatgccgttgtcaaactgttattcatgtgttaaattttatgtttatatattaggatctaaaagaaaaagagaatgatgagcttgatattcagttgaaagtatttgatgaaaacaaagaagatgacctaactgaattatcacaccgtctcaatgacattcgagcagaaatggaatatcctttgacaaaccacaaaacaattttgtttgcattgtgagaaagggatttgtgggcgattttgtggaacattattagagttcttgtctgccctcccaatttatatccatttatttatattagaaccttactatgatgctgtccttgagattcatgttgaggaattgtcaggctgtcttgatgatttacacagagtgtattgaaatctgcacaatggctcacagtattatagatatactctactcagtggtcttgaataaagaatagcataaggcaatatatcttacatgtaaggatttttttggggaaaatttcactgcgttcatatgtgactataggtgaaatacttattcagtttattaaatcaagcttcagtgacttagagataaaaagcaattcaaataaatgtcttattctgtattcaaatatttgtgtttcttaacaataacaaaaatgtttagatgcaatagaatctgaatatagcaaagctatgtggta

SEQ ID NO: 138211 - DNA, 2059 bp, Homo sapiens
tgcttgattaaatggaaaaggaaagctaccatgaggtcagcacagtctcaacaaaaattacaactgtaaagcagcatagagaactattatagttcagaccagtacagtaatttgttgggcatcgtgacattacagagagataaaaaatgtttaaaatattaaattgtgtgctgttttttaagcaacaaggctggttatacgttaaaaattattgttgtatttttaattaagttctaacaaatttaaaaggggtactgtgcccaaaggtactcagttacctggggaacatcatttatgtgaaagtatccatttctcagcaactatgaataaataagaagttatcctcatatggcatgtttttcatcctaagaacatccatgtgaggcagaagtgtgacaagcattttattccacttagggatgattaacctggccccagctgtgttttccttatttaaccattgactagactgaggttataatccaatattatttactctagacccgaagatgacttgaaaaaaaccagatttgtaatatgtattactatttattcttattcttgggaccagacccattactaaagacatagaagagcaattagagtctatttggcttcatttacaaacttttagtaggttggctatttatcagcacactatatttagggaagtttatatcataatttgtctatagtcgtacttcttactactgatttttctctgttgaatttattatcctttgacaaatactaaatcttacccaaattttaatgcaaaagtgccttttaaaaaattttgcagtatgtgagtggtcatttttaaggccagaattacgctgatggattacagaattaggatatgttttaaaacctctgacactttaaacaaattgaagcaatagccatgcatattaagtgtgtatgcttttataaaatgggtcttttaaaatgtgttgcataaatagatccttggatagtcttgtaatataagtggctctgtccagttttgtaagctgttatagctatcttgactaaaagtgctgtagtaaattcaagacattgcttgccacgtaatgtgaagaaactcatcccttattgaaattgagaacctgtggatgcgtagaaccatttctgtatccatgaatgtaggactaatggctcatttgtttttattaactttagaaacaatagcataagtaaatagaaaaggttgataagtatctttcaacacaagcatgaatccctgcaaactagattatgaagtcactagatgtagttgattacatcacaatgggtttggtactgtaacacccagaccatccttaagcttaggcatgcttgtcctaagaaagtgtagtggctgcaggattttttaaaacaactccagaaaaaagacctagttcttctaatatgttgaatgttttctaaagcaaattgatctgcatggttagaaaggcattcatgagtactttctctccttttcaggccacaatattataaaataattgaggaatgtgtttcacagatagtgctacactgcagtggtatggatccagacttcaaatacaggcaaagattagacatcgatttaactcatctgataggtatgtatcataatcctcattgtcctctgattgtgttttgtgccttctgtattataagcactttttaagtgaagaagttcagtaagaagcttcagttcttactgaacttctattcatatctggtaaatcattgtgtctctgggcactcaattgctgtaattgttaattataatgatcatgagagttctgcctgtgtgattagaaatattaacctgtttaataagttccaacactcctggaggtagtttaagcttagtgttccacaaaaacccattacattattatagatgaatgcattactatttagaaacatgactctgaaatcttttcattttatactggtaccttagtggtcttgtagaaatcatgtatacaatggggtctcattatagttatgttattaatgcccaagttttagaaaagaaatacaggctcatttcaatagcttgagacct

SEQ ID NO: 138212 - DNA, 1047 bp, Homo sapiens
ctagttacattttatagtctctctcattagttgcattttttaaaattttataaaaatagaaacatacagcatatatactttttgcctgtcttcttgccttcagcataattattttgagattcattcatgttgttgtattgcatgtatcaatagttcattcctttatattgctgagtagtattccagcttatggatataccatagtttgtttatgtatacacttgttgatggccatttaggttctttcgagtttgggattactataaataaaactgctgtgaatattcacataaattctgggtactggtatatgtttttatttctttttgataaataagtgtggaatggctagatacagaatagagtttatatatacataaaataatgagagatacaatattgcccaaaagttgtttatattctgaagtgtttgatttgacctgagaagtttgaagttagtttccttatgtacatgatacattttgccccagatcagaagttaagtaaaaatcttttcatgaagaagcctgaattatcgaatgttattctgtctctctctagcttttttgtaggacaattttgaatcttgctaagactattcatatcttattaatattattaaggttacacatggagtctttgccacctctccacccataataaaccataggattctgaagtgttttgtagttcaaaaataattgaatacccataaaaataatttaatgaaatatatttttagatgcttggttttgtgcctccacaatactatcagtgaattcagtttgtatgctaaagaaagaatatatgatttttatgttttatgtatagtataggtcaatttccatttaataagggttgacataaaaatgatagtctgcattgcagagttataggctagaagacgtcttttgtctagtgatctcatgccataatttcgaatcacttttgtttgatcttaatagattcttgtgtgaacaaggcgaaagttgaagaaagtgaacaaaaagctgcagagttttcaaagaaggtaagcttataaaatat

SEQ ID NO: 138213 - DNA, 1276 bp, Homo sapiens
tttattaatatgagggcttctaaatgtttcatttatgtagtactttatacttttgggttcaaacatagccgtggaatattgatttatttccttataaggtaaggttgctattgttccctcatcatcatgtttaatccattatggaagaaaaacactagccacattatactaaagtgatacatgaaataaaattacattgctgaaagggtatagttggaagcaatcaaccaaaataaattctccctttgctttcttgcagctgtcgcttgcaataggtagctctttggagaactgtgagatgtttagctagtcttttctgttgtggtcttttatgtcagtgctattgatagtaccaacatgttgcagtgttttctctctttctcactctctttctctctgtttagacttagcttctttgaatttcataattatcattttgtaagtgatgctgctacttcatgtaggcctggtggaatttgaggatcccttttctttctgtgttaatgtcttaaatgcctttgagtaaatgccagctttgtgaatatccgaattgtattcagatctaagcttgtcttttccttgtttcatggaagcatagctataattttattagcttctaccacaagtttctctttttttgttctagagcctattaagcattagtatagtatttctgtcctgttgtgtgcagccagaaggattgaagcacatgtctaaaagctctccagttttcagccttctctcagcaagataatgtgcttacatattgctgtctcttcaaagttatgacttaccttggagattagataatcacttttgctatcactctagaaattatagagtattactgaagaagttacttcagggcatctgaagaaatatctttgctcttttagttactagaatagattctaagagcttgagcataaaatgtttgtgtggagctgtcatttttattggtgaaagaaaatgcatgctttttgattaatagaccttcatatttctaatgttcttgttttaagtagcacatttaaaattccctttgaaaaaccttagaatctccttaagttttggctggcactgtgattagacactgcaagactggagcaaattgtgattatctgtctggtaaagtttttttgtgagcatatatattatggaaaaaggagtcctaaagtaatagaaaagaaatttcagtgtttgatgctttagtgtcatcaccaacatttagaatgaaaacatgtatggtctcccagtggttagctacatgcatccc

SEQ ID NO: 138214 - DNA, 1082 bp, Homo sapiens
ataccaactttcctagcatttgtgtgttaacagaagtagtcactgtccagaatttataatgcttataaaaaatctacacaggcctttttcatatactgttaaacccttagatcttgctaaatatttagatattttagtaatatctaaaaaagtatatatgatcttaaaacataagataaataaactacaaatatctattgatatatatttcttcagttttttcaattatattttataagcatttaaacttggattatttatatttcaggcacaagtactctcaagttcatcaggaattccaggtcctcctgcagcacctccattgccaggtgtagggccgcctccaccaccacccgcgccacctctacccggaggagctcctcttcctcctccaccacctcctttacctggaatgatggggataccaccaccacccccaccaccacttttatttgggggacctcctccaccaccaccccttggaggagttcctcctcccccaggaatatcacttaatctaccttatggaatgaagcagaaaaaaatgtataaacctgaagtgtccatgaagagaatcaattggtcaaaggtaatactaaaactagagtttttttactttgtctagcttttgttgatcattgctatgtgtacacattgtataatgtttgagagtatgactgctgactctttccgttcctttgtgggttcatcattttatgtccatctttcaatttaggttgtagataattggaaactctccagatagtttgacattgtgaagcaggcaaaaggaaaatcgaagtgatgtagagaataatatttgaaatataccaacaaatgacaagcaattttgattcttttaacatagcttttctttaaaaattttttattgatatgtaatatttgtacgtatttatggggtacatatgatttttgctacatgcatagaatgtgtaatgatcaagtcagggtatttaggatacccatcacctttaacatttgtcatttgtttgtgttgagaacattcagatcttctcttctagttattttgaaatatacaacatattgttaactatggtcac

SEQ ID NO: 138215 - DNA, 2035 bp, Homo sapiens
gtgtcagctatcattatggttgctaccttaaacctaatgagtgaacaaggggaattcacttttctaagtctgagtttccctgttttaaaaaacccaggaacaagaagattttatgtgagttggggttaggatttcctaagttatttttaagactccttccagtagaatagtttttaaggtgcaatttgctttgtggtctatttctattgttcaccatttcgtcacataattctgaatttcccaatgaatatttactttataagtattatttagatacatcctgaaattgacttagaggatagaggaataaaggaactgtcattcaaccttgctgaaagttagttccttgaaaatttaaatatgaggttataatttagaatctattctttgttatttttgtttcagattgaacccacagaattatctgagaactgtttctggttaagagtcaaagaagacaagtttgagaatccagatctctttgccaaattggcattgaattttgctactcagataaaaggtacatttttaaaaataaaatataagttcccgattcaggtacaatttaatttagtgctttgctaaaaatttctagtaatgggtatatgtatacttttcccacactggacagggtgaaacataaatagattgacatttaactatattttacctagtaaataaagaaggaaatttattttacctttgaattttattatacataaatgttattattcttctgaaaatacaggttttatttttattgttaaatatgtgtgttgcactgctccattataaaatagtcgtttttactgagaagcagggaagatgaatccgttgattcatcatgtaagagaaaataatgtaagagaacactaaagtctcagaatttttcatgaaattgaaataagattggtcccatagtcttaaatagtctttcctgtcatgcttgtattacttatcaatttggattcctaggaaatgttatagtttttgctataattagatattttctattaatatcaaaatccagtaccttataagtattgtttactgatttgataatagagtgctttgtttatgattagatcctttatttatttgcttgtgaatttcacagatgattttgttactatacaggtagcttctcaatctcataatagatcgttatggttcattaatttttggtattttatttcaacatgattatttcactaattattgtagaagtgatagtttagttgaggatattactttttgtctgaatgagtccttgcagttgaaaaatggaaataatccatactctcatgcccttggaattagcacctttatcattcatttgtctgatttgtcacattatgccttagaatatgagaatataaattttggaagatagagaggtgtgaaaattagtttcttttttttagattatgtacactggagattgttgtgctgtatttgttgttctttgtaaattgaagttcatatgcacacacaaatctggggtgattagactattctgaagaattttgacatttaaaaaaagttactactattaggcctacctttcttttttctcatttgatatcgcagacctcacatttaaagaatttttcaatgattcaagtgattgccatttattataatcactgtttaacgttaaaaaattgcttgtagcaaagtgttcatgcttatagcaaattattcatatagtaaaataaggtagtttaacaaatgtaaatctcccttcaatctcagacttacagcattttgcccagataaaatcattaattctaatttttcacattttctcctagaaatagtctatgcctctcaacacatatgtgcatttatcattttttgttttttattccttgctgttttcaccaactgtgcctaaagattattctgtaggtgcttgtgtttatctactgtgttctttttacatactgcatagaattttgtgtatgggcctatcttaatttaattaatcccatatcaatggctatttagattagttctagtcttttgcttgttt

SEQ ID NO: 138216 - DNA, 2490 bp, Homo sapiens
tcatttattccaaaaaaatttttattttctgtaaaggcataaaatttctttttctgtaaacttccccctccatttctttgcatattttctattgagcatttacgcttttgattatggacttatttgaattgaatgctacaagaatcatagattttataaaattttagagttagtctggatcttagaagttattaaacacagactctttgttttaccaatgaagaaactgaagtaagagacaatgaggtaagtgtaaaacccattaaagatagcgtggtatagtaggaaaagccagaggaaataaattcacacatacttgcattccagctgtgatacttgtaacctcggagactgaattttctcatacataaaatgaataggctaatgtttacctggtagtattgtgagaattaaacaaggttatatatttaaagcactcagcacattggtatccctttcatttaacttgatgctctgtgtgtgtgtgtatgtgtgtgtgtgtgggtgtgggtgtatgtgtgtgtgtgtcttagttattgatgcttcagtacaactgttaattcagcaaaatttactgctcttcttttcagcacttggtagagctaatcagtcagaattgaagcaattcttactgcagctgccaaaacctaatcaaaccaaatcaaaaccaaacaaaattcatacaaaacctctcatgtatgtattgctgagaatgctttattttcattcctcttaacgttgattctttgaattttctctttcacgctactatgacttccctaattgtggatatttaagtagaaatctggacagtatcacctttcagaaccattacttttactaaaatttacttctgaaaggacatatacaggatcaattatgcatcatagcctatttcagacatgcacaccatagctaaaacaaattttaatgatactaaactgccattcttttgtaacacacagtaactattgattgatgttactgtaactgctgaagttccttgtcattcgcagtgccttgattcatactgtggtcaataggtggcaggtttagtaagaaatcagcaggagggtctgctttcatgaaacttaaacttcaccgcctgggttttcttttctctagggcacctttttcccccggtttgctgttcgttgcagctcactcagctgcattctggaaggagcatcattcctgtttttgctaatagctgtttcaaaacctcttagaccagtgttctaaaacctctgattatttttcactactgcaagaacataggagagctcatgcctctgtcctcactacgtgtactgtaaagcactacaagtctatttttcaggaacttgtttaagagctaaataggagctttaaaacacactagttctcatatctataatatttaaatgtttaaatatttaatatgtgaaagtagcataaaattatacttcctatttaaattagttttagagaaaattatttttaatgttttatttaaaaacagattatttctgttgtaggaaagaatggatgtcttgtttcatttaggttaagtttgtagagtatctattatgtgtgaggttctatactaaatgggagggaaagaaatgaataagatcttgtccaggcaccagggaactcacaatctactgagagaggtaggaggatgcccagtatacttagtcaagttgtagtaaatgttagagtagatactttttaaaaagctactggggtacaaaaacaaataattaattttgagtagggtcaatggagatcctagaggtagtataattagagttgggacttgaaattttaatagaatttctatagggaaagaaggaaggaaagacggcattctagctagagaataccatcagtaaaatgttaaaagaaaaacttgagacaaatcaaattttacagaattcatttgagcaaggaatcattcattaattggtcagcattcagaaccagcaggatttcagtgtgagcatcaacctttcatagtatgaacatgggaacaaagtagaaaagtcatctaattgtctacggatagtcatttatctcatttgggcgtggtgtgatgagacatttgccttgtctgggaataggctcatccattggctgcctacagttggctgaagtttcgctatttgtgattggctgaagctcagctgtttaaaatatacagttggcgtctcatctctgtgtaggcctctgcacccatggattcaaccagccatggacagaaaatatttgaaaaaaattaaaaatataatacgctgagcgtcgtgactcatgcctataatctcagcactttgggaggccaaggtgggaggatcatttggactcaggactttgagaccagcctgggcaacatagtgagaccccatctctgcaaaaagtacaaaaattaactgggtgtggtgatatgcacctggagtcccagttacttgagagactgaagtgggagggtcacgtgaacctgggaagttg

SEQ ID NO: 138217 - DNA, 1832 bp, Homo sapiens
tgctgggattacaggcgtgtgccaccgcacccagccaaatatttgtatattttggtatctgcaagggctcctggaaccaatcctcagttgatactaagggatgactatactctttctttaggtttccatttgttaagttggaatgtaaagtttggagacagtcttgggccaatgatctgctgttcatttaatttattaataaggaggggtgaaatgcatactgccttgaaggcacgggcagtcagccttgggtcaggactctggaatgaagagactttgtggcgtaggtggcaaggaaacttcacgctgaagaattagggttttattctttaagcattagtgatttagtaatttggtgattagcccttgaataggctttttgtggacagataggtgatgggaatatatggataggtgatgggaatatatggataggtgatagatcattgattgtgagtaaatatcagtagactaggtaagatatgatgatatcctgactagtatgaattcttaatctgcatctctaaggtctattctagttcccaaatcttgtaccttcatgcttatgacatttacgttctactcacaagccataataatgtcatattacaaaatatgtttcaaaatactctctgaattcatgaaatatatatgttagaaacagctggagaatatcctgttagtagctttgaatatgtatcatatatgtaagtgttggaatttgtatatatgttctagttttgtttattattcaatttgatgatatttgggggcatagaatcatcaaggctagaatggtagtgtcactctcctttaaaaactatagtaattatagacaataatgatattatataagatttaaagtaatgatggttgatattaactaaatttgaaataataataaaatatgtagcttataactgctaattctaattagaatttctagggttctctagaggcttcaggaagaacaaagatagtgtgggtagaagttgtaagcaatttctttgcttttaatgttgcttggaggaaatacaagaaataaacataagagcttaataaaatttagcttctttaataatatatttctatagtgaaatttagctttaataataacagaaaattgaggtgttataaatatttgaaatgcatataaatgtcattttgcagtgcttgaaatattggacatagcttcaaccttatggtgtaactgagattgaagttgtgtgtatgtaaaagcactttttctttaggatcatattttaatgtgtgtttcttagtctaagaatcaactggctgcttctgaagacacccacccttgcttggttgctcaatacagtcttctatatttagtgaactaatgaaaagacaaaagagtggtaaagtgtaattcatctttgccttcataatatagaaattcttgcaattgacttgaaattaatgagatgtcagtctcagagtgcacagcccttgtaagatggtgctaacgtgtccagagagagttcgtgtcctaacaaataatttgtcatcttaatggcacaacatgcatccttctgtagtataagctttaatgtatatggtaacaaaccaggaaggcttaattctttcaggcagcaaactaaaaaccatacttaactatcttagtgtgtttgggctgctatcacaaaataccataaattgggtagcttataaacaacagaaatttatttctcacgcttctggagactaagaatccaagatcaaaatactggtatatttggtgtcttttgagggcctactttctggattatggagggtagcttctttctgtaacttcacatggtggaagtggt

SEQ ID NO: 138218 - DNA, 1636 bp, Homo sapiens
gcctcccaaagtgctaggaatacaggtgtaagccactgtgtccagcccataatttcatcattttaattatatctaaagttttttggatttctaaatataaataattgtttttgtatatcactttaccaaagtgttttttttttcattatggacattttaagtgtttcaacttatgatgacacacattaatttccagttgtcattttctagcattaatcacctattttatgtaaaagaaggaacaagggatgtttcagccagagatacatgacgttgtttaagtataagtcaccaattgtagagagaaagagagtatcttctgccttctaagcaaatagacttcaaaatagctccgtctttacatattgacaatatgtggtgagtgtactacttctattaatataataccatctctacaacatctagtaacagcaataatagtaataattataattaaaacaataataaatttattaaacattatatcccaagagcgattataattattttaaattcatatcataccaacctcataccaaccctaggtacttgtattgttgttttgtcggttaagaaactgagactctgggagattaagcaatattttgtttacatatctagtaagtggcaaaatggtgatttgagcccaagtttgttcttaatcttaatcacttctgtatgctgtaacaatgacttttaatggcttctatgcccttagtaatttgtgcattttgttgcactgttaactgatccctttttcatatggttaatcatatagttccacatatattgtattatcttgtgaaatatgtaatcctattatcctggcactaaagatagttcttcagagctcaaaccaaaactaggaagctgtacgttatccatggaaagaaataaggttctttctataatttagatttttttaggcattttctatgtagaatctgtcagtggtaaaacgttgccgtgacttgaagtctgtcttttctaataatgagggaaggaatgtggtcttcatgtcattaggcatttggtaatgatatattaatatagttgagatgcataaagtaatgaaatcaatttttcactttgactcttttgaaggtagcttcataacattacagacaccttgtgttattttaatatgacacttttagctatgagttaatgagactgcctttccccatttcagtgatttttgctgataaatatatagattaagcacaataacaagtgttctgttaatagcatttctaagtcatatagcttctcattcatatttggaatcattattctaagttaattagttttttttcttttttttttttaaacaaagtgttgctctgttgcccaggctggagtgcagtggcataatcttggctcagtgcaacctctgcctcccgggttcaagcagttctcctgcctcacccacccaagtagctgggattataggtgcacaccaccatgcctggctaatttttgtatttttagtagagacggcatttcgccatgttggccaggctggtctcaaattcctgacctcaggtaatccacccaccttagcctcccaaggtgctgggattacaggcgtgagccaccgcgcctggccagtagattagttttatattggcaaata

SEQ ID NO: 138219 - DNA, 1351 bp, Homo sapiens
tcttaagagtttgttctggtttttatgaattttgcaaatggttataaatgggtaatctctttttataatttagtatttatgtggtatatgtagcttctttcagttatctgttttaatagaggggaacaaatgtacagaactttgaaggtatatgtggaagggaaaggtaattaaatgtttttatggtaatattatttttgtattttagtatctttagctcagatctatttatgttcccctagactaggagtaagaagcaaaaggagtagtgagaacaatcaacctctggtcagatatttagggattgtttagagatcttttcaaagatcatctgtaccttttggcagcaaagcaaaaaatgggctctaggcctttgggaaatttgctatgtaggtccattcttaggccgtaagtttcctctgggccatatgttaaagaaaacccagttatctcgtattgaattcctttacggtcaaaagaattactagggacttatgctattgggggtgtaattttaagttgtgaaactctttttgttgattgtctgaattcattatctccattatttgtctcttgcagcaacagtgatattgctggtcagggtccaatgtctcaggattaatatggttagaattgcaacaaatatatataaaatgaattaattcataagctgtgctagatttgttttggtctgtggtcattctgttgactggttgttgagggttctgcacgttccttagccgctgggcaatggccaaccagaaatatacatgtgagctggaaattcagctgtttatttaaacaggagcacagatagcatagacagaaaggagttgattcatatggtatttgttatatactgtacattcttctgaacattttatatatattaacccatttaattaattctcatggaagaaaacctgtacgacaatgttgttatcttcaattatataggggagataactgggtcatggggagattaagtgacttagctaaaggttacaagcgtaacagataagaaagctgagttcccactcagtgctcttaattagtatacaaactgccagcttccaaattcatttacacgatgtcagttgtataactggcagtctagattccttttatatatttatgaagtatataccatattgtagaactgtagtcttatttcactggccttatacatgccctgacgggtctaaagcttatctgagtaccaggatgggtgtgacagcagggaagagaatttgtctggatcagtgatataagctccagtagagtttctagattatccacatttctgtctctctgagttgcttctgagtctgagtagtattactcattcttg

SEQ ID NO: 138220 - DNA, 1344 bp, Homo sapiens
gacagcatgcttctttgactgaaaggaatcgatatgtcaacttatcaaaatatgttttttttaatgctgtttcaaacagattgcttttaaaaggtcttgaaaaaatataaaccaattaaaagttgtggaaagcttaattttataataatttttgtcaaattcgttattaaattgaaatcatactgtgtcacttttattttttgcatgaaaaacacctacttatttataagaatcattttatttaatgcctatcatactggctcactaaacgtttggtgttcataggctttcttttctaattttttgcactttccagttttgaattagagtcagggattatatgaaatattttaaatttgagtaatcaaaaaggaggttatataaaaggactttgatgcatggaaatattaacaatgtgcatgtatattaattgttgaacattatgagtaattaaacctatcaatagttacttaaaatttgtttgattttaatatttctgaacaaactttagcctgaccactgccattgaggaagttgactttaggaccaaccaactttccatgtaggaagtaacagagttaccaggacattagagtttgtgacatgactgtttatagaatgtcaatattttacttatcacattgaaattcatcactgatatctttgtagaggaaatgaaaatatgccctgctttattattcatatttacataacagaaatacaagatttaaggcataaatgtgttaataatgccttgactcttaaggacatgtaccctgaaattaataggactaaagcaacctctttcccttaccatgtagagattgacaattggggcacatgaaatattagacatctctttgccagtcaaaatacacaatactttgatgtactgataacttttaatgaaggcaccagctatgcgttaaataaaccattcaatagacttaatactaaccaatgttcagaatttgctggttgtggaaaatacatttttctagaggtatttaatgctaatctcctttactaagcagtgattaaagattttttgagaccaaattttaatcaaagataaaattttttttacaaccctttcaggtaatatcataagcctaaattcagtgtaactgaactttagaaaatagtccttttgcctatttctttcagaaatacacacctcccttctctcaccagacccagacacctgcataatcaacatagggataaatttactttgtttcacaaatcttatatcaattgatgtttgggtattaggagctacatttctgtgtataggtgttaataagaaatgatggcctacatagagactaatttgctgtagaa

SEQ ID NO: 138221 - DNA, 1251 bp, Homo sapiens
tctttcccctggaatatattatgcatctctaggtggtcaaacacattgagacccataccctgactaaattttcataatccctggggttcacaattgttatttaaagttcatagatgtatacttcacaagtataggggaatatccttgatatgcatactgctagaccactctctagcctgaaatgttaatatgatgattatagaggagttggatccatttagaactattaggaagattattgacagtaatattttgactggttagttggcattaaacctcaatagaactgtgaaaaggtgattgggcaaagggcagtgataaaaccaagataatgaaagcacataacaaaagaagatttaccctttgtctttttaacacaagccatgttatttgtcatagtccctttaatactttagtacttgctcctaattaaaagtatttctggaaagagatctggaacagagctttcctgacaaaaatcagataatggatgatgttttgtaatactgagcatattatatctcataccaacatatttctttctcttttaagccacaggcatgatatggaatgacctgcccattctctccctgctacttccccaaatagttttcctattccttttatttaaggtattattccgatgtttgtgttagcaggcaatgtgcctttgctttgcattttgtatatccaattaatccatgtgtgatgatcacaactgattacagctcagggaataagatggggtgatgatatgactaatgcatacaggtagaattaacaagagacttttctagaaggtgttcaaagggcagaataaagagactatctttaagtggggaatcagtaaagaagtctacaaacttgcttctagctgaaaagatggtgtaagtgtcaattctgttgtgttctctctctcccaaaagacctggtgggatacaaacaagttacaatgacttcattctagagaaaacatggaatccactttgttttgttaaaaagttcttgaatcaaaaatttcaacaaagtatttacaaaaataatattctgtgtcttactttaaaactgatgatatcaatatcacaccagtgtgacaagacactctgattgtggtccactggagaatgttccatgttaatccagaggaagaattacttcttgtcataggattattggtgaagaaggccagtagaccaatatcttgactttttgggagagagttttataccttaggccctcttggcagctaga

SEQ ID NO: 138222 - DNA, 1190 bp, Homo sapiens
gcaggaaagagtgaagggggaagtgctacacactttcaaacaaccagatctcgtgagaactcactatcatgagaatagcaagggagaaatctgcccccatgatgcagtcacctcccaccagctccctcccccaacactggggattacaatttaaaatgagatttgggtggggactcagaacgtaactatatcaggcagatatataaagtaattgctatactacaatgtggtaacttctataaagaggcatggaggaataatattattaaagaataattaaagatgaattgagatgtttgcagagaaaaataatatttgaactgggatttcagggctatgtagatttttatttccaaaaaacagaagggtcttcagggcagaagaaactacatggacaagggtatgataaagtgtcacatcatggggagtaaggcatggaatgtttggttggagaatgtggtatgaaggacaggagggaggtacattggagacaactggtaaaggatctttttactgtaacctatgggtaaccttaaatgtatttttaatcagggttttgtgatggtatgatcaaattgcattttagaatgattgcttttggtaggaaagtttaggattgatgggagaaaattaggagttttttaaacaagtctcaattggacactgtaatgacttgaactaaagcagtagaagtgaggatgtaaagggggagctaaatatttagaaagtgaacttaacagttaattagtgacatattaaacttggggaagtgagagacaaaggggaagcagaagtctaatatgattcccacgtgtcttgctcatgcagcaagttggatgacagtgctacttactgcgatgaggatgaatgggaaaaacaaaagttaagcttcagacataatacatttgagaaataagatagttaagtggctataggctactgtcttgtaggcagtcatgtgtagaaagtttgtagctcagaagaatatatggctttgagggagaggttgggagtccatccacgtatgtatggaatttaaaaccatgagaatgtataaaattactgtattagtccattctcacattggtataaggaaatacatgagacagggtaatttataaaggaaagaggtttaattgactcacagttcagcatggctggggaggcctcaggaaacttacaatcatggc

SEQ ID NO: 138223 - DNA, 1082 bp, Homo sapiens
aaaggagacagttgacaaatgaatgaaatgtgttagtttagccctctctaaagattaattatttgaatacactctaatattggttaaggcagttaatacctgaagagtatattttctttttttttttctcagttaagtggctgtaggctactgtcttataggcagtaatgtgtagaagattgtagctcagaagaatatatgaagagtatattttctgagtctgggatcctagttaatattaaaaaaatgtgacatcaggcattcatataaaatccaaacctaatcaaagcagatagtcctatttaaataactaggcttgaaaaaaagaaagggttaacaactcaaatcttgaatttgtttccattgtatttacaccctagatttctatgaagtgccacattacattatatgcttatttatctctactcttcacctagagataaaatacagtcagacaaatagctgagaatctgaaattcaaagcagttcttttgaaagttaattctccagtaagtttctccagtaagtttcatcctcagattgcttcattcacaatggagtataatggttggttggaaatgtggaaatgaccatttttgatttaaattacttttgtcacacagtttttgatactagcaaagaaaacattgaatatgattgacctagttaattttaatttcatacaattcataaaagttatgttagtaattttacagagtaaaacctttatccatttatgcttctgaaaaatgaccttgtaaaatgtcagaattgccatggtatgcttttgaaaaatacttaatgatttgtgcttgatgcatttaaactctttattgaaggtcaaggattctattagggcatttttgtcagtaaaatgttgacagaaatgaactaggtagttgaattctcactgacaatactgtcacaattgttaagaaattgtctaatgataaggccagattttgctcattatttttcttagtaactaccactagttcattaaatattgccttaattagagtgtgtgttaagtgtcaaaacttaatggtcacagtcacaatccttatttaatagatacttag

SEQ ID NO: 138224 - DNA, 1030 bp, Homo sapiens
tggagtcaaaggattgactggctgataagcctaggaaagtagagaatggctctgatgatagaaaaataggaaagagcctctttgtgatgcagtgtattatttctatctttcccatgtttattttcatgacacagtgggatgtataagtagtgatgagttttaagcaacagaaatataaatatggaaagatgagctttctaagattgtcagtgaggagagaggaaccagaaatacattattgcactatggggttaatgacaaaagaaggaagaggtagaaaagaagggatggtgatcattgtttaagtaatagttcaggaagatggataatggaaaggaattcgggggaaatttacaggcaaagtgggaatatctgcgaaccaggttgttgggtcctaaggagggaatgtgatttgtttcttggctttgtttcttagattttattttcgtaaaatttgcctttttgttttggatttctggagttaatacttctgttgcgtacttttctttgcctctatttctcctcatacttgttttccactcttcctcatgaaacataatgtttttatctgtttttcctaatcccagtataaatcttggcatccacctttacaacaccttgaaccagataaattctacagcttctactgctctgagaactatagacatttgtcagaaactgcctgtgagagaccatcagcttttttcagagtgggtaggagaatctgaagctctagtgtggtgcttaatggcaatgaaaacgcgtcagtgtgcttgatttggaaacaggcactgccacttactagctaagtgaccttaggaaagttatctaacctcttacatctcaggttccttatctgttaaataggaaggacaataatattacctcatagggttttcatgatggtaaaaataaagaaaatatttagtggtctagtccatggtaaatgttatatgagtgtttggtgccattattattgttattgtgttcttgttattctgatgtatcagtatatagagttaaaacatgt

SEQ ID NO: 138225 - DNA, 1787 bp, Homo sapiens
cgggcgtggtggctcaagcctgtaatcccagcacttcgggaggctgaggcgggcggatcacgaggtcaggaaattgagaccatcctggctaacacggtgaaaccccgtatctactaaaaatacaaaaaaaatagctgggcgtggtggcgggcccctgtagtcccagctactcgggaggctgaggcaggagaatggcgtgaacccgggaggcggagcttgcaatgggccgagatcgcgccactgcactccagcctgggcgacagagcaagactccgtctcaaaaacaaaacaaacaaacaaacaaacaaaaaaacaaaaaaaaagttacatacccagagatcaattgagaatgcaataatctctaaaataaatcattactttttagtagtctagaaatcatgtggtaatattaatttttataagtggtagaacagagtaataaacagtttcagccatctttctcctaagtctcagttaagagtttctcctccattgtgaaagctgaaaatgggaaagaacctattcttcctgtctaaatgttgatatccttggactctaggatccagtagagacttaggtatcaacaccaagtatggcattaccttacaacactccaaacagaccctgattcataatagtctgtgctcttgcctgaaaactttatatatgaacatggatatgtttatttgaaggtatgtttaatatgggccatgaggacattatggttacctaactgaggatagagataataaaagcattttagaatcattgtaatccaaacttgaaagtagaaacttcactttaaaaagcaagatagtttatattttgatagtgctcccaaaagttgaagattgttcttatggggactcatattgttgcatagttgttagtaaaataccatttataatacaagttctgttgccatttggttaggaaataaaaagtaaccaatgtagtaaatgctcaataaatatattttgattatttgttgaatgcattaacatataattgtaaaaaaagtagaaagcacaaatcttagatggaaaggatcatagaactgaaaacataatataattattttgcagtacatctgagttatattgtgatgtactttcctaaccaagtccaaattaatcaggagctctgggagaatcatccctagaaacaatgcctttaaatagagggtcagaggaattttcgtatttctggatttcaaactgcaggtggctctcttgatctttcagttctgaatttaggttaaagactgctgttctgccttcttcctgtccttgttacatccagactatcagacttcctgttgaaacactgataattgtcttattattggattgtaagcaacatcgctttttctcacatgtagaagatagagttttttttgtttgtttgtttaacaaaatatattgcttggccttcctttaaaatggctctgatttgcctttgcatgtcttgtgtgaggagttgctaagtatcaatggcattgttgataatgcttgtaaaatagcatatcagtattctagcattattttaaaagaacaaaaaacaggtgattctaatcattttccttcctctcattttctgggtagcattgctgttttatctcataatttattttgtacacatctggtactacaggaattttaggagtcccaaaatgaatatgaaaacctgttgatacaactttaggtggaaacctaagccttatctgtccttttattcattctgatggttattttaaagaaattgctggataccattgaagtatagag

SEQ ID NO: 138226 - DNA, 1530 bp, Homo sapiens
ggctattgtcttggagattcacagaggaggcctcccaggaattatttgtatgttccttttgtgtaaagtttttgtctggaaagtcgctgtgcaaacagtagctgttccatagcacctgcttctgttgagggagagtgagtcttttatttagagagcatcggtagccatttcattcattactgcacaatggacttacataaagagcagcattccaatgacgccaaaagaaaccagagcttccaacacgctgaggcgcttgtaaacattgagtctccctatgtttctttctaaacttttcttgcaattacatccaggtctttattttgaggaaaaaaataattgattcagagcaataataggaaaagttataaactgcaatttttaatttaaaaagctgtattatgtaaaatgctgtggcaatgtcatatataagcttggtcatttacataattattgctttaatcttcttaaggtattagaaaattaattgcattatagaaataaggatgccaaaatatttcatagaattttttttaatggtcatggaattgttttcagtgtgcctatcttcctaacatttaaatgattttattattttcgtggccaatcatcttcaatatgatgtcaatatccagtgcatctgctactttccagccctttcattgacccctggcagtgtggtacccatgtttgttactctactgaaactactctctctattgcctctagttcctaccttctaaccttttctctcagctattatcattcttcatctttatgtttgataagaccttcctgatacatcttctcttggttttgtttttgtttttcaagaaacctgtacccattagcagtcactcctcatcttccatcctcaaacccctgcccctgtcaatcactaacctattttctgtttctatgtatttgtctattctggacatttcatataaatggaattacataatctgtgttctttttgtctggttcctttcacttagcttatgcttccaaggttcatccgtgttgtagcatatatcaatacttcattcctttttatggctgagtagtattcggttgtatgatataccacagatggtttatccgttcatcagttgatggacatctgggttgtttccaccttttggctattgcaaatagtgctgctattagtgttcctgtacaagtacttgtttgaatgtgtcttttgaattctactgggcatgtatcggtatatatctaggagtggaattgctgggtcatatagtgattctgtgtttaacattctgaggaactgtcaaacagttttccaaagtagctgtaccatttcacattcccactagcaatgtaaaagggttccagtttctccatatcctttgcaacacttggtattgtctgcttttaatgttagccatcctaatgagtatgagaatattatggttttatttgcatttccccagtggctaatgatttcgagcagcatttcatttatttattgcctatttgtatatctactttgcagaaatagctatt

SEQ ID NO: 138227 - DNA, 1062 bp, Homo sapiens
acggttctatttcctgaatttatccttgtcattttgattggaattttgagtgttggttaggcaatttagtgccagatctttgaactgatcagtttaatgccactagatagctattaataataatagccattatctgtaggcttttttctattctaatttccctaatttttaagctcttggggggccagtgtgttacctcattcttgtctctttttacatctattactgctatgctccgcttaaaaaagcactcaagtccacaaatcttagtgtaaaggaagtatttcaaagagattatctcaattacaaaagaacttgcataagtttcctggaatatttttaagagagtatattatgaaaacttaattttatttgcaccctttgcctaaaggatgtactgctttgtttcagagagtctgacttatgtgactaactactttggctcttttaagttttcagttttcctcgaataattcagtatctctattgggatcattaactgtttacttcacacaaccatttactaaagacctggtctactcaaaggactataattctaagtaagacagtatgatgcccttaaggaacatgtgtaaaccattgtatggtatccttcccaagggttctggattctgtattttgaaagtctcaaattcactgccagccatctacaaagaggttgcttctttttctggtagaaaaacaattcctaatatgctataaaaattttgttgagaatatttgatcttcagatatagttaggtttccatagatacatctagactagatatccattccgtgtcaagaaatgaaaatgtgagatttttatgagcaagattagcaaacaattaaaaccagtttccaactttaaatatttgaaatcctcacattcacagtgtactttttttcctaagtaagataatagcgtcagagatcagaaagatgccagatctaataaactaagtcagctgcattagaatgctagtaaatgtccttttgaaaggtcatctccattagtccttttgttgctctccttatagggtttttccccctctttctctc

SEQ ID NO: 138228 - DNA, 1049 bp, Homo sapiens
tagtccacttttattattatgtatgtagataattaacagtttcaatcatattgtgagtagaaacgtatgtatgatatagagtgatctttaaaataatctacatggtatatacagaacagattttttttaatgttgttagcctaaggttccaaaaaataggaaagtggaaatcaatgtggaattgtcaagtctgcaaaatatctttccttgggattgtacagaactcattctaaaaaaaaaaaaagtcaaaaacttcatcctgcagcaatgttctttcatgacttaggactagaagaaagagagaaatcagactaccatcatgtaacgatttaaaaattaatccatacttgagacccctgtaccactgagttttttttaacataacctcctcttttctcgtataaaaaaactagattcagaacattacagttgaggaggaatatattaccattgtaactactgaacactctctattacttaatttttttaaaagtgtgtatgtgtggattggatacagtaatctaggaaagtctctgtgtaacagtgagcatggtatttttctagacattgttggtctcagaggtccccattaaaaagaataagagttgctacttctcaaaccttgtcagatactgggcatattacctgcatgcacaatggagggtttgaggataccagtctacctttgtgataaccttgtttatacacttacaaaacatatcggctagtgtatgcattatttctacaacactaccacagctttgcttgtaagattttgtaagaaatacacaagaggaaggaatcataggccttggattctgaaatgtctaattcagtcacagtgatgcagtgctcaaatgaactatagcagatttaatgagcaatccaggacagagacacatgtactggacacactagggaaagagattacgtgtacaggggctaattagcatgaaatatgaatacattcatataagtagtcttgatctatgggacgccttcattattgggaatgatttttgcatgaagttaatgaagagaaattcagg

SEQ ID NO: 138229 - DNA, 1050 bp, Homo sapiens
ggaaggtattcaagtttcctgagactaaagtgggtcatatctctgtcccaaaactgaatcatttgaaatctgaaagtgactttaaagatcatcgtttaaaaatctcaccatgtagatgagtcaaatccagagacactgcttttgcttgctttctcaggcacacagacttcactgaagagtagtaagcttgattgattctctgacagctacattatattgtagagaactttgttgttattgatctcatttacacatttaattcctactctgtatgtgggaatataatattttactgatttaataaaccaggcatgatttcttattgtgtgatttattgtgtggttcttttttgtcacaaactttgtaggttgagacttggcaagtaacctacccttgagggtttttttttttttttctcccagatgatggtatgtgtggtagtctctctaaggcattattatgaagacatttattaaatctcggtctatttgagtgccacctaacgtctagatctctcaacagttttgcctagccatcatttctcagcttgggatggtgtagagaaacatattattcccacctgagcttatagaactgtagctaacatcatcagatatcagggctttgagcaagcctgcttgtgggtggtttatcttttccagtgatttgagacttgtgttgcattgaatatactttgaatttcacgtgtatctctgctctattagtctgtatttgggttgttttgaaggatttttattttaatatgtagactgatacatttttgtatatgttgctggaggcgcttttgcactgctatgttttagaaatcaaaataataaataatgcatatggtgttcattgtttttctcctctgtcttttgatgactattaagtttcattggaagtgttagtaacatttctttatttttatttttactattttaaaaataatagtaataataataataaacgtttagctttttagccaggtgtagcatttcctaatttgaaaatgtgctattcattttttaaatagactattttgtagag

SEQ ID NO: 138230 - DNA, 1021 bp, Homo sapiens
ctatttctcacgttttctcttcttcaacttctttcatgcctcacctctaaatccccaaagtacacaccacacaaacacttagagaaacataaacatgcacatgtttgatgacctacctcataattcattaacaaatctagaagcactccatcaagagccccttcatattcccttgcaaaatctatcaaattgtcctgtatctttattgatattatttcctgttaccatggacagaaagagtccctgtacctatggaagagcaatctgtccacttgtgccctggttcccattcctcagtgatttagctcctttctccatgccatatttattttctccttctcaactggggatcattttcagcagcatactaacatgctctagtgtctcttctcttgatagaaagaaccactctcgacctcatagctcactccaactattccctatctctctgcttctcagagagcaaagccccttgaaaaatttctctattattctattagtcactgtcttacattgtcatctcactctcagtcccttccgattgaactttcatgttcatcattccacagagtctactcttcttaagaactccagtgaccttccatgtttgtggctcaattattattttaacctctcagcagcattttatatatttgaccattccctctttcttaaaggaaactatgatattggttctcatgacttcatactctcctgggtttcctccctcactagcccactctttctcaatttgctttgttcactgctttaattggttttcacatatgttttggagatggaaccaataatacttgctgatgaattggatttgtgcgataaaagacaaaaaggaagcaagaaagactcctaattatttggcctaagcaactagttgatggtaccatttattgagaaaggaaaaacttgggtggtgtcagggtcaggggtcaagaatagagagttatgccttggccatcttacatttgagattttttttctagactgaaatcatgttggaaat

SEQ ID NO: 138231 - DNA, 1036 bp, Homo sapiens
tagaagccagacaggagcagagctgtatttaaggaagtcaaatggaagagtataagatgagagggcctgagagtctgaataggcataatgcctttgggaatgaagatgagaagaataagagcacaaatgctgagttagaatctctaggagtagggaatttattattgttgtgcaatagggtatagggaagagttaaatatgattttatattaaacatgcttattatttcttgtacatttatctgtgggactattttagggcctagcatgagggttgatatccttcagaggagatttatgtttgcttttgctgggttgcaaaaccaacctaggctgatgttaatatttttggcttaaggttttcttttttttaaagactcttgaggagctatgaattcaggctgcatgaaggctggctttggactaggaaattatcagagaagatttttactttctccatccagcaccaaggtttgttatgggcaattttcttttcaggccccatgagagatgagcaagtttatttctaatttactgttaaactgaggtgtgatcctctggggtttgtaggaccattacctattactctttccactttgattaggccctaggcttggtttctattgccccatacttgaggccttgaaaactgatgctcaagttcatctgggttcagaatattcactcaaggtcaaagctgactccactgatatttatctctctaagtttatctttcacttagtttttggcctccaggtattccttactttcttgccaggttatctgtacgttttaaattatttttttaaatattcatcatgttcagttctcttcacaggtagttgatatcagggtacatattctatcatactttcaggaacagaaattaaggtgaccccttcttacatggacatgtgacatctcagaatgactttattcttgttatagtttcctaaacatgagatattggtactagaatacagaaattatggtacctggccttttctgatgtaacttagttttttattaatactcat

SEQ ID NO: 138232 - DNA, 1853 bp, Homo sapiens
taaaaaggctagagcatggggactttggggtcactaatatataaggagtaggtagaagtagagaatacaatatggaaaacagactagtcagaagcataggattgtttatcagagaagtctggtctttgaagtcattgagaagaaagtttcaagaaaaaaactattagtaatttaataaattcagtagcttcctatatcgatgtatatacatataggtaaatatgtaacatacttatattaatacagagttgaatgatagcaaggtcactcctatctgttgttatcaaatttcagatcttaaaccagtaggacaatttctaggaagaacacttcatgattcatttctcaactaagagaatagtgctcttatttttctagtgatcagcttgaagtagtttttttcattatgtgtgtttatgccttgcagtttcattgattacatactttaaaaggttttaatgtggccaagtattgaggatgtagctgtaaaagcctttatgtggtggtaaactccagcatttaataactgctagaaatgcaacatcttctctcttattgtatttgacagtttttttgttattattttgatactctttattttgccaagagttaactcattcctaaaggtattttatgccagggaaatttcattccactttgtatagtaggctaggttttatattaacctttgagtgtgcatttttactgtggattatacattactggaattacttaagcaaaattcatactgagattctttattttaaaactgataatgaccatacgtattaaagggctagctcagaaaactgccagcaaataatcatctttgcctttgggaaataatgaagtcattgcatcgtgcttgaattaccatagactatatcagcagatacactcattgattcatttctgttctttttgttaaaccaaatttttctttcatcgtttttagtaatgtaattttctatgtctggtatgcttacctgtaatttgacagaaccccatttctttgtatatctcactctattagactacatgtagtgcagtgtttgtagagggggccattaactaggaattgatatttacaaaggtgcctattaagtgccagtcactctgctttgttttaaacatagttcacttaatgaaatgataggcaaatatactaagggagggaatttgttgtagtggaatgaatatgcattgaaagcataggtttgatctaggtttgaatcccagatctaatagtcatttggtggacgaagtcacttcacgggtctgagccgaagcttttgtatggtaaaaatgggatcctatcttgaagagttattatgataattaaattgttgagagatacaatctaagatattcattaaatagaagatatataataacatcattgataattactattagaaaggaaattagacgtttgctttgctttgagtgctattactaaatgatgagtcgtatgtggcaaaaggagatgtggaacgtacaggcaatcgccttttaaataaaacctgaaacaaaaattatttgaaatgttagtttggcagttatgttggattatatacgtttcttaaggctagtgacttgtttcctggaattctttcacttcatagggtaacaccttgccccctactaggaacttaactatttctttaattttattacattgaagctgcttgaggaagcatgcttttttcactaaaaggacccagcaaatttcattctttcattggaatattttctcttaatatgactgcaaatgcagttagtaagttgaaaaagccacctgttgtcgtattggcaggccacctaactggtctgtctgtacttggtgtgcaggg

SEQ ID NO: 138233 - DNA, 1078 bp, Homo sapiens
atgctatttttctctttctgtcacattgggaaattctattttgttgtcagtaaaaaaaaaaaaggtgtggtacttgcttactgtctatgtagactttattttgctagttgatttcattaaagagtgattccaggaagctttgggtcattgtatcaccttgtctcattccattatatgtattgatgcaacatggatcgttgaacagtataatctcttttgcacagttcctattgattttatccagtaaatcattgtctgctgggtttgttctgaaatcattttgtgcataaaaactattcgtgaatttgacaatcaggtgccttcttgtaatagataaacttacacaaaactggaatccagtcactttttgtctccttcacactatatagttatctttcctactaaactgatcaagtgagtgatctctattcagcaaatgtttctattccctttctcatttcttgtaatatggcttctcttatcattgctcttttgaaattgctctgtatgatctgaaatggcctattttcttctggtctttttttttttttttttaagtatttagactatgcttgaccttcctgctacttttgacactgttgattactttctcttattgaaacattttcctttctcacttctgggacaatgaactcccctgtttctcatacctttttattgttctttttgtcctcttaattggctgttctgtcttctctgggctcaacacttcaggcatcctcactacttaggctttagttacaccttgaagacagaagatcatcactttcacatttatattcctgtaccctcatttttccactctaaaatttcacatattttattctcataatatttcctgagcatcattttctacataccatgagaggagggattgatgtgggagataaagttgtaccgtgaatgttctcttccctacaagtttataacttagataagtcaataagatgcatacatgaaaattaattaagtagggcagcatgtggaaaataccttttcagtgctaaaggtagatgaagaatgtagtggtaattagagaagatttcatagagaaagt

SEQ ID NO: 138234 - DNA, 1064 bp, Homo sapiens
ttcaggaaacaagagaacttaaagcttatttgaattttattctcgtatgtctttttacatttccaaaatggtctcaaatattacttttctgctttcaaatagaatgtcaccaacagactaaacttgacttaaaaaaagaaacaaggagccaggtgtggtggctcatgcctgtaatcccagcactttgggaggctgaggtgggtggattacttgaggtcaggagttcgagaccagcctggccaacatggtgaaacccagtctctaccaaaaatgaaaaaaaatagccaggcatggtggcaggcgcctgtaatcccagctactcgggaggctgaggcaggagaatggcttgaacctgggaggcaggggttgcagtgagctgagatcatgccactcctctccagcctgagcaatagagggaaactctgtctcaaaaaaaaaaaaaaaaaaagaaggaaatgaaatcttcaggtcctccctatcttactcttctcagaattattctaatgttttgatcacctgcaacagtatacactgatgtggtttctgaactaaagaaaattactgctgaaagataaaattgaaaccagttggaatccaaatggggaaaacagggacagtctaacttgatgtttcccattgagctcagccagcaacaaacaaattgagagactcagtaatatttttatgtgcatagaataagaactgtattatatgaaatacaaaagtctgatttatgtgtgtgtgtttgtttttacagaacttgctcttcattttattataaaccagtatgtcccaagtgaaacattaccgaacactgtagctgcttatgagctctcattcaaccccaataaggatgggatggtagaaactaattttttaattttattaaagttgagctgcgttttcagtcattttacatgaaaacgtatgtgagactatatggggaataaaataaaggacagttacagtttttgatgagataattgatccctgtaggaatgacacattcaaaaaccatgaggagtataaatgtgtttgattatgtgtatcctacttgaaaaaca

SEQ ID NO: 138235 - DNA, 1484 bp, Homo sapiens
actattcttcaaaacagtctcagcaggaatttgtatatggcaacctgtttagcagttaaacttaccttaggtgctttaaagcaatttcactgaattgtttaaattttagcatattttgagagaaatgcatgtcttccttttccctcaattagttcagattagtgaggttgtactatatatttaattccagtactgctgtaggtacctggtaaaggagtaattaatgttgcgtattaggtaagaaggagcaattgatttttggttcatttggcttatcttttctgcttaagtgctgatatttaatttgtagtgaaaactctaaacaactctgtatttttatgtttatcctcttccttgagctaatgaaatcaacacatttattgatttcagaatgagctttattaatgtagttaatatgccttactaatgttattccgtgtacttggattagtacccttattgtttatgaatcaacattttttctttcagttcaaaagaacgcagaagcattagaagaaaagaagactgggcctacaaagaagaaagtgaaagaactgagaattttggatcccaaaacagctcagaatctgtgtatgtaatattttcttcgtaggattggtataggtaacggtgagaggggtgggagctgtttaatgtatttaatgaaagttgtaacctttttaaacaggcatatttagcatcttctagaaacaaaatcctgtgtaaacatgatttggttgcctttttgtcacttagccagtaaggagaaaattctaattcaacctctgtcaggccagatgaaacttgggaatagtaaagatttggaaagtaatgataataaaacactgttggaggacatagtgaaacataaggcagaattgacaaaaagtgatttttttttccttctctctagacctgggattgatagttttagagtattcactagttacattggaaaaatccttctactgctattcctttatgtctgaagtaattgcgatgtgagctacttaaattgttaaccttaactgcatttaaaaactggttagtgaatcttgaagcctttaacaaaccagtcagccattaagtataccttttctaaagcagatggacagttaaacccatcttcatttatgtaagcctttaagttttaacatactcttccctctgtcttgaaatcagaatttttggtctgtcactacagtagactgtgtttagattttgctgatacaaaaacactatgcatcagagatttccacacatcaagcatgtctaattgcacaaagtaataccatgggagcttattttgttaaggaatgtggtatagggaatcattacaataaacaaaacatcattctcatgtcagtagaaatgttgctttcagagaagcagtttatcagtagctgttgtgaatgtgtacattgcttatttgatagtacattttcaaagttgacgttcagtacttttctttaaaacacagtagg

SEQ ID NO: 138236 - DNA, 1014 bp, Homo sapiens
agtgttcaagttctgcgtgccgggcgcggtggctcacgcctataatctcagcactttgggaggccgaggcaggtggatcacctgaggtcaggaattcaagaccagcctggacaacatggtgaaaccccgcctctactaaaaatacaaaattagccgggcgtgatggctcatgcctgtaatcccagctacttgggaggctgaggcacgagaatttcttgaacccgggaggcaaagtttgcagtgagccgagatcgcaccattgcactacagactgggcaacaagaacgaaactgtctcaaaaaaagaaaaaaaagaaaaaagaaatgttcaagttctggtgataagaacacatctgtgttctttaaaaaatatgtttaatggaacatgttgttgcaagtaccttctgaataattgttagctattctaggtttaatttgctgaattattccaatatgatatcatagatttccatttaagaaaaagttggcaggggaaattgtgagtcaatatataaagtaagtaatagtgtaccacaggaatataagcaggaatgcagagcacactgatgatttaggcactttaatttttttcttatgtgggagaattgcagagtagatggatatgattttttatttggttattttattgtctttcctgagaaatactgtgttgggtgcatctgacaatctccacactaagttcttcattgaataaaaaggtcaacttgaaataaaatctcttaagttttcatgggtcattttgtgttatcatcctaatctaaaaggcataagcatgtagtcatgaatgctattagtaggaattttattttgtgtgtaaatatgcactagctataaacattacagcccgagaaaatatgccattttgtctagatggatagagtgagtagtccatcaaatggaacaacttttgtttgttcataattctgtatattagtgacaaatttcatattttgagtctatgaaatgaaaatcagacgtttattaggactttaac

SEQ ID NO: 138237 - DNA, 2142 bp, Homo sapiens
agatgacttccctctgtcaggagaaaagactataatcactagcacctttttctacccccaattccagaacatttgtttcagtgatggaaaagtaacatcaatttgccattcatttgagctgtttaccatttatgtctaattaccatgtagcacatcgataatgcatggcattaaatgtgtatcatcagattaactttgttgtaagttctatttgattacagtgctaaactccatccatgcataattattgttttttgctcatgtagcatggttgtctcctcatagcaacaaaaacaacaaacaacaattaaggatacatcacttcccagaacttgaattaacagtagtagtattttctcttccagtatgggtcaataggctcttgctgggcagacaactgatagaatttagttagttggcaggataattgtcttacttaaaaaacaaaaaacaaaaaacagaaaaacttttatttaatcagcaagatccagctctaagttgaagcttattaataaatatcaattttcattttatttcaaaatatctaaatttaagctagaaaatgagttctctatgtgggaaaaattgaaatggcctaaaatacttgcagtagcacgtagaaacatttaaaagtacaccatatcctgaggttgttgaggagtttttaatacatgtaattatgagttactgtcaaataatgtgtactaaattttggtgacttttagaatcattattctagccttcaaaatttgtttcagtataattgaatttgatctattgagagaaaaatctaagaccaatcagtcagtgctttttaggatatcagtggtaaaacagaaatatgtatagacacacatatagagcattgacagagtaatgaaacgagcggtttgaaaaaagtgatgcatgtgtgaagggaaaaataaaagtatgttctatttgagatccttagtgcatgcaaatgattctaggtagggagtttatacttatattcttaaggaatatgtgaaaaaaagatgatcaacataaaagatagtgtattattactgcagaataatttgtaaagatatgataaagcataggttggtaacctggagttcaaagccctctttggggacccatggagagaattcagggggtcctgaacttgtatgcgaagaatattacatctttattttcattatcttctaattaatatttagcatattatttaagagtataggcaacagaccaaagtagtattaacagtacctctaagtttttcactaatagaaataataaatattttcatatcacattatagttgtggcagagatcttaaaatactgttacagtcattaatgcttcaaaattacagtacttattagagctgcgactagaaattatttttaatgctttaatcaagcacttctatcattatatcactattttggtaaatatgttgataactatttaaatgtaattggtattttatataatcctatttattttattttatcctgatatagaggttcacagaaggtgaactgtagggtagggtgggctgtggttaaggtagtcttcctggaagaagtgttctagactttgaaacactagtaggattcagttagagagggctaggataggagaatggtggccaaaggcttgaggtatataaaggatactgtctttatttttctggtatagataagccgtcatatagggtagcaatgagaaagagcgcataaaagattagtagcttggtggtggtcatattttaggggcacacagatagcaaattggtgactcacaggcattcacgctctctacctctcactttctctccctcacttctgttttatttggcctttctagtgcctaatcagtgaaattttaatgtcacacactctccggtttgccacaggtgccaccactccctattgcattttacttactctgactcattcctaacccctatatacaccagaagttttgatccctggtagacaacatgaatgctgagctattgagtttggtcatggtcaaattgtgtgcttaggaaaggtactcttagctgcagtacatcagatggcttgatgtaaagagacttgacatagggagatcattgcagtttcaagcataaggtgtaataaagccctgaat

SEQ ID NO: 138238 - DNA, 1025 bp, Homo sapiens
taggaggaatagttcaggaaatttattttagaacatggtgatgatagctaataacagtgtattgcagctttgaaaattgctaaggtctattttaaatgttctcatcacaaaaaattaagttcgtgaaataatggatatgttaattagcttgatttagtcattccacagtgtatacatatatcaaaacatcattttgtacaccataaatatatcctttttgtcaattaaaaattatttgcctttgtatctctgtcagaatcagaggccaccaaaattaaaactaaagtaagctttataaattattcatttcccttatttcgcgggaggagaaaccaaggctcagagaggtttacatcacatagtcaatctgggatcacaacttggttcataagatgctcaatttattgatttttttaaagcccattgtttgacctgtttttccttgctgtggtatgcaggtgggcgagcgggttggggagtttactgctggacagcaataaaaagtagtaacagaaagtttactaattaaaaacacttagtgcaatctctgtcattggaagtcagagtagaaattaaattatcccttgaaacatcttcttccagtattagatgacattataaatgtcttcattgacattcattattgtttgtgttgtgaaatatataattaggtgccaaaaaatacttaattttacttaatgcagtataaggggcattggattccgtttctgcattaataagcagcattttagtaaaatgaaagggtagctcaattactaataagaccatcatttattttatcccatatgaaggattcagagtgacagaaccatttaatgaagtctttcagctttgtgagaaaaataagagtacatattttggccttcatttcataatttttcttcagtgtatatagctgaatagtgttgaaaaattagttgcttcttgggaaaagcaaagaaggtgtctgcttttcttccttgagtgctatgactaattgctacattgtctctttggagtttcta

SEQ ID NO: 138239 - DNA, 1102 bp, Homo sapiens
ggattacaggcgtgagccaccgcgcccggccaaggagaacgtttcttatctagatttttaaaaatacacaattgtcaacataagttaaagtaagacattacatatatatataatatatatataaatacattttttataaagaaatattagccccaatccgtttatgtggaaaatgatagtcttaatcaaaatgaacctaacgcagttcttctactagtaaagtgacttaatgagatagaagacaaaaaagaaaggttatgttttggcaagaaggaaagggcattatggttcaatacctttacttaactaacctttaagtgttcaattaacatttaaaggaaataaagttttggaagtattacagaataattgcagaaatgtaaaaagtagttaaaagcgtgtggtctattcgtagaaattccttcacttaacactgacaatcatcagaatgtaaatttgtgatgcgtaaaagatgaagaaaactctgctcaatcaatgacatagttgctgctttctcttttgctgttttctttgtgaacttcagttcattgacattttctaggataaaaccttcatacttatccagaattgatcttttaaacacaaatcctgaaatatttgaaaaaaaaatatgcacagtagtaagcagcagcaggtggggttgggggacggcggagaaattgaagggcttgtgccttgaaactttccaggatatttgcctatcaactcacagtttgtaagaatctgttgtacttaaaaatttatcacttctagcctttactactatgaacagtttttcacttatagcgagcatagagggtagtcttcgactattaactcacctttgcagtttatttagagaacagaagcaattgtagtatcaaggaagcattaaattcaaaagctattttaattttttttaagtacagagttttggggcaatatgaatctaacaattttattgcctagcctgatctgtgtcacttcacctgtatttttcttgctcttgctcatagctgctgttgcaggaccctgattcttatcaaaagtctcaacattagatgtttctagaggtctcaggaaatagcttacacattctctg

SEQ ID NO: 138240 - DNA, 1106 bp, Homo sapiens
aataacaaaagtttcacattccaagctaaaattatattttaggcttgattcattccacaatacttattttcccagttacagcttaaaattgaggtggagatttttaaatatgcagaattgattttaaataattttgattatcttaatctttctaatttagtttcactgtggtgaaaattattcaagttaccaaactgagtctttgtttttcttaataacatacatacttcacacaaaaaaaaatcaatagaaacagtttttaaaaacaattgagtaatttccatgcatcaaaaatatttgaaaaaatggaaataataccttggtatttacttaccttcttattctataaaagaaaataatactaatggagcaaaatagtggattctcttgatttcatttcagtattcatatatgtggttatatccatatttatattttagtcaaagggtgcgatattttaaaacttgggtctcattaattagatgataggtgccattgcaggcccagagtttaatggaaaggcaaaattgagtgggaggagggaagagacaaatggggagaacaaaagggtacttatagtaggggtatagtacagttgttttccatgagacttatgttctgtgtaccctaccctagttatcttttcattgtggaaaaataggtaacataaaactaaccattttaccctttttacgtgtataataaagaagcattcattacatttatgttgttgtacaaccattaccactatttccagaactttgtcatcatcccaaacagaaactctaaacctattaagcaataactccccatacccttctacccccagcttccggtaacctcaattctactttttgtctctaaaaatttgcctgttgttgatacttcatatcagtggaatcatacaatatttgttcttttgtatctattttgttttactaagtgaaatatttacacatattgttatctatgttatgacatgtcaaaacttcattcctttatgactagtagctgggattacaggcatgtgccaccacgcccggctaatttttgtatttttagtagagatggggtttctccatgttggtcaggctggtctcgaactc

SEQ ID NO: 138241 - DNA, 1095 bp, Homo sapiens
aaccccgtctctactaaaaatacaaaaaattagcccggcatggtggcgggcgcctgttatcccagctactcgtgaggctgaggcaggagaatggcatgaacctgggaggcggagcttgcagtgagccgagatcgcgccactgcactccagccagggcgacagagcgagactcgtctccaaaaaaaaaagaaaattattctatatgtttaagtcccagaattttactcggttttggaatacgatttattcttatgtgatcttttattcaatatgtatatactatattgtacaaaaaccaaacaagtttatacgttttattcacaatttattgtagttcatttttaggtcaaattttggaggggcggggaagggcggatactctggtaccataacagaaccacagtcagaaatgtactgtcctagttaatcactttcataattgttaatgcatgtttaaaaattctaatactaaaacactaaacttttatacttttatttctttttagaaccttgtgaaacatcttcctgagcagaagatactcaacgaattagcagagcttaagaatgaatatgatgacctctgtgagcctgaacaatttggagttgtggtatgtatccaacatgagggaccacaaactcagctgggaggttaacacttgccagaaacagtgaaaagacaaacatttcagttgtcaattattttttcattactgtattgctacataatttaatataatattggctgtcagaaaaaaatacttttttacctattattatttgtcatggcattgaaaaataataaaatattcgcattcataaaatacttcaaaatatctcaggggatcttttgaataacagtgccaatttttaattctattaatatatgcaaacagtatacattattattatatgggctatttttctttccatttagatcttaatgttagaatttggcctccaaaaagtaggttaaaataaaaggataattactagataattagcaaagtactagagactctttttctagggtatatgtcgtgtcagaaaaagcaaaaggattttcagatttcatatagagtgtcattaattgattta

SEQ ID NO: 138242 - DNA, 1035 bp, Homo sapiens
tgtcctccaacctacctcccacagaattgaatttggtacatcattgtaattatgtgctgtacctttactagggaaaaaagcacagatttttgaaagctctggcagttagaaccctcagcaggagcttttagactcttctgagtgtctttgcagctcagctgttctcaaacctcagagcaatggaagttcccacttgtcttgcacaggggatggagacccatactgtgtgtatctattaaactaacacatcttctgaggaaaagaaggcaataattaattctcttagtaatcgtactttgtttttctgacttcaaaattatccatatttttcaattaaaaacatcctaaagctataatctaacaaaaaatgttgaaattggcttgggcgtagaaatcttcataataggaagcacagatgatgtgatattgcggacagcacatttaaattttttttacacaaatatatgaagttgggaggagaggatttatgcatatagttggaagtacaactataaatttactgtgctttttaatttttttaaagcctcataagagcttatgagctataaagatagcttaaccaggtgaaaagaaaattcttaaaagctttttttttccttccacatatcatcaaaggcaattagtttggatagaaaattgtaagtcctctgttccattaatatcaaatcatttttcacttttgcatattcagtgtgaaaattgcatttttctttattttatatgcctgcatttggagtattaagtgttttgatttgtaatgccctgattgtttctattttcattacttttgtaaatattagtgctagttcttacttctagatatatattcattttatctgaggaaaaagctggtttaataattttgagatcaggtaaaagaaaactcaccatgactcattctcaaatacatgtatttatattcttatccctcttactaacttcttataatcatttttttgtgacagaatttcttatttccatcagcttttgcaataaaacaaggtaaaataaaac

SEQ ID NO: 138243 - DNA, 1033 bp, Homo sapiens
agaaaaaaattctcctaaatcctattctttaagaaaaagctgtatggggctctgaatttgggctaagattgggccttggcggtattgttggggtgacctacctggaagctaatgaatgaccttacatgtacttcctctttccccacatcagcctgctgttatacctcttgaaactatatgtcctcttcttgacccagcattttactgaatattatgtttcctatttatatgaatgaagccattcattcattttacgatggtttattttcaaaatcacttttcatctttatcatctgccatgtatcaaaccttgttgtaggagatgaatcaatgaagaatttttgccagatcaaagggcaactttgaaccccttacagtatacaacttcttctgaaaagcaggctgactcatgatagattaatatctagtaatactggttcaacaaagttaattccctaacatttctggtttgacattataactgaagacattattttgtagaagtaaaatattactgtcagctattaattttgttgaatagacaattgtcctacttgggaaaagatctggaaaatagtcagctaaggagtgctttaaaaatcaatcagcacatattgatatactcaagactctgtgctaggtgctccacaagatgcagcttttgactcctttctccttttttttctctatgcagtctctgtatcaatgaccttacctcccatagcatctattcagataactcccaaatctgccaactccaatacttctaacccctagaactatagtttcaaatcctagcagatatcataataataacaaaaactcaacatgtcaataaagcaattttattatttccctatcatggaggtatcattttattattttttagaggatttgagagggatcaaggagaacatttagtctatgttagtaatccaagcttgaagtacataaaattatgagtttctatatggtgagcatggaaaataagggacgactctcagaaattctgcaggttaaaatattggtaagg

SEQ ID NO: 138244 - DNA, 1055 bp, Homo sapiens
gttcacctcagggacagattttggcagtttgaatgctattgatggctaatgattatgcaattaacatatagcaactgttcagcttctataatattttattaatgccataaggatgatttatttttttaaaaacctgtatagccaactgctttttaaactttgataaactatttctttggaatgtttaaaacaaaaaagatttttaaaatcccagagcaaactgactttatgcagaaatgttacagtgttgtctatgaaattatccccactaaagagataaaataagaggcattaaatgtatattctcatagggtatttcttatcttacagatgagctctgtgaaaatgttacagcctcgtctcagtagtatcctgttcaagctcacatttgaagaacacataaacaacatcaaaccaagcatcatagcagtaactcttgcctgtgaagaactgaagaaaagtgaaagctttaacagacttttagagttagttcttcttgttggaaactacatgaactcaggctcaagaaatgcccagtctttgggatttaagatcaacttcctttgtaaggtaagatgacattttataatgctaatttacaacaataatcttcttgtctatgaaaggtgatactgcaaatagcaatcgtacataaaccacaaaattgtatgcttaaaaagggtgaattttctgggatgcgaattatatctcaattcaaacaaataattttttaaaattttagtaaaatctaaaagacttgaatattcttttggaatacagtacttaacatttgctgattacattttactgaagtttatagacaaaaaaatcccacttttataaactagatgcagtattggccaggcgcggtggctcacacctgtaatcccagcactttgagaggctgaggcgggtggataacctgaggtcaggagttcgagaacagcctggccagcatggtgaaaccccgtctctactaaaattacaaaaattagtggggcgcggtgacgggtacctgtaatcccagctactctggaggctgaggcaggagagtc

SEQ ID NO: 138245 - DNA, 1024 bp, Homo sapiens
tgaaagaagtgaaggttttaaaatctgtcccccaactcaccccccacttttcagtaagatttttatcttctgggaaattttctaggaaaacagttgtcatttagaaagagaaatatcatacacatgcatgatattcccataatgtataggattcgaaggatgttcctggaatacaaaggattgtgagtaaatgtaaatgtctaaaatgacagaaattttctgaagcacgtagaaatagttagcttagttctgtattatgtttgaaatagaattaactagctactgatgtatgattagctagaattgctgtttaatttcagttgtattatgaaagattacttcattgatttttcttagtgattgccttcttaaagaaaatagcagggggaatttccctcatagaacactgattatggttttaaaatgataccatttactctcctaaatttttctaatgataatttcttttctcagtgattttaaaactaatccagtgcttttaacaagaagctatagagtatgttaaaatattcacctaggtaaaaaggaggcatgtggttaaacttatcagatgtatcttgtagtaaggtaatataaaaatttcagatggtcacagttggctgttatggtatttgggaagaaaaggaaaacagatggattaaccaaaatgtcaacactaaagggtatcattattgtaattactaccttcaccacaaaatgctttgttaatttgcagcagtgaattatcactttgtgagtcaccaaaccagtgtgctgaactgtaataaaaatcatttcaatgaagatgagctcccaatgttagcttagcctgttggttattaaaattctaaccaatagaaatgctacacttcaaggccatttgtttgttgttttttttttcagtacgaaatagcatatataatctgcataaggacaaaacattttaaaatacttagcattccctatatactaagctttgtgggtttatcaaataaggatctttgtttgtaagtatcagaacgtg

SEQ ID NO: 138246 - DNA, 1064 bp, Homo sapiens
tggagggggatgaaatgttaagccctatttccaaacttttatttttctccttgggggtcctttaaactttcctttctgtggagctatttgtgggaaagagttttcatttggtgatctctcctagtcactggttgctaatcagtgatgcaagattctatgctacaccaaatgcaaaggaacatattcatggtatttgcatttaaaaatgtcatcatataatatagtgacatgctgtaccatttgttcataattcattaccagtggatacaaacatttcaatttaagggtctgtctgtgcctcattatattacgttgaagcaagaatattcgctatagtttagacctctgaaataactaagcaccatggaatgacacaagaacaggatatcattcttaattttaaatagtttcctttgttcagcttatgtgatggttgacctttatttaagtccattgtgtttcattgtactgtgcttactgagctctcatcattgagaaccactgaatagtttcttgagcttaaagatgaatgttacactgttgtgatactatgtcagtggtgacattctggattcagtttttatagttgtgtcatgggtttttgtttcctacactttttcatgtaaatcaatacaccaaaatatgtaatttttcaaaggcaaccattaatactacttaagttagtaaatctagaagtatttaaatgtatagaacactaaattttttaaaggaaagaattctccataaggtcttttaattgctgtatgttattcattgtgtattctaatgcacatgccgttgatctgtgcatatggacttgtgcacgtaggcaaatggtaatagtagaagattgcttcagtcatctgatttctccactaaatcaagatacttggataccagctcagaaatccaatccaaagtcctcacctctaatgcccttcattgccatttaaaatctgaaccaaacacaggccacttcttttgagtttatcttctttaaaatgcagccctctaagagttggaaacagactatcatggctccttgattttgtaatcctatgaat

SEQ ID NO: 138247 - DNA, 1015 bp, Homo sapiens
actaagtttgaccagtcatcttacaagctgattttcctgttaaatgaagccttcctagtgaaggcattgcacaaccttaacaaggagagctcatgtccatggaaggaagtttataaagtagcagttgatactaaaataaagctctgtgataattttagagaatctaaggattatttatatacatttaacgactttttagtgagtacttgtgcagcaagttggccacatttattgagcctttaccctctgtggaaccttgtgctagatgctttgtggggataaagagaagtaaaacatacatctccagtccttgaggagcttatgagctagatgccagatatagaacattgtaatgctaaagcaagagacagggagaagtgtgtgtggggacaggcaaatggattttatataatagcacacatgaaaaataaattatgttgctcataaacactggctaactaaccacaagacaagaaagcgcatactctgttagatgatatctatactgtaaagctgctccacttctttggaaaggaaggaaaaaacaattccagccccatttccaagatgtacttttcttctcttccccaaacaatgtcttcagttttgcttttcctgccttccgtcatggggacaagcacaaagccttgccattcattattttcttatcttttagtcttttttgaattttaaatctgaattatcagaatgctctcttcccttttatgctacaataaaagtatctttaaaactgcttctcaagttcctaacatctttctacatatagttaaatattagtattttaaattttttggataaaatcaatacctgttcaaaaacaatagtataatggtactacttataactattgtatgtctgtacccctcccaattcactaattagtcacaaaagtcaaataatttccttttgccagaggatatcatgagattgtctagataaataagaatgaagaaacttgttatttaatgttcagtatgagggatcactccaggat

SEQ ID NO: 138248 - DNA, 1045 bp, Homo sapiens
aggttatttagatacaagaacttttatggcaagcactgaaacccgatgtctgcaacttacaatttcagaatctgattcaaactttctgagtaaatatctaagcaacaatgcagatttgcttgagcaggagttggaaggcatgaataatctgctaggttatctagtccatcactctgatgatacgtagtagacaagacatactatagcagcatttaagtattttttcaatacagttttaggtgaaggatgaaggacagtttagaacactgaagagcaatgtatctggaatcttcacagcatggagcatactgtttgtctcatctacttttggataggtagctgataggttatgataccaatcagtcttatttttatgtgaattaatcaagaacacttagagcaattctgtccttcagatgccacaaattgctagataatttctctcttattttaaattgacactaagcattgaaaacacgttgacacttcaactttttatatgtaaaagcagttgtgagaggacctaggcaagctgtagacaattgccaagcatcttctcccctggaaatttatttgaaagtagcctagtgtctccctagtggcatgcatcagaatcacctagaggtgatatcagaagttttcccctagtatattcaaactcaaattgctggaccaaaccctcagagtttctgatttagttgatttggggttgggcccccaaatttgcatttctaacaagttcccaggtgatactgatattgctggtccagggaccagggattgagaaccaataaagtagcaaatgctcatgaattcttgatttttcattcttatttcttccgttgcctgatcccttcaagcctaattatgctgaacttattcgggacaataattagaataatttttgtcactaacctcaccattttccagctgccagctctgctacctcctgtattatctggttattatccacagtcaatatttggaataaattattcgttcacattacctcttttttctgactacccattccttttaattttga

SEQ ID NO: 138249 - DNA, 1049 bp, Homo sapiens
taaaatttcctgaagaactggaacacgtagaaagtgcaagcaaaggtaattgatttataactactttgagattatctcttgcctatatggtttaaatggaacaattaaagaatctgtaaacattattcataaaagtattttttgtttgtttactgataaaagaaaagcaggaaaatagtttccattagcttatatttgacagcatactacattttaataacctattttgtcttacatcattttttttaccactgctacgttattaaagctttcatttctctgatcagataatatgtttgtactttcatttgataaacatttaagtggatattgtttgcaaaggaaccatactatagggctcttggttatatgacaatgattgtgagagtttttgattgagtgtggttaaaatatagtaaatgagaaaaatgtgtgtatatatacatacacacaaatgtgttataaaataaggatgcatgtgagaaatgctgcaggaaaagataatgtcctatagttgagatgaggaggaaagtactcttgaatgggtgggtaagagaaggcttcatggaagaggtcaaaggtgaaatatgaggttagggttttacagacatggaaaagaggtttgctttccagagagaaaacaacatgagcaaggcaaagtggcagaatgttttaggacaagtgaagggaatggttgactctgaggctggagcagtaaggtaggtatctctgagacttcagtgtcaggctaaggagtctagtcttgatgtggtaagcagtacagcatcattgaagggatagaatagacaagccatggctcctgtgaggaacaggatgtttgaaacaaaaatgtctctgagattttaattcagggtaattagctttgtcagtaagtattatctacttttgcaagaggttgaaaagtgaaagaaaagaagattaaggaaacatttgctgaaggtgagattatgtgcgagaagaagtgcattttccctcttagataagagaagtacaccataaatcttatacttgaaattacgctgaagtaa

SEQ ID NO: 138250 - DNA, 1181 bp, Homo sapiens
ttacgcacattctgcctgcttgcatccctctttcatttcctcctagttctcatttcagtatacccagacatatagtctcctgagccatttttattcctttataataatcctgtctctgtgtacgatttcatgctgcatcctctggctggaaatttcacctgccctgtactctaagacaactgactgtcatttgccaaatctctgttcagaatctatttcctttttcttcttccttttttttttttttttttttttttttactaaagccttaggagaaaatactttttgtattagtctgcaggaagaaacaaagcattgtaaaaggtcaagccaattacctcttatttatatttaaatacttttccttggtatttgagtctaacttgtcttgtttacttaatgtacatttcagccctgtttgaatcacactttatcacattcaggactgtgtataacatagcaaaaaacaaaaataggtcaacactatataattcattttatttgatgatggactatctctttgtaaaatgatcccgttctcttcaaaaacaaaaacaaaagattgtctttttttttttaaactggagtgatatagataagaaaaaactaattcagttaatgaattatatagctaatattgaaagaacaacttgattactaccaatatcttttttcatatttttgtgttattagaacgcacatacctactttgatagagtaagatcttttctgtgtggtatagcaaataccaaatttattttagttcagtactaaaattccaggcatcaacattactggcaaaggggaaaaaaatcaccttgaagtgaaaggcaaacaaaaagaaagaagtatgtgggttccatggaaaaaatcatcataattacatttattccttgtaaagctaagctgctaaaattgtgtgcttcttggaaaatgcaaaactatggtataaacttggcatatttttctagacctctgtagctcaaagatagtggggaaaaacacatcatttttacattaaaacagatatgtattatggagtagaattcaaaatccacattaattttaaaaataaaacagatgacttcaaagaaatttcccacttgtagcagatccctacaggattattttcagtcttctcttccattaggggtactttggtgggaaaagtttatgaagca

SEQ ID NO: 138251 - DNA, 1053 bp, Homo sapiens
agaaaaaagtaaaataatagcaaagttaaaaagtttggggggaagaagaaagatgaaacaattccagaaactccacagctggttgaagctttagagattatctagtccctgctaaaagggacccaagatgacatttcatccaaacttattttatagttgaagaaactgagatgcagaatgataaaggacttgcccacgatcacatagctgggcagtagagtccatgtacatttggagaccttgtttagagttattacatatatttcatccacatttttacctcctttgtggtcgaaaatatgcaacaaagactcatgctcacatactggaaaacatatagaaagtagatgctgaccaaataaaaaacttactggaagtataaatgctactttctctgtagttgtccataatctttctagctccattttgacagaattaaccattcctttctctgtgtcacagcagccctttagcgttattggtaatagagcacataccacatttgcactttttatttaattatttgcttctatctgtacctcctcttgagtttcttagtaacaaagactgtattctttttgtccttacaatctcggtgctatcatagcacctcagtcggaggggctcaatctatggccataccaacctgaatgcacctgatattggaagctaaacagggtcctgcctggtcagttcttggaagggaggtagaagtgcttaataaatgcttattaaattaattgcatatcattttagtacagcagtcatatttcaaaataagacattgtgggaagttgacaaatagagagtaacagtctgaaaattactgttcactgtaaatttgagaggagaaacaaggtaaattagaataaggaggacaccggtatttaacaatatttcccagtccacactttgcttcttcaagggaaatggtgaaattggaaacaatttgttaataatggagaggacctaaacttatggacgccaccaaaccacaaaggtttatggtgaacagtaaggaccaagtcataggacctaatgggagtgactgtc

SEQ ID NO: 138252 - DNA, 1049 bp, Homo sapiens
tatctctcttcttccttttcaaatattatactcactagatcattaataagtaagataaaatgttctttacactttcacatagcctctgaatttttcccatttaaaatgcactgcttgaaaaatcaaggggaaaacaaaggtttaaattttctttacattttagataatgaaaagagggctcaaatgaagagtttaacagaggcacctgatgggactctttttattgcatataaatagaactattcgtgctgctatttaacaatcaaaatctaaatacttcagactgaagatcaagtcccctactttcaaactatctcccaaaacttcccattaaggactgtatactctaggtgaactgaattaccttccgttcactatgcccagaatacagttttctagaaactctctgtctctgtgatattcacgtcatgtaggtttcctatgtccacgactttgaaattctaaatctaatccataatttaaggttcagttaagttgccaccctcttcaaataggcttcctggaataccacaactaaaagtaaaatctctgccattgaactttattttcatataccaagattctactacagtgctaaaacataattatgactatgggctagtcacaggggcttatgcctataatcccagccctttgggaggccaaggtgggcggatcatttgagttcaagagtttgagaccagcctgggcaacacgacaaaaccccatcttgacaaaaaattagccagctgtggtggcgtgggccggtagtcccagctacttgggaactcagaaggttgagatgggaggattgcttgagcccaggaggcagaggttacagtgagctgaaatggtaccactgccctgtagcctagatgacacagagagacccagtctcaaaataataataataatatttatgattatgtttaattttgatttgttctgttgcactcttatgatgcatgacatatataacaaacaattcctaaatatgagtgttcctcatgaaaatcactagcatatgtggatgcatacttatatgtatt

SEQ ID NO: 138253 - DNA, 1034 bp, Homo sapiens
ctgcagtgagtcatgattgctactgcactccagcctgagtgacagaatgagaccctatctcaaaaaaaaaaaacagtgaaaaaaggagttaaatagaatagtatctaatggtatctaaagtagcagttaagcagtagagtaacagttgcatttattaaggatttagtatataataatttttattatataaaattattatataataaaaatatataataattatattatataattataatatataaaattgttatataataaaatatataataattgcatatgcgcatgataatttttatatgcactcatctcctctgtacttcacataaatcctgataggtaaggtactattattattcttactttacaaatgaagaagctggaacttggggaaattatgtaacttgcctaagttctcatatatagtcaaagacccccaagccttttaaccactttactatgctgaaaaaagtcagaagacgtagcaagaatgtaaagttttgaaattaagtcttaggacacagaaattatgttagaaattatacttgggtttcaggattacattctcgtgtgttggcaaggaggacgctactagctgagtaagaaatgatgtgtgtgctttatgactttattatgtgaaagggtactaaccatagtagagggttacattaatgtatctttagttgttgtagatattaatgggagaaaaggatttataagagctttcataaaacaatttgattcctttatgcctctaaagctgttttcccaggaaacattaaaattgtaaataatgatttatcctactgtggggttcttcggaaacttaactcttggggttagatttctactggtgtgtgtgtgtttaaaagagctattaataaaactgcatatacattattccattgtggtgttttaattatttttgattgatcctgctttctaagctccaaattagaacaacccctttaaacatttattaggaagaaatatctgaaccagtctgacctgacatttgtagacatcatcttagg

SEQ ID NO: 138254 - DNA, 1518 bp, Homo sapiens
tgtgcatactgcattatgaacctatttccaatagattaggaaaatagttacaacaggtttgaggcttctgttttgcaaaaaccttttatagcgttatggtctcagaaggaaccattgaagaaaataatcattaacattttctcgaacactaaatcctccgttctgctcctccaatatctcataggctgtcatctgatatcagcacttatgtaatgtcacgataggtggtgccatagttctatactgccttacattataggaaaatataaagtgttatttgaccaattgaataaaaagaagaaaaaatgtaaaaagttttctgaaccctggttttaagaaatttatgaacaactaaaaatttctcaaaggactgcatttttccattctctgttagtaaaatatctcagctgccttttgattctgctagctgcgagaatggcagaatggggcctgaatggcaaactatattatttgtaacattaatgccagcctgtttggagattaattactatctttgtattaaagtactggttgtgttggaattgctgcctttttaaacttccccccaacccttggtcatttctactgatgatttgcagtaaaatagctgacaactgcctatgattagtttagccagatgctacttgctctggtaaattcattttaagcatttgacaagactgcaaagattagtgccagctgagcttaaaatatttttacagacgaatgatacgtgaaaagtcagttacttttcaggtatatgatgactatgtaaattaactgacaacatatcttctttggtgtttatttgtgaatcatttatctactttatagaacaattggtagagttatccttcacaggtatattcagaagatgtcaccaaatggagtgctttcaagtttttgtatgttattatgttgtcctatgaattgcctgtgctccaagacttatagaattgcagggtaaagttgggaatctctggattagagaatgaaaataaaagtgagaagtcttttctttagctacttctaccattcaacatcaagaaagaggctcttactctcaaaacattgttcttaggaatggccatcaaataaatgccttagttacagataacattgaacaatgatgagtagtttattggtttttcacctttcttcattctttgccctcttttattattatatctttactctttctcttatgccctttttaaaaagcatgtattatactatagaaatgtttcctattagtgattaatgtgataaatttgattagttgaataaaagcaaactttgattctagattttatctatttcttggtatccggcactgtcaaatacagttgtccctcagtatccatgaaggattggtgtttttttgtttgttttgttttgttttgttttgttttgttttgttttttgagacggagtcttgctttgtcgcccaggctggagtgcagtggcgagatctcggctccctgcaagctccgcctcctgggttcacgccattgtcct

SEQ ID NO: 138255 - DNA, 1472 bp, Homo sapiens
ctcaagttctttatttaaaatggtatagtatttgcatataacctatgcacatcctcccatatactttaaatcatctctaaaccacttataatacctaatacaatgtcaatactatgtaaagagttgttgtactttattgtttagggaataatgacaagaaaaatagcctgtacatgttcagtacagacacaaccatccaatttttttcccaatatttttgattcgtggttggttgaatttatagatgtagaacccatggatatggagggtggagggcctactgtatagttatctctataggttttgggtagtttcctgtccttcacccagctgagtgtgaccttgtctattagaatcatatatactgttctggaataagcttgagatgttatcttttctaatctcattttaccaatgaggaaactgaggtcctacaatttcaataattagtcaaatagcacatggcaaaaaaagtggtttatataggattggaccctagttttcttcaccttccagtgttctgtccactttttggacttcgtacatttgaatttctttatactttgctgatttcactcaccaaacttactgacttacctgacttctgaattatactcagaacaaaacacctgtatgaaagtcttcagtggcaccccattttcttttccagttttccttcccttctttcatctctccctcccataaggtcttcctttttccttcattactgcattttttaattcatgtagaatctacaattttcacttgtagttttatttcaaaatttgttaattttttctacgtctcttttttgttatagctctgaaaagcctacttaaaaaaaaaaaaaaaaacaaaaaccctgctaattggcttttcttcctggtctattgaataaagcactagatagggaataagaaaaccttgatgcattttcttaccttgaccagtgacatgcacactctgtgctctagttttctattaatatcaataaagcggtatttatctgtactgcagagttatcaacctgatttaattaaaaaatctagatatgggccaggcacggtggtttgcccctgtaatcccagcactttgggagaccaaggagagcggatcacttgatcccaggagttcaagatgagcctgggcaacatgacaaaacagtgtttctacaaaaatacaaaaaaagttagccagttgtggtggtgtgtgcctttaatctctataatcccagctgctggggatggggggccttggggggaatgctgatgcaggaggatctcttgagccctggaggtcaaggctgcagtgagctgtgatcacaccactgcgctccagcctggctgatagaacaagaccctgtctccaaaaaaatctagatacatttggggctttctcagagaatggtgcacagaaaatagaaaacggtattagcgttttaagatatggaaaaaaagataattgttttgata

SEQ ID NO: 138256 - DNA, 1020 bp, Homo sapiens
atttaaatatagaaataagagttatcagagaagctgggtggggtatttatgccgaagcagtgtttagaaaacttatggaagagaaaatttcaggaaagaaagggttaatcagcaatctaagtttttaaaaacttttgcgaatttgtttttattggggtataagacatgggttggaaaatgtcagtttggggtatgcacttgtctccaggaaatatctatcctcatcttcccgggatgatttttggaactttttctctttaatggagctgctcttgctgccagcacaagttcactgctggctggctcctccttggaagataattttctcctttgttttggagacacttaacaagtggattaaggatttaaaagtaggttatttgatttgttggcctaggttatattgctgatgctgcaagaataattttaataaagtggaaaggacaaagttcatattgtaaggggttaagtagttcctaggtgataattaaatgtagtcaaatttgtatagattgcagtcttttcaaaagtttaacattgcttatttttgtcttcataatattaaaccaggtctatctaaaattttaatatcacatgcaagaagcattatcattttgtagcagatttttaaagctgttatttcagattttgaactgatcagcatgagacagattttctttagaaccatttttgttctggacaaaattcaagctggatattactgattactctgaaatgcaaatagtgctattttgttttacagctatcatttaaaaagccatgtactcattaagataaatatgtgcagcatgaacaacaaaaaaatgagaaagaaaatggacattatttgtattttgtaggctctctgatatggaactgaatgcactaatcttcaaatactaatgagcagcaaaaagcaatttgccagtgcacaattaacttctgactggcttctgttgatatgtagtgctataaccccacaccaggtgaacttcccattttttgagattttatttgacc

SEQ ID NO: 138257 - DNA, 1130 bp, Homo sapiens
gcaacaagagggaaactctctcaaaaaaaaaaagaaaaaaaaaagaaaaatgtattgcttcttggccttttggctaagatcaagtgtagaaataaaaaattacacatttgttggatttgttccttcagagttcttccttttaaaatctctagtgggatagatactgagaaagcattttgtatcttccctgggaagcaggcttaaggagagtagtctcactcttctctcagctctaggaaagtaggtgtaggctgcaggctgctcaaagtatatctatatttctattaatatttgtattagcatgatatgttaattaccttgctaagtttggaaaataacccttaaaaacctacaatgcattcattagcattctgtttatatgatccaaagtataacacaaacaagatactttttatactttagttcgcttaatttttgatttccataatatcgtcagtttatacttaaatcttagggagacaaggtagaagaaagaaaagtgactggatagcagcatgagctttgctgccctccaaataagtgctgaaaagatgagtatgagtctactctaatcatctcaaaaggaagcagtgaaaaactgaacattagcatgttcatgaacctaatagtaaaatggccacactgaaacaagaatttatcccagacaagactctttgccttaccacaatgaaaaataagtacttttgctgagtgcagtggctcacacctgtaatcccagcactttgggaggccaaggtgggcagatcacgaggtcaggagtttgagactagcctggccaacatagtgaaaccccttctctactaaaaatacaaaaattacctgggcatggtggctcgcacctgtaggtgctcgcagctacttgggaggctgaggcaggagaatcacttgaacccgtgaggcagaggttttggtgagccaagattgtgccactgcactccagcctgggcaagagagtgagactccgtctcaaaaaaaaaaaaaaaaaaaaagaaaagaaaagaaaagtactttttcaaaagtagaagttctctttatctctacccctaatgcccagtaatacccttaacactaatacctgctttttaaatccgtgcatatacctattttgt

SEQ ID NO: 138258 - DNA, 2164 bp, Homo sapiens
tgttatagagtttaagctagaattaagtataaaatcataaacaattaaatgtgattaaatgaaccattttatagcttaacagtatacaggcacatattatttatgtcagcaagagaaagagcccacattattaggaaagcctattttttagatcattcaaaattgtttcctaaactgtataactaccttcctcaaggatggatttacttaatcaacagttctgtaataattggttaaaccatttggttggggagtatggtcccaaccttaccatattctaaaataaattttgtaatgattaaaaaagcaaaagctaataaaatgaatcaataaaggacaacaaaacctaggtggctattgtttagtcttaggatagggctgggcttactgagcatgaaagtttaggagaaaacctcatgtaaattttgatagatatgtgtcacttgatcaattccgtaatttaaaaaaagttataaacaaaattaaaaagtaaatgatatcttctaggagatagctgaaatatatataacatcaaaatatattgtataatcatacatttggggcatcataatgaatttttaattaaatattaaagtgtaacttcagcattgtcccttgaagtataattggaaattgccattgactagtctcactggtaaaatgagaaatgattaaaagtggatagattaggccaggcgcagtggctcatgcctgtaatcccagcactttgggaggctgaagcgggtagatcacttgaggtcaggagttcaagaccagcctggccaacatggtgaaaccccgtctctactaaaaatacaaaaattagctgggcatggtagtgcacacctgtaatctcagctactcaggaggctgagacaggagaatcgcttgaacctggggggtggaggttgcagtgagctgagatctcgccactgcactccagcctgggcgatagagcaagactccgtctcaaaaaaaaaaaaaaaaaaagtggatagattgctaataaatggaaagtaatacaaaaagtctaagcccgcactggcctaccatgttacaaatttttaatgttgaaatattctgttcgacatattaaaaaaataaaagggaagcaaataacattatgttgttaaaaaaaaaaaaagaagagtaagcatccatggggcagtagtaaacgtgattgttcatagagcagaaaagcttatcagtagctgggtagttaacttagaagcaaataaataaaaatgtgtgtgtaaagagaacacaagttaattatttgacatgatgccattgtttttcaaaataaaagcattctttgcaagatttaattgcaataaatgactaaaatcataactgtattttcaaatatgagaaaaatatgaaagaatatgacaatgatatcttcagaagctactaattattggaaacacatggggacaattacacaggctagcaaagctcggtagcttatcactggatccagaactcagaatcagagttgtagtgatacacatacacacacacatacatacacacacacacacacacacacacatgcacatacgtgtgtatagttttgttgtattgcagtatatagagaaagaacaataaaaagggatttttggtattatatcttacctttgctcattcagttccatgttactgccttcttatctgctctgaagccaagcaggatataacagaagattgtaggcattaggacatcatcagatgctaacagaaatttgttgatagaaaatatggttctagtggtataaaatccacaaaactaataacgggatttgtcatcaaatgttagtaaacacagaaatggtagagataccaggaaagaaataacatgaaatgcttcaattatgagctagtactggaagtttgttaaagaaaaaaagggaaaatgttcactctgacctttaccaacaatttctttctagattgaaatataggaaatgagccaggtatcactgtatagttattttaaacgcaatttctatattgagagtgtatatttgcagctggtacatatctgattttcgtttggaaaatgtaaatgaaaaagggtttttatttcttttttttcggttttttttttttttgagatggagttttgcttttgttgcccaggctggagtgcagtggtgtgatt

SEQ ID NO: 138259 - DNA, 1306 bp, Homo sapiens
atgctattcagtattctaaagcaagccagttatgtttgcatcacttagacagctttataggactcagaaagagagactgtcagattcatgagagtcagctgaaaactatttgtttctttcaaaagacaaggggaatgaatgattctggtgcatgtctcatgaatgttgagaagctcatcttatggttaaaaagaaaaactcattagacgactctagagagatatataagaaacctaaggattctgttttatttacctaaaacgttcctggtcaaatcagtgaggtatactaacaacaacaacaaaatacacacacacacacacacacacacacacacacacacacatatgtgtatatacatatatatatacacgcatatgtgtgtatatatatattaatataaggaccatcagattttaatataccctttaagctaaacttgtccattgttacacgtggtcacagaagtttttctatgaaaacttacgaagtggatgaaactaggacttatttaatttgaatatgcatattatacatatataggcacaaatgtattttaatttgtacttaatgtatttgcaattataataaataaaagttcattcctatgtaaaatattatgaatttacagaattaccaacaatgccttaagtatattatttcttctgatcttttattccattaaaattataacatctttaagctaatgatccatgccagctactgcattttttatcagttagcacagtgctgactatagacaagtaagtacctgatgggtttaatcacatatattgaacttcaactacatagtttaagtagtgtggtcttctgttatcgtaaagtcacagtgattttccagcacattcatttgatattttcatccctgtcagctcacaaatcccctcatactttgacagcattatactttgttaagaaaggaaagcaggagatatcctttatatttcaaatatattaggttgacatgtgagccatggccaaacttgattaaaggtgaggggaagtgaatgtagaaagaagaattcacaagcagagaagtaagtgctttgggagggtggggtcagggcaggcagtggatgggaggaaaagcacctagccataagctaaggcatgtttcagaggaaggcagtgctgagtttttctcttaccctattttttataatctccccttataatagttagccaccctcaatctaagtaatcttcccataaggtggtttttttgaggattatattaacatatgtatatgtgtgtgtgtgtgtgtacgtgtgtgtatctgaacat

SEQ ID NO: 138260 - DNA, 1546 bp, Homo sapiens
catctatttatcaggaaatcacttcttaattagtatagcttttagtatatcttttggacatgtcacctttattttcatttctgttataggaaaatgtcttgagttaagtacatacccgaagctagaaatgtctccatttaaaaaatgtattctctattttgttttatccagcattgtattttccctggctttgttcattctgctgtttcacaaacactgtgtgtttttatgtggttataacaatgatgagacattgacttatggaattaacatagacacatggaaaatattttatggtactgacataaaaagaaaccagttctgggccatgattgagaccgggagctactgaggttcaacagtttctattccacagagtgccattttgtcccaaatgattgatgacattctcttgccctattctccacagattataagaacactgttgcaatctagagcttctgtagatacccgcttcattaagcatgatcccaaaatgtcatttaatttatttcttagattgaatgtctcattaaactttgatgaggccaggagctactttgggctggacttgttatgaagcactcttatcttaaaattttgttctgtccctgttggcaaaggaaatggacatgacagtgaaatcaatgcacagtgcactttatctttgacaaactgaaatattgttttgctaaaataggcccatggggtagggagattaaaatcacacataaagtagatcagcataaagagtaaatatacaaacttatacagtctttggtgtaattttattttgtttaaactgactttgccccatttggacaaacataacacatctacttgattaaacaaggtactgatctccctcagcctcatttgaaaagaaacattttcttctttttagttataagaagtgaatatatataagatgaagtcagggcatgagtaatgttctatcagtttttagtaagaggtatgtctcaatagttgtgttactcaccttgtggaataggttgtgtcaaaacaagaaaaaaaaaactaatagtatttgtattttccctttggtgtccattgtagaatcaggagcatagtcatagattggtataggcgggaggtggagaaaagcaggtgattccttcagtagaccaaagtgaaaacaacattccttgcaaaaaaggaatttagacattggccagccctaggtcatgctgggcattggagtataattttttgatgcttccttaggtttggaatcaccatcttgcaactgatttttctctcatggctcctgcatcctgccatgttgccacactgcacacttagaacatgagttccacccctgtgtatgcttcccttgattccacaccagaatttgccagctcttctttgatctttcctgagtctttatacagcatattaaagagctgctctgcagtctaactctgaaaatcagtagtgtcatctagcatattttatactgttgcctaagatgtcttgggttcgaaggttctcactttgttaactgccagtttgctacctaatcaaa

SEQ ID NO: 138261 - DNA, 1052 bp, Homo sapiens
taataggtacagtttagataagaaatgcttaacttagtcaaattttagtaatttcagtaatgaaaatgatggagttggtttagtctcctataatcttgcttaagaaaaaaatcccctggtattcagtttatatatagcatgcaatctagatgaataggtttaggttttgtttggtttttaataacaacatgcataaaggaaatataatgatctcatcaaatctgtctccttctgagagacagtagcctactggtctgcctctcaggatccttctaatatagttttcttggatattaggtggttttgtttcattgaatctcagcagtttattgctttagaggctttttactgagttgggtcaacattccacattgaggagatttttctttctaatgcaagaattcaactgttattaacagtggtatgaatcattcatgtacactaagaaggaaataggttccagttgtttcaaaaactgttaatttctagttctaaccatcggtagctttgtgaagtgaatcatatcactgtctgtggaaaagagaaatgggaattaagttatttgctcaccatcagccatgtcattattgaagatgaaagctaaggagataaatcctccactcagttttctgtcatttatccaataggtcttcatatgcccctttagccatgagactgcaaggtggtgtgggaacctccgtactttatattaaagtctgttagagaaataatgggagtttggctacttgtttgtgccattaagacactgctaccctctgctgcctaagttaattacattccagtagtgggaaaaaaatgcatttgcctatatagacaccaatggaaataaacatatcgttcatacacttacagagaatgtacgtgtactgttgagagtgaggaaaaattgtagtttatagctgacatactttaaaatgctttgtttctaaagatgcaagtgcgaaattgatccaatatgttcagcagtcaaatattgagatcaaaattgctctatttcctttattcgtgtgtccgttaacaaccctttctga

SEQ ID NO: 138262 - DNA, 1085 bp, Homo sapiens
aagagaagaagggggtatataggaaagaagaatcagcatgtaacatttgtatgatcctgacagaagaattacgtgatataggtaaaatatacccatccattaagccccttctcaaatgctggcccttcattggcaatactcctagtgggggcaacagtattttcttttgaaatgtcaaacacttttattgtaattctgctgtggcacttatcgattttccgccttgaactatttgtttgcttgccttgtctcaactactgtattagagtctaatttcaggaaggaggaatgtggagagatgtaggacagaaacttctgccatacctaacatagtatttctgtcacatagtaaacacttagtactatgtatggaattgaatttaataatattaattggtttagcatgaaaaaaattatgctatagtgtgagttaaagaagctaagaaggacagaaataaaatagaaggagaaatatatttgatgctggtcttccaagttgcaataaaaagagctgaaattatgcccatcaccattaccttccctgtgccactcttgtgtttatcagtacagagggtcaaggccacatttaaaactatgggactgttgcgtctcacttcaaattcatctggtttccttgggccgaatgggaaagattggtagtttaactcactgtcatacaaactccaacccctacttaattccgttggtcccctgctttggaagctcacctgctgcagtaagaaaggaaaaactgtgcctctgttccccagttttttgtagatacttaacctgccaccctcatgatcacattctaaagctgttctgctggcagtcctcatgttctgctctgaatctgccagcttcatcactcccattacactctcccatgtttcagaaagccactattctgtccatgccctgagggaaggagagtttttttcccatcattttattcttgtccccaaataatcaaatatttcctcacaatttcacataggtattcattcatacattttagaaatttaaaggccgggcgtgttggctcacgcctgtaatcccagaactttgggaggcagaggcaggcg

SEQ ID NO: 138263 - DNA, 1059 bp, Homo sapiens
aatcaattgtgcttattctccaaacctcccttatgtggcagttgtactttttggtgcagttatttactctaattaaatattatgtgaaccaagaaatggtgcttaaaaaaaaaaccttgccatttatgcaaaaatgatgttgactgcttgaaaaatacttgctaaagtcattttaaatttactctctaattaggtgtgcgtaaacaaacttaaatgataggaactcattccaaaagccttctctaattagatttcttcatgaatgtttaaattctagaaacttaattctagaaatcaatctagaaactggtttagagggtacccttcgtgtatgggttatatgcaaggaaggctctgcagatacccaactggagcctaactcacataggatacctcagctctacatcaaaaagggtagcaagtgaatattatttatactttttcatttaagattttaacatgtatatcatgtcttctggatacctactttaactgacctctttgattaattgaccttgcgtgattttctaattatatttattagtcatgcttagtgtattaaaaactttactgctgctcactcatatccactagaaatgttaacttcatgttctgagtccatcatttctctcctttctacaacatagaaatggacctattgggtgtttatatattgaaattttttttctcaacatgacctcaactcccataagctattgtcattttacccaattaatgtatttttaagaaaaaaacctaaataattgaaagcatctgtcttgtttctgttgtaaatattatgttatcaatagtacacagactatctgcaaaagagaatctgatgatgacctgcacataattttgttggcaatcttaattttaacatcagagataaatatggagggcttctggtggtgcctaagcatagtaggtcctatgagaaaaaatattacacagctgctctagaggaacttacatgcttattgaatagataggattaacagataagatgtacttagcaggataagagactcagatccttatggtgcagggcagact

SEQ ID NO: 138264 - DNA, 1463 bp, Homo sapiens
aataacatctctttgaaccttagtttttctttaatcttcaaattagattttaaagaatgaaatgttaggaattccgtcaataaatttaaattgaaatggattcatttgaactaatggctgagtaaaatggtgacattcccatattaaacatgataatttggtatactgtattacacattttcatttatttcatggagagtagaatttttataagcagtaattcagaaaaatgtgagttgacttcatggaactatttcccacatttaaaaaaaaagactttaactgataatgtctccttttagatgttttgtggaacacttggtaaaatattctaaatcctttgcacactgttctttagtttcagctcaaattctcaagagcaaccttgcatcaatggaacaacaaattgttcatctggaacgtgacatcaagaaattcccccaagcagaaaatcaacacgataagtttgtggaaaagatgaccatatcctttatttatttaagcattttgtctagtttttagtctctatgtctgtctgtttactaactgtgtggttagttctagatttactagtcttttcacaccatctggatgaatttgtgtatatgctgtttttctattagtagcataaattttgtttcatgatgttttcaaccagtaggcaagggaacaattagattttttttgaaggctatttctcaaagaagaattccatttgaaagcccacaggatatgcaaggtaagtcttaagaggtttgatgaaacctaaacaaaacaaaacagaatgttcttatataaccaaatgtttaaagtaaattatcaacagaaggtttttttttgtctgagattttgtgtgtgtgtgcatacattttctgagggcatgtgtgcattttcaaggacaataagaggataactaatatcactagacagaaaggactgtgaaggataaatggatacatggttggatggatagacgaattgattagtagattatatatttaaataaattgtagtagatatctgtataacattaagcatttcttgctaaataaacattttttgaaacttctagtttatagcagtatattcatataaatcataaaaatatataaaaggaaaacttgagaaatagcatttagcttgaattgtttaatgttaaatctggtgtctaaagataaactacattagacctgatttttttataattttctattttagttttcaaaagttaaagccatatcctcctcctctgggtttaaataagtatcttgaactgcagattgattcaccattttatatctttagagggaataaatactgtaaattctttatctgataataagtaaattccttcaacaactatttggcagtcaccttgtttcaaggttaaatctattgcctttttcttctgtgatatgctttattttttgcccaacttggaagttacagtgctgaactcgaat

SEQ ID NO: 138265 - DNA, 2051 bp, Homo sapiens
attggcaaaataagtttgtgattgattggaggcagggaatccacaaaaataaccttgggttgcattactggccacgttaggatacctaatgtgaaggtttcactttattgctgattacattttttttttttttcaaatatgttatattgtcctgtgcctggaaacaccacctcctttttcaccttttgattttggttcttgcctcatatatttgaatttaattccttatcccctttttcttttgaacattttcttctactgttggcttatagccacacaacagcttgcaacattgagtctttgttgctcatttagaaaaagaaaagtaatttcaaaccctcatgaacttggcctggactccttattttatttctctctttatgcaggtaattaagcactttaaaatgaaaatccagagccttctgtatctgtatgttacagatgaatggttattcttcatttaagtggcactaaagtgtgactatttgtccacaaggggattgaaaactgtattaaaatgtatggggctgttactttgcatatcatattttttaaagaaacaaaataaaatacacagcaatttatttcagagaaaaaattagaatattgagttgggttggttaaaaactatgaattaatggattataaagataaaactgtggctcaagttattcttcctttgaaagacttcttggtcacccattgagagtttctatcttctagaaagagacgaacgaaatgcgtaatcattatatgtatgtatatgagttctggtgcctacctaatatatatattttttacccttctggcaatgctaaaagagaaagatattttattgtgggatacttgatcctgttttaaaaatagaaccatgagccaggggtggtgactcacgcctgtaatcccagcactttgggaggctgaggcgggcggatcacctgaggtcaggagttcgagaccagcctcaacatggagaaaccccgtctctactaaaaatacaaaattagccaggcatagtggtgcatgcctgtaatctcagctactcgggaggctgaggcaggagaattgcttgaacctgggaggcagaggttgcggtgagccgagatcgcgccattgcactccagcctgggcaacaagagcgaaactccgtctcaaaaaaaaacaaaaaacaacaaaaaataggaccatgattccatttctagtataggatcctttgtactagatgatctttccaatatttccatccagtgccaataaattgttttgcttcaagtcactggccctttaaattgaataattagggtcacaagtattggagtagtttccatggaaagtaactttagctacttaaacagtaatctgtctgtgaggactgagttcacaagctgaaaagcattcgtatgcctctggacttcagaacagcaacaatgctgtagttagcagcaatggcatgatggcttcagggcaactgaatatgcaggttggatcttcaagtcaggctatgtcctggagcaccctatatttacccttactctttcccaattttgattgaacacttaaagtatgctagacattgccaggcatgaaaattgaacagtacacaagatgatagaaaacttgacctcaggctgctgacagtctgacatttgtatgttctctgtcttgctgttcccatggcagagattatgtatggtttgttaattactatatgcctaccacctagcacagtgtaggcactcagtaaatatgtgttgaatcacacggtattatagctagagacagtgaagatcatctagtccaagcccctgcctttacttagcacttcaaaacgatactgtcagtgttaggctgtgcttatatttataaaaattttcttcatatatctctcacaaatgtatcattgaatcacctttatagagcatgctgtaatgtataatcagttttaagagagaggatccacagcttttaaagtaaacatcagaaaaaacatagacaaaaaacaaaaacaaaaacaaaaaaacctctcctttgaatggagtttccaaggctat

SEQ ID NO: 138266 - DNA, 1031 bp, Homo sapiens
ggtttgcctgtactctgttcatgtacatgtacatatctattttgcatactggtttatgtactcttttcagatacagattctgattcatattttgagtacttcacaacaagcctgtaacaatgctttatagaaagtcaagtgcttaataaatgtttatttaaataggttagagtttattatataattaatataaaacttaacattatggccagtaaacagaacattagcttgtttttctggcatagcctcagtttaacagaagaaaggagtctaacatgtttcaaatgttattcttttatcatgtcttgatttaaaatgcagctattgaaaattatgtcttaacagattttaagatagaaatcacattctaagaccctgtctgaatggagcatatttttaagggtccgttagcacaaaaattttctctttgaagagttttgcttgcttgaaattcaccctgaaattacgtacactatgagctacatttttcaaactttgttcagggaattgatagacatttggtgcatgatgctaatggtgagaagagaatatattgctcagttaaaggatacataaaccctttcaggccacaagagactcatctgggaaatcatctttttcagaacataaaacggaacttaatttgtctgaaagagttaatgtaccctcaacctgacaaattctaatcgctctcaccagaagctaagttttaaaagatgtaaaaacctttctgtgggatttattcatattgagtagaaataacacaaaaaagaagcttgaaagaataaattacccaatatgaatgtggttttttgtgtgtgtatgcacataaggaacatgtagcatgtgcacatgtctattcgtagatgtaaagccattttggtatttataagactataaattggatatcataccaatgaatctgtgaatttgttttctttgctttgatttaaaatttggtaaaagttttcaattatgaaacacgtggtatcttaagcatacatagtttacaggtaataatagtgatgtta

SEQ ID NO: 138267 - DNA, 1070 bp, Homo sapiens
gttcttaaaagaacatttctttttctagtatgacagtacagaacatgtgtgtgtatatatgtatatgtctgtgtgtatacttgcatatactatgtctgaaaaatacttttattctgattgaccctttgtacatttctcaaataatatagtttaactacccttgagccagaaactgtgtcagatgctagagatctaatggcgaataagtcatagtacttgtcctaaagattacagtataaataatgtattcttttgatcacaagaaagcttcgtccacaactttgaaggaacaagtactggctattctcctttattattttatgcaaattattatgtttcataaggactcattgccagcatttattttgtttatggactttgaaagtaggagtttcattaactctcagtttggacagtattatctttacatgcagttagtgcagtgactgtcatcatccttattagaataccaccaggacatctggcaagatgtctaatataaagcagctatgttatctatttccaatcaaatgattctttggtgcttcgatgtcctgtaacttctccacttatgtaattctctgccataatctaatttgtaaagtggggtgggagtaaaagaaaatttagaaagaaacacagagcacaaaccctttatcctggtaaagcatctcatgtttcaatttgcagttgttttggtaaagtataaaacaagaaatatgattataaatatagtttttattttttactgtgggtaggatgttttttgactaacacatgcttttaattgcctaatctattttggctttacctttagagaaaaattactgcactttgctgcatctgtcaaaaatgacacgataattctttgagtcaaaacagggtacatgaaatgtgatttttgtttattttctgaagaatagcagaactcattttttgacacatcctttactgtggttaagactccatggcatagaacagactgcttattttgaggttgcaaagtacagctaacctacaagaataagctctctaatatcttctatcaaaccaagaaatgatctgtttca

SEQ ID NO: 138268 - DNA, 1077 bp, Homo sapiens
cacctgtatacatgccttaattaccccacaggattacaaacctgtgggcagaaactgctaatacagccttgtatttcctaccacacctagcacaggttctttggcagagtaaatgagcaataaatatttttgaatgagtgagagaaatgctgtattcattaatgctgtccttcagataattgctctaaatgatgttcacatgtgatcataacaataacaaatacaattttactttgctgtttgaatttcttcaagttttgtgtgccacattaaatagcactagagaagcaaattttcccagaagaaatgtcgtagtaaaatgtttgaaagacagcaaggtaattcaacagccagaaatacagagctttatagtactgatcagtcttcaactctttttgaaaagattcactgttatcaactgagaacctctccaccaccatgtgagcccagtaaaggcattttctaggttaccatcctggggtgctcctttggtaccaattgttctaatattattattatagtggaaaatgcaacaacatcattgaacctgtaccctgacctttcagttggccttggtgtagagcatcacacagtcaaagaatcaagttcagatcagattttaatcccactacattactgtttgctctgctttttgaggagattgcaatgactatatatatatgcacacacacacacacacacacacacacacacacatgcgtacagacatacatatatacacatatatgtatacacactgtattttatatatctatggaaaatatgtatttccattctgtagtctatgaaaacttgtatgaatggggcaaggtacaatacacaataaaataataatgcccatgttaaaaacttttttttttctttaagatggagtttcgctcttgttgcccaggctggagtgcaatggcatgatcttggctcactgcaacctccacctcccgggttcaagcgattctcctgcctcagcctcccaagtagctgggactacaggcatgcaccaccacgcctggctaatttttgtatttttagtagagacggggtttcactatcttggcc

SEQ ID NO: 138269 - DNA, 1088 bp, Homo sapiens
caaccactgacctttttgatgtctccataattttgccttcttcaaaatgtcatacaagttggaattctgtaaaagaagattgccttcttttacttagcaatatgcatttaaggctcttccatgtcattttgaggcttgatggttcattgcttgttattgcttaataatattccgttatctggatgcctagaaacagccatgtatttttgaaaatagctccaagacatgtttctatttggctttgcctctggcacaggttgcagcatatcagtgtagtacaatacactgttataagaatcacagacactgagataaggaagggtctgcaccactggttcttccaacagcatgtgtgtagaaggatgcgagacaggcaggctttcaggcacctgaaggacatgtctgtggtttgcagcttactgcgtgcctttaacaaagcagttcacctctctagactttggtttcttcatcttgcaaacaaagggatgtgctagatgagttctgaagtttctctgaattctgaaatttgatcatctgctctcatctccttgtttaaaagttgagaaaagaaagcctggggaaattaactgatctgaataagaggaaatagcaaattattagcattacttggactagaaatctagtctctagatttggtctagcattttttctatcatttcaacctttatgtcctgatttttcatgtaagaacttatttttcttaagaactcctgattaaactaaattgattttttaaaaaaagaaacatagattgaaagtcactgaaatttttttttgagacttttttttttttttttgagtcttgctctgtcacccacgctggagtgcagtggcgcaatctcggctcactgcaacctccacctcccgagagtggggcgattcttctgcctcagcctcctgagtagctgggattacaggtgcccaccaccatacctggctaatttttgtatttttggtagagacgggatttcaccatgttggccaggctggtcttgaactcttgacttcaagtgatccaccagccttgacctcccaaaacatgaatctttttttttttaatttgagct

SEQ ID NO: 138270 - DNA, 1031 bp, Homo sapiens
taatgattgaatagatctctgtggttccttttcaaggatttcttgaaacatactgaaattcatgggtagatcatttaaggctcctgcgccctttaatatattacctagaaatggtagaatattttagaacacatacaaagaaggaggccgggcgcagtggctcacacctgtaatcccagcactttgggaggccgaggtgggtggatcacgaggtcaggagatcgagaccatcctggctaacatggtgaaatcccgtctctactaaaaatacaaaaaattagccgggcgtggcaacggccgcctgtagtcccagctactcgggaggctgaggcaggagaatcgcttgaacccaggaggcggaggttgcagtgagccaagaccgcaccactgcactccagcctgggcaacaaagtgagactccgtctcaaaaaaaaaaaaaacacatacgcaaaaggttaaggtaaaacacaattcattgtatatacatttgcaacaaagttcattaaagtctggggaaaaattgtataatgtaaagctccttagcttgatgtataatgaaaaaatgtagatattacgttaataataaatagcgtgaataatattggcactgggtatacacttactgaaaaggctgggcttttctaatgttaatcctgaggaagaggagagtctcttgcttaaaagtcaacactggtatgttgctttcaagaaaaaaagaaaaaaaaagcattgatgagggtatgaaatttatttactaagtattcagttgtgaagtttgaggagtggaaaaactaatttgtcaaattataccctcagagttcaacagtaaactagatgaagtctcccaggcttataactagcagaaggcacctatgttttgtctttgtgtgcctatggcttcacagcggcaactgaatctcacccagaagtgctaagttgtaattcccagtagccacttttagtgctttttgttttgcgttgttttgttttgtttgagacggagtttcgcactgtcgcttgggctggagtgc

SEQ ID NO: 138271 - DNA, 1432 bp, Homo sapiens
tcccgagtagctgggattacaggcacctgccaccacgcccagctaattttttgtatttttcatagagatggggttttaccatgttggccaggctggtctcgaacccctgacctcatgattcgcctgccttggcctcccaaagtgctgggattacaggcatgagccaccatgcctggcctttagtgcattttttaaagaatgtatccaaataacagacaattgaattaagaaaagcacattgtcatctttaatcctttccatttatttgcctcttgatagatgacctttatatttttgctttttgacaatttctacctgaggcatgatgtaactaaaatttctaacatgatagtggtagttctctggattaatttatgctcatggttttgctttgtttctcccttaccaaaatgctcttttcagtattacacaagaaaaagatcatgatttgcatcatgatgtacatagcaaatttcatgtatgatcgtgtttcctgttccatcacatttctggcattttttttaacccactgggacattaggatgtcataacataattggatgttagacataggttgagaaatcaagggtagtggtagatggaggctgacagacaccttccagatccactttagaggtactgagtattcctaaaccagttatgtaatttgcatgtggtcatatagctagttggtggccaaatcagggatacaacatgtatgtgagtatcattctatcatctatctatctacttattgacagataagaatatacttgctttgtgtaaatgattaccctttgattttgtggttgtcacaaacacatgaaactattcatggatggacctacctgtctgatgatggtggtagtgatgatgatgatgatgttatcctaggatataaccactattctttaacccttgaaactgaggtgcataaggtacaataattcgcccaagctcacatagataacaagtttgcagggctagaaatcttactgagtttcatctgaaatgcagactttcagagagagagagagaggatgcttagtgtgccatatcttacgtctaacaatggctaatgaatctttaaagagaggactactccctagacatgagcgtgttaggactctgttcccatttctacacatttatgcttatatgagggccattgattggccaattttagcatttctttgtactcgtgggatgatatttaaaatatttaacaactgccaggcacggtggctcacgcctgtaatcccagcactttgggaggccaaggcgggcggaacacctgaggtcgggagtttgagaccagcctgaccaacatggagaaaccctgtctctactaaaaatacaaaattagccagatgtggtggcccatgcctgtaattccagctactcggaaggctgaggcaggagaatcacttga

SEQ ID NO: 138272 - DNA, 1033 bp, Homo sapiens
ggcacatgcctatagtctcagctacttgggaggctgaggcaggagaatcgcttgaacctgggaggcacaggttgcagtgagctgagatcacaccattgcactccagcctgggtgacagcgcgagactctgtctcaaaaaaaaaaaaaaaaacaccgattcactctaagagcactttctcataaccttggaaagccagccaattagaactggttaagctcctcatttgtcctccttgattacctagctccctcatgaacttaacgtgtcatatatttcaggtgccccattttaaattttattgtgagcaacattccttctcttgtaacaactttattttcttagttaactaatgttttaatattgatgaattcttcccgtgtattttctaaactcaccaatttgtttttgtccagggtgttgctgcttctatggttattttgaaggtgctttttgctcaaatgagttatggactctatcaaccaaatacgggatttttgagacagaaatctgacattcagcaagggtacagaaatcttgctctctaaattgatgttaaaacataacatgtccataattaatgtattataacatttgtctataatcttcccaggtgttgaaatggtagtttcatactgcttgcctttcaacatatatggacattgtttaatccattcagaaattcagaaatattcaagataaatcacaaatacaaaacatgctgtaatgccactaatcttttctattagatttgctttaaatggtgtcatgtttatgtcttcatttacattgtccatttaataggcttccccagcagtcctgctctggtaattagctggcttatttatacctcaacaccttgagctgctacatctcatttaacttactgctctttaaagttcttgtatctcagtggttctcaaccctcaatacacattagaatcatctggggaacttttaaaaaatactgatgcctggacaccatcccagatcaattaaatcagaatctgaaagttgtagctctgagaaccatgg

SEQ ID NO: 138273 - DNA, 1081 bp, Homo sapiens
tttttttttttggtttgttttttgacccagggtcttgctctgtcgcccaggctgtagtgcagtggtgtaatttctgctcactgtaacctctgcctcctgggttcaagcgattctcctgcctcagcctcccgagtagctgggactacacgcgtgtgccagcacacctggctaacttttggcatttttagtagagacagctttttgccatgttggccaggccagcctcaagtgagctgtctgccttggcctcccaaagtgctgggattacaggcatgagccaccgcatccagccagcaatccactgcttgacctcatcccttccactcttattttccttcccttggcagtaatttaaatatatatatatatatatatataattagatatcatcacattcatgggttatcaaaacttagtatttctccaccaaccctaaaatgccattggaaaatgcaatagaattctggaagtaagattgtatttgaaaattataaaagagatccatttgctttgctttcattttattgtaatgcaaagagaaacagagcaaggagactatcagcaaagacaaaggagattgaaagagcataagacatttaggaagctaaaggttgtttagcataattgagccttagaatagtttccaagggaacagggcgggcaaagctggagaggtaagcatgatccacattctgagggactttggatctcatttcaaggggtttcatcatgactggttacataacttgtgtggccacaaaaagtatgtagccagtacaatatgaaaatgtggggcccttgttaaaaatcattgagaatttcaagatgtcagcataagagtattaaaccatgcacagggctcttctaaacattggcctgtgtgtgactgcacaggacttatgcccaggaagttggccctgggtttaattatatcctgagggtgatgtgggacctaaaagatttaggcagtgacttgaggtcattgtaaagattgttctgaccttggttggaaaatggattgttggacccagagaacaaggttctacaatggctttaagaaagctagtgtatctgtcttggc

SEQ ID NO: 138274 - DNA, 1006 bp, Homo sapiens
gcgcgatcttggctcactgcaagctccgcctcccgggttcacgcctttctcctaccccagcctcccaagtagctgggactacaggtgtccaccaccacgcccagctaatttttttttgtattttttagtagagacggggtttcaccgtgtcagcctgaatcgtctcgatctactgacctcgtgatccgcccgcctccgcctcccaaagtgctgggattacaggcgtgagccaccgtgcccagcctcttagtccttttcttacctgtgtgagtttatcagtgctacacaaaccaggaagaatgttaatttgctggctgcctcccttgagctgtttaccacgtttttgaggcagaatagaaaaggaaaggaacttaattgagtgtaataaactttaaaaaatctttccaggccaattgagcagtcatttcattacttttaagacaagcagggaatgatctataaagagggaaaataagaggaactagctgtgaggactaaatgaaacaaagacataaagagtacagcatagtataaagcacatggtatcctctaaatagtaataataatggttattggtaaggccttgaactaaattatgcttgaactaaatatacccaaaaacataacaattcagatttaaaaatgatgaattgcccagtgacgtttaccatcaacccctatggataagatgtttcattttagagagtgcttggtagaaaatgctagatggaaaagtcagaggattctttgttacagactacatagcttgaaatttatcttgtaataatgcattaatggaaaaataggaagacctcaatcatagattcaacttttagcactgggtgcaatgtccctcatttttgagatactgcgagattcagatgatttgcccaaggtcataccatttgttagtgaccaaagaagatcttgaacctcagacatctgatataaagttattccagtgttctttttattttaacaacctgacatcaggatggatattata

SEQ ID NO: 138275 - DNA, 1030 bp, Homo sapiens
gcaatctccgctcactgcaaactccgcctcccaggttcatgccattctcctgcctcagcctcccgagtagctgggactacaggcgcccaccaccaagcccggctaattttttgtatttttagtagagacggggtttcaccatgttagccaggatggtctctagttcctgacctcatgatccgcccgcctcggcctcccaaagtgctgggattacaggcgtgagccaccgcgcccggccatgtatgtgtcttaaatggctatttgccagatctttaaagttgccttccaattttggctgagaatcatcttagaaactgttttgatttcaggcatatatatacaaatgacatgctagtttatacctttaaaagtatatttgcatgtagcataatttggaaggacgtatttttattaaagtatttggattaataaatgttaatgtcaaatctaaaagcccacagcaatggagttgaaaatttaattttaactaaattttaatgtattcatcaaatatgtgttccacagtatttaatgaagatatattgtttataattcacactttgcagacccctttgaagacaataaaggcatacttttaggacagaaaatattctacatagtttgtgaattggagccaatgttctcttgagtttattcttcttatttttaatgcaatttaaaaaatgtatttagggcacatttctgtaagtttaagcatatgattctttatgggagagtagaaaaagaaatcaaatatattttgcgaggtggaagaaaagctgaacataggatatagaaggggcaatgccaaaaggaaaggaaatgaggatggggaagggccatatttttaattacttccaaagggcactggtgtatgttttataaccattcatctctgtttttatgaagcactaactccctgaagcacaaaaattacatgtgtgtgcctgaaggcatacacaaagaaaacaccagaaaccatagctgactcttagtcactggtttaatatgtacagttttggagaggtct

SEQ ID NO: 138276 - DNA, 1678 bp, Homo sapiens
cagttaatatgtgtttggatgtgtgttttatgcaaaataactaacagtctaacattttggcacattttgctcttatgtcttgacaatgtctgggcatttgtagataaaagagatatatttttgttttacatgtaagtgagtgaaaatcactttcccccacccacctctctaaaatgagaaaacactgagaggctaaaaggaaagagcccacatttaaaaaagaaacaaacattaaatcttatttcagagtgattcaaatattgatatccagtagaagcatatatgaacaattagagtgtcttggtttttatttttttgaaacttcactaaactggacactggtgtatataacctgttctatcagttgttggagattttctctacgtctgaaagtctttagaccagccaatgactactttcaatattctgagggagtaacatgtcctccaaggcaccaggacattacaaaagggagagcacatgtgagggaacgagccgggttctccacttatggttggctcaatcatagaacttttctcttgtagttaatacctctaattccattgctgttttcatagtaactctgtgtaacacttagaagcctttgctcgacattgtcacaaagtagctctaaaatgtggatctcatagtctatctgggcacatctattggcattttttctgccctccctgcattcttagacacacacacacacacacacacacacacacacacacacacacacaccccacatgctttctctgggctctaatcaaagcctttgtataatgaattgcctaggggagaaggagaaagtcactgacccctctctcctgaacttgcacagagccatatgactactcaaacatagaaataaaaatttagatttggtgtttgtgtgtgtgtgtgtgtgtgtgtgtgtatgtgtgtgtatgtgtgtgtagagttagtgacctaaatagaagtttgcctatttcttcctttattgtggtaaaaacacataatgtgaaatctaccctcttaataaatttttgaatgtacagtacattgttaataataagcacaatgttgtaccacagatctctagaaaattttcatcttgcataactgaaactctacacctactcaatagcaactccccatttccctcacccctcagcccctggtagccacctactctctgtttctatgagtttgactactttagatacttcatataagtggaatcatacagtatttgtcctgtgactgacttatttcatggatcataatgtcctcaaggctcatccatgtcgtaacatatgacaagatgtgtttctttctttcttttttttttttttgagacagagtcttgctctgtcacccaggctggagtgcagtggtgcaatcttggctcactgcaacatctgcctcccaggttcaagtgattttcctgcctcaacctcccaagtagctgggattacaggcgcccgccaccacgcccagctaactttcgtatttttagtagagatggggtctcaccatgttggtcaggatggtcttgaactcctaacctcaggtgatctacccacctcagcctcccaaagtgctgggattacaagtgtgagccactgcacccagccttttgatgtctttgtttttaaagactgaataatattccattatatgtataaaccac

SEQ ID NO: 138277 - DNA, 1050 bp, Homo sapiens
attctatcgaccacaatgcttagcatgataccaccccagtatcttgtatttagtggcttaaaaaacaaaataaaaatttcccacatgaagccaggtgtggtggcatacatctgtagtcccagctacttgaaaggctaagacgggaggatggcttgagcctgggagttcgaggctgcagtgagctatgattgtgccactgcactccagcctgagtaacagagcaagatcctgtctctaaaaaataatatagataatttaaaataaataataagtttttaaaattcccacattaaatacagggatgatatggagtgatgttgtccacttcttttcttacctgcagtcccatataggatttggtgacatggttgcaattgtgaaaaatttcagtgctgactcgccagccatctatcccttttacaaagtaatctctttgaagataagtgaaggatttagagattgggctgctttccatttgttattttcaagataaaccattctcagaatttttcaggtttcctcacttgggtacgagacaatttctgaaatcagtttttgttctataagaacaaatttatgaaattcggtatcactacatggacatgttttagctggtgaaaaattgtgttatgataaatggggaacatacaaattttcccttttttgttatctttggctttttctctgtgttatacagatgttgagctttctgcaatatgcaaacagtttagtaatttgcattgcaaatagattacaagtaagtgacctttgcaaagtgcttctgcctagcgagtccctggaatgaatctgttttatttagggaagagaggctagaaaacagaaatgtcactttcattctttgctaaaaaatgaagagtcttctttctgctatgcttaaatatgatgataaacattttcttaaaaaccaatatatatatgatgacagtctcaaaggtaaaaatcagaatgtttttatatgaagcattacgtgtacccttccattgctaaaaaggaaagtagagtctgtcagaaatgtgtttgttttttcgg

SEQ ID NO: 138278 - DNA, 1007 bp, Homo sapiens
aatgagctgattagggtgggccctaatccaatatgtctagtgtaagaagaagcgattaggatacagacaggggaacgactatggagagacctcagaagaaactaaacccaccagaccctgatctcagacttctagcctccagaattgtgagaaaatcagtttctgttgtttaagccacctaatctgtggtattttaccatggcagccctaacaaactaatacacaagtatttgtgcattactaatgtatttatagaagtgatgatttaatttaatcttaacatctagtgattgattgcctttaaaaggtactgttgagccatgttccttaacaaaaagctacagctttacaaagactgcccgagaacagtatgaaaaactctccaccatgcacaacaacatgatgaagctctatgagaatcttggagaatacttcatttttgactcaaagacagtgagcatagaagagttctttggtgatctcaacaacttccgaactttgtttttggtaagtaatacatcttaaagcattgcaagacctgttgcttatatttctgaatgttttccttctattgtcattttatgttcctattgactatattgatttcatgtgacatttttttaataagaattgacagatattttatacctgtgacatggataaaaattaagttataagtcatggctggcttaacataatgtggacctaaatgaatcatcttcaatgttaagtatacatgggaaatgttttactgaaattttataggaaatgaatgaattggtacttaaataaccccaatttttatatagcataatattataatttcacgtagcgtaaacattaatatctagaacttttcacataataaattcaaatgctgtgatttataaataagtttctttcacagcctaaatgagaaactgattttgaattggactgtgtaaataacattgaatacctaaagtttctttcacaatgtgggctcttgttttaaactggaactcttg

SEQ ID NO: 138279 - DNA, 1026 bp, Homo sapiens
tggttactttaaaggccagaccatctatggttggctctgaatgggccgcagtcacttagattgaactcttctcccaaattgggaaatgttacttctggaaagtagaagcagtagaacaagataatagcaagttcctaagaggaactgtgtctctcagaacaaagagaaactttggaagcaccatatgaaaattcaaaaaaggctgaaaggccaaagtatgattgtcattatgcctttattgctcccatagctggtgtgacatggagagttataaccactgagttcactcttacgttaattctcagggatgttcttccttctatcttaagtaattgttctttaaaaacctaaacttgtctgagagctccctgtgtagccatgttggcttatggagataattaattttgaaaatctctcatctctcttaagctatcttcccttttacaaggcctcagtcatgtctaaatctaaactataattggaaagtcaatgagtatatctgcatttagttaggcttgaaagactaaattgataatatacagaaaatttgattcatttattaatggtaatttacctttaaagaaatgagggtgaatttttacatgaaaggattgtgtatataatccctgatccaaaatgacttaagttgttttgacacatttttaaaccaagcacttgacattaaaaaaaaaaaaaacttcagtattataaaaatggtaggcttatgtgagaaaccaaatatattgtttaacaaagtagtgtcttaatcagtaatgtaaattctgatatctagaatttcatcatccagaaatttctattagatgcctcataagttggtgcctctttgctttgccagtaaaatggtaatattctgaaaacaaccttaagaagctgcaagaccgtgatgtgcttctttaatgatatagttttttttgtaaactagatgtctccaggtctcttcatttatgaattcagagggggtgtccttagtaacagtaatccaaatatcccagttatctcctcttt

SEQ ID NO: 138280 - DNA, 1126 bp, Homo sapiens
attaatcttctgtcagaaaagatgccgtcacccctgaataaggcagtagaagggaggacttccccggaattgtgcccattgagctcctttggtatgcctgccccctcttcttctcccccctccttccagttgcctaccaacttgttcaagtcatttcctctaagaagccctccctaacttccatttcggtgtagattacccttctctgtgctctcatacctccatcttagcacattttaccctgtaatatgtttatctccataccctcgtgattaatactataattagcctactgtgggtcaaacacagtgctgatctcgaaggatatgtatgaatggcttaatgaattaatagaacaatgagtgaatcaaacaaaaaatcaaaatatttgctctccagagctcacattctagtgggaaaggcagtgaaagaacaaatagtggtaatgaaatataatacatatgtacaaagagcttgtaagcacagagcagtgaggcatttcttctgtctgatttaaggaaagcttcaaagacatagagatatgtgaactgggtctgatcattgttttgctactatatggcctttcatgttttaaggagcactttcctttttgttctcccccacctcatttggtgtttaattttaatggtaaacatacattgtctcctagttttccatgctgagttcaaagtggaaaaacagctattttgttgccagagaagcagttaccagctaattatgatgatctaaaggttatctgccatatgcttagatgagcagtaaccaagcttcagttacttcttatgactgacagttgtcctgagcaataggacaattgatgcagattatctagggcaaaagcaactgcttaaagtctgacttgcctggtgttaatttaggccagtggttctcacccaagagcgattttgcctcccaagggacatttggcaagatctagagacatttttgtttatcacaactaagtaggatctgcaactggcatcaagtggctgaaaccaggaacactgttaaccatcctacaatggacaggagagcctcccacaataaataaatattcagcccaaaatgtcagtaatgttgagattgagaaaccctgtttcaggat

SEQ ID NO: 138281 - DNA, 1010 bp, Homo sapiens
aaatttaagttttaaatttatattttcttgtaaaaaggctagtggatcatgcttatatggatatgtccatccacattcagtgtatagtgccgttggttatgtcttcagttgtgattaaacatgttaattggctcacttcatgatgcccttttacaaacacctggtctttggcaccatgctaacaatcatgactactgtaagccatctgtaaagagatcggtagaatcttgatttctctttttgttttctacataataccctcattaaacttccctgtgtcaaggggccttaaatcagtaattggtgactgtccagttaggctattcacactagtgtttcttaagcactttgctgttgttctctgctgtgcactttgatttaagaaccattacttacctaaactagggtgttcttttttaatcattgcaaattgttaataatataatgatttgtaatctaatcacaaaaattcttaacaaaagcaatgttacgatttaaaatgagagtaagtgtcctatatatgtcctatatatgtgtgtgtgtgtgcgtgtgtgtatttttttcctttgtttctgtcatcctcttcttgaatcaaatttcattgtcatggaatacagtctcctaaactgctttttaaagatctgaaacatggataatcttttttttttttttttttttttttatgatacagagtctcgctctgttgcccaggctgtagtgaagtggcaggtctcggctcactgcaacctccgcctcccaggctcaagcgattctcctgcctcagcctcccaagtagctgggattacaggcacctgccaccacgcctggctaatttttgtatttttagtagagatggggtttcaccatgttggtcaggctggtcttgaactctggacctcgtaatccacccacctcagcctcccaaagtgctgggaatacaggcgtgagccactgcgcccggccatgttataatcttaataatgaggcagctactatttttgctcatatcc

SEQ ID NO: 138282 - DNA, 1367 bp, Homo sapiens
cggtggctcacgcctgtaatcccagcactttgggaggccaaggcgggtgaatcatgaggtcaggagttcgagaccagcctggccaacatggtgaaaccccgtctctattaaaaatacaaaaaaaaaaaaaaaaattaggtgggcatagtgccgggcgcctataatcccagctacttgggaggctgaggcaggagaatcacttgaacccgggaggtggaagttgcagtgagccaagatcgtgcctctggactccagcccaggcgacagagcaagacttcatctctaaaacaaacaaacaaacagatgattatgtaaaatggatgaaatcgcaaatataactgtattaaacaatataacctctacatgggagatatgggttggtgttccccaaaaacttgaaactttattttgaatgttaattatttttagtgttgtgagcaatcctccttcatcaaatgacatctacgagatattatttgtgaaagtatttgctcctttgtttaaaatataagatttgtaaataaaaatttaagatgaagccttttttaggtgacagtctccttctgttgcccaggctggagtacagtgatgcagtcatagctcactgtagcctcagacccctgggctcaagctatccttccacctcagcctcttgagtagctaggactacaggtgcacaccaccatgctcggctaatcttcttcttcttctttttttttttttttttcttttttagagacaggatcgtgctatgttgcccaggctggtcttgaactcctggcctcaagcagtcttcctgcctcagcctcccaaagtgttggaattacaggcatgagccaccatgcctggccagaagcattttttaatacatcctaattatatggttgttatttcatactatattaaaagttttagaatagaatatattcaaatagatagacttgtttcatgtgagcattatttaggcaaaatatgttttaggtaactctttaggtaacagtctttaatgaataggccaaattaattttcaattattactataagtgcttgtgtatgtagatattattgctcaagtttttctgtaagtacctgaaaataattgatttaactctgcttttgaacgcactagcatattttgatgtttattcttttgtataatgtattaggatgcctttagctgcctagtgacataaaacataactaaaattagcttaagaatatggttttactctcttacatcacaagaagtgtagaggtaaggcagttacagggttggttaattcagtagcttagtaatattattaaggacccaggatattccagatatttctgttctgccatccttggcatgttggctcttggttgca

SEQ ID NO: 138283 - DNA, 2012 bp, Homo sapiens
ctttataccaataaataaggcaacttaagcagaagattcatgatgaagccagaaaaactctataaataatggggtagtacccagggaggagggaggtaaaggaaagggcagtagatcattagcacaataaggaaaggatattcccatcagtaagtaagcagtgatatttggccaaatctaggtcatgatcaaggatataatcacaagtgagatgttttacattgtgcaatgtagctggcatactcatctacagatggaatggcttgcttcccagaatgcaatcactactatataacagtgtccttattatttccagtttggaaaagaggattgtaaagcagaatatctctggttccgacctgtatcccattcaaacatgatccacgctattttgttttcagatatttttacagaccaactctctgctgtatcatacccaagatttagggtgtcaaagaaagatatgaaattgtatattcattgtatttttttgtttgttttataaactaatgactcagaaacatatacctatagagccagaatagcctaggatagaaactaaggaattctctatcggtaaaatatctttttttttttttttttgagatggagtttctctcttgttgcccaggctggagtgcaatggcacaatctcggttcactgcaacctctgcctcccaggttcaagtgattctcctgcctcagcctcccaagtagctgggattacaggtgctcgccaccaggcccagctaattttttttgtatttttagtagagatggggttttgccatgttggccaggttggtctcgaactcctgacctcaggtgatccgagtgcctcgcttcggcctcccaaagtgctgggattacaggcgtgagccactgctcctggccctctatcggtaagttatcttaataactcaggctcctggcaagttttgcctaacccttcagcagctaactaatctttcaaatagttttctagagaaagtagtttcataacttgacttgattccattgctttgccatccttaatgtaaacttctttttaattatcagagtttctctttttaaaatttaaattcaggtcctattattttgacgtgggaaactctggaagatatctaataagacttgttctttaaatacatatccacttcatgtctatggatatagttatatcccttaattcaatcttccctgagcttaattatccatcttttgttcatggtttggcatttcccaaacgttcagcacttcttttattcttcatcggacatcaggtttttacatattctttaaacagtggaggatccagatttgtgaggctgtattttgtataatttgggagcagccatttaagaaaaggaatttttttttaaaagaaatcttttttatttttaaattttagcaaaacacatggccaagtgagcacattgccagtgcccctcccatgcaagttagaagtcctaatgcttttgctcattagcttcatggtgaatctgtctctgccctttgagtcgttcatcccataaattaaccacagctcttttaaaaaggccaaactgtcaaaaagtataagcccaagtaagatattggctatcacatatgcatgctggtctggtatttacactaaattaatcagcattgtcttcattaagtaagaaatagttattgcatgcctcttttgtattaggtgctgtaataggcttatagttaagggtgcttatcttaatagaatatcacacctgaagcaaactaaaccaacagagtctaccctttctttttttttttttttttttttttgagacgaagtttcgctcttgttgcccagactggagtgcaatggcacgatcttggctcactgcacaacctccacctcccaggttcaagcgatactcctgccttagcctcccgagcagctgggattacaggcatgcacaaccacgcctggctgatttttgtatttttattagagacaagttttctccatgttggtcaggctggtctcg

SEQ ID NO: 138284 - DNA, 1102 bp, Homo sapiens
ctcctataaggtagtttttttcttaatctcaattttgcagataacagaaaagtacacaataaaggggataaaatacttgctgagtcatatttccttactatgtcttctcatgtgtcaaactagttcatattttaacaatacataaagtatacttattgttaaatctgtaacattgatgtccttaattttctggcaccctagataatggcaattgaagactgagttatttctaaatcttttttcaagaagagatattttacaattaattgtctctctcaaaagtatatatatgcacattcaggctgctgtaataccttcccatctctgcatatttatataaatttaaaactgtgcaatttctccattatataagtaatggaaaggtttttgtttaactttgtttatatgtataggaagcagtgagagaaaattcaaaactgtgcaatgtctctattatataagtaatggaaaggtttccatttaactttgtttatatgtataggaagcagtgagagaaaacaataagagaagagaaatggaagagaagaccaggagggcaaaacttgcaaaagagaaagctgaacaagaaaagttagaacgccagaagaaaaagaaacaactcattgatataaacaaaggtatgaaaatatttccaatttttacaaaaatgcaagaagtacaaaataattgcagttatttatttttggattataaagtaaattttcatagaaaattcacaatagtattagttacttgtgctaaatttctctcatgatgctatgtgtggtttcctatctccctacgctgagcattcaggatttttgataaccaatgcaagatgatattttgttgagatagtgtttttctccctacttttcttgccatagtatattatattctggatgaggcagtggggagggaaaaagtgggtgagatgaaatgtgaaaaacgggtatggggagataagccttagcttttaacttcattttgttggcacatgtctgttggcagtgcagtaacagttaacagtcttccttggaagcttgaacattttaagtcctaagaaatattgacagcactattacaagttgaataaaatagg

SEQ ID NO: 138285 - DNA, 1001 bp, Homo sapiens
ggcgtgagctactgtgcctggcctattttcttttcttttcttttcttttcttttttttgagatggagtcttgctctgttatcaaggctggagtgcagtgatgcaatctcagctcactacaacctctgcctcctgggttcaagtgattctcctgcctcagcctcccaagtagctgggattacaggcatgagccaccacgcccggccttggcctattttcatttctttctctcctttcttccctgattaatttttaaatttttatagggatggtttcatagtctgtatgtattttcatttgctaatatttagttaattaccttttcaaatgtcattgagaccgtaagataaatatccaaataagtttttatgcatatgctcagctgagtgatttgagcatgaaaaataaatttttaaaaattggatttattttttatgttttagtaccatagctctatttacgtatcagtcaaatagtaaactactgttaccttcttgactcatggcccatgtgttacaaatattattattatttattgtaatgttactttatacttggactatatgtgcctttgtacttataaatatgtttcaaaaacagatccttccattgcaagtgtgtagttttaattatgaaaatgaaaagatgcaggaaagaaagagtaagaataatagagttgggtgtctgtcaagatggagctcactgtctgagtttctcagagagtgtcttatgaaagatgctcttatcaactagatggaaggcagttgtgagccttctgagagctgggaggaatcatgatggagacatatcatatgtgaatccatggggcgtgaaagcctatggaagatgtgagtgaagtgtcatcagaaagtgatttatataactttaaatatgtccaattagaacattgtaatcttctcttccaccgaaagagagatgatatagaacatttcattgccattgcgaggtatgtaatatatagtacatagaggtatttcatgc

SEQ ID NO: 138286 - DNA, 1050 bp, Homo sapiens
tttcaagttaaatccataaaaaaataccatgtaccaaggctatattttgagagatttggagatcagaaggcaaatgccatgataagaaacagtttttttaattgtaaaggagaaaatagatatgattaaatattaaagagacaggcattttataaacattaagtggtattactaaaaatttaaattctgtgtgttcagaagtgaagatcagtcttagctctgctacctagctttatgacctagttctgttgccttatctcttcatgcctcagttacctcatgtgtaatataggataatgacattcacctcttatagttttagtgaagattaagtgagataattaagtacagtacaaaacacaggacctagaatatacttgctgctgctgacacgatgaaagagtcatttttatgcttcttgaagaatctagtaaaaactcaagaaatagtctccacccttaagaagttttcatttttgtcagagaaataaaataaaggtgacctagcaaacattaaactgtgtgctgatacataatagagattatttgctctttaactctatctaaaaagggaaatcagtgaggtctggtaaaattacataaagtttcatggagaaggctaaatacagcctctgaacataccagtcaagctagaccctgaaggatgggtaacatttggctgagcagaggtgaaactatccaagtaaaagggaataacatcagcagtagtgcacgtcagcacataaggcagcatgctttatgtaggatatgtgtatagcccacaggaaaatacatcaaaacgattaagagaatgggtcctaagttcaagtcccagcaccacagtttgctagccatataatctctgacaaggtgtttcatctttctgtgcctcaattttttcttctgtaaaaccagagactggtgttatttatactgtagtctgtttattgattatacgttaatggcatttggcctattaccagtccctgatagttaaatgttcagtcagtattttctgttggtgtcgttttagtgaagggtttgatttgga

SEQ ID NO: 138287 - DNA, 1069 bp, Homo sapiens
tattctctatctctaagtatattaactaatctataaaggcttgacattcattaatgcttgctgagggaaaaaatgagttctagagattgtgttttgctcagtactgcataacttactttcacaagctctgcttaagctttgatttctaaatctctccccagtgaaatcatacctcaaagatgtttcattaaaatgacaagataagctccctcgcatccctatgctggagtgggggcaagggacagagttttgggagatcttgcaaaacggttcctaagctttagggaaagaagtgcaaattattgacttcagtgaaaaattgacaacatctccatggtgaagacagtagccaaaagggtgggccaactgtgtgccaagcctccgcttgtcttgatcttgttctcatggttgtgctgatgactcatgggggttggatttgtgtaatgtaggaaccattagaaaatccatgcttttcaagtaatgcattttagaaaaatatttttaaatgcatattttcattgtcataacctgcattgtacaatcttccacttttcgttccctacctcttttctatttggaaatattttctcagagtgttggtagtagttcacatggcttaattatgtctctaaatattagttcaaaccatatgaaattgttgccatttgactgttttttgcctacaaaatgacaatgtaatatggttcaatctaataagaaatatataattcccaaacagaaaggtaatatcctagtattacttaatcactttttgttgtggatgaaactcagattctaccttagttgatcattttctggctgtgagataattttctcacagattgttggcattgaaagagaactcttaaataggaaaaccctctccctgggcatccagggccaccctggaaaacaagccttaatgaagtcacctgatcagtaacctggtctcctgtggatatagttctcctgtttgcattgtacatctttagggaaaaaatgcagtatagttggttaatttatcagtctttatttttgttccagtgaaacaaaatgccctggccattct

SEQ ID NO: 138288 - DNA, 1044 bp, Homo sapiens
tcttggctgtgtttccataaacatagggactaaaatttgaattttgtgaaattgttatgtagcacaaaatattattctttttaaaatgtcaaaatcatccttagcacatgtgctggtaaaaaaccgccagtaggctggatttaatcacaagaaatgtagtttgacttcctctactcaaggcgtctcggggtcctaaagctggttctgtcacttcacaactatgtgaccttgaacaagttaattcacccaaattaccctcagtttctttacctggccaataaaataggttggtgtggaaatttcaatataaatctcttcgaacactgcctgccatatagtcagcattcaataaatggtagatattattaatattcctacctccaaagacatctttgttttatcttttcagagattaaactcagattactttggtacatcattttgaattgagttagatttgttctttttccaaatttgttttttacttacttttcccttcacaagccttccatgctcttagtaagtaaatgattctgataagacacacggagtatttcaaagctctctttgaaatattaattatttaaaatatcgaatgtgagatttttttttccagaggcataaactggtttttctggtaagcgttaacatttaggtttattgggtgcttgtttatttatagaatgtgtaattttcatctctcaatcttctagcatataggtaactgggaaaaaatgaataagcataaacatttttttaaccaccatttgctatcaaactctctcaccttatgcaaagtgtcaaaatgtgcctttggctgaaatgtttcttcactgaaactctaccattagaaataacaagcttctctttaagatatacatacattagggaaagttaactcaccaattcagttcccctaacaaacttttaggtaacacctaccatgtagacattttgggagaaatcacttcatccatccttcatcatttatcagtttggggtataatatccacttatgacccctaatacagtatttattccatg

SEQ ID NO: 138289 - DNA, 1848 bp, Homo sapiens
ctccctttctccagagggtgatgagactggtgtgatggataatcttctagaagccctacaatcaggtgcagcattcagagaccgtcgaaagcggattccaaggaatccaggtaaaacacattccacctcacatagtattgtaaaatatgaatgttcagagcaaagtagcaacaccaaaaaaaaaaaaggaaaaataaaaatacttcctcatgaagactttttttaacagttgatctcagctcatgtgtgaaatctcagcaggcatctacatgattgcaagtttcaacttggtaaatgtatcttcaaataactgtagactttacaacaaaaatcagaaacaaggactcccactgtgtttaatattaaatattttaattgttattttatgagcatgtggtttaggtggaaagtagtttaaaaccataaatgtaattaaatcattaaaagtaattggccctaaggagatcacattagctattcacaggtaaggaaactgagacaatgcttgtttctagagaccgttttggttttgcagtgcagtctgttctctgtgatccatgttaataaagggaggagaggaacagatactccaagatcccctcaaatcccaaagtttttgtttttatatttgattagtaacagttaaagccacactatgaaaatagatctcaggggaagaaaaatcgtaaaagaagtaaaacaacctccctcacccaagtgaactggaaagttgtctactttctctgttcataccctatggtagaagtaaataatgtaatagctcctctaaggataatccaagtaggctgaactgtctacctcctctcagtaaagttttctatttgtagctcatatctttcttgaagtagagaaagaaattaggtatgttgattttaagactcctcttcatgggctgtaaagctatatggagaagtaaatgaaaaatggaaaattaatagtcaatatgtaaactctacttcatttagattaataagatttgccttaaatagcctgcaattccaaaaatattctctatttggactggaagttaccatgtgtcatttaatggaaattagtagctctcaaaaccattgtattgcaacaaacgagtgagagaaatggggcccagaacatagttgtccaggaaagcttttggcagtgatgaccttgatggcagaagacaatatatgttatattcatctttttcacatttgggtgaatcctgatggatattggataacattctgcctctgctatttatggatggtccctgagagattaacctaaagataagatttgattgagaggaaacaagtgttttggttggagtataagactacttttatgtatatgaatgcatcgtagatggcctacaaaaagggtggaagactggacgaaaaaaagaatggaagtctgtatttataagttcatattcattttgaaggtaatgctgcatggcagaatactaggagcactactcatctataactatgaggcagccattccacttatccgcagcctttgtctgtaaatgagaatgttctaccatgccatcaagcccctatcacctcttaaggaaaataaaaaccttcactgctctttcttgaactatcagagcaatagtagtcagtgaaaggtgaactgaaatcatttttgtatcaattcatttctctgttaagcagctgataagtgaaaacatgttattctgggccataaaagaactgccataatttttctaggctgtttattttaaaaatgcacatttgctaaagcccttgtctgattagtctcacacctcatactgattccagaaaaactgtacttggagagagagatcattccatgggg

SEQ ID NO: 138290 - DNA, 1336 bp, Homo sapiens
agcctggacaacatagcaaaaccccatctctacaaaaaaatacaaaaaaaaattagccaagcatggtggcatgtgcctgtagtcccagctactcaggtggctgaggtgagaggattgcttgagcacggtaggcagacgttgcaatgagtagagatcgtgccactgcactccagcctggatgacagagccagaccctgactcaaaaaaagaaaaaaagaaaatattaactggtgtatcacaggccccagatagtcgaaatgtacacaggtgataaataacgactctggttgtactggtgcatactagctgaatattaacccagatcacaagctttgctgatgtcaaaatcagagattaggaaatgagcccctaaatattcatttattgtacatctgctgtgtaaaaggtactatgctgtacatgatgagggaagatgtagaaataattaagataagatttccttagttataagaccctgtgtattataggaacgataaaaagcacagaaagactacagaataaggcagaagataataagtatcatacaagaggtgttaataacatactgtgtgacttcagagaatgggacttgcatgcattatcagatatatcagaaaaataataatggaggaaaagactgaaggatgagtagggattccaacagtgagagctggagttagggatagtgggcattttagtcaaaagaaatgtcattaagaaaaacagaggcaagaaagttcaaagcatttttcaacaatggcaaacagtacagtaagaaaataggatatatatagcatagaagtataggggtaattctggaaaattaggtttgctccatatcagggagtgcttgaatgagagactaaggtgttaacttacaattctctaagcaatggggatttattgaaggcttttaagcagtggaggaacacaagttacgcattagaatatttaaaggagtataagtaatcaattaggagtctattgtcatattcttatttagagataatttagcgtgagaggagtagtcaagaggcaaagataaccctatggctttgagtatgactggctaagaagacatttgggttactaaacttttttttttttttttttgagaaggagtctcactctgtccccaggctgaagtgcagtggtgcgatctccgctcactgcaacctccgcctcccaggttcaagcaattctcatgcctcagcctcctgagtagctgggattacaggcacacgccaccgcacccagctaatttttttttaatttttagtagagacgaggtttcatcatattggccaggatggtctcaatctcctgacctcatgat

SEQ ID NO: 138291 - DNA, 1023 bp, Homo sapiens
aagagtaagacttcgtctcacaaaaaaaaaaaaaaaaaaaaagaaagagagagtgtgaaggtattgattatggagatatggggagaagaaagctattgtggtatcacaggggccaaaggagtagagcttttcaaagagaaagagcttaataacatcaaatatagcagagattacatggacatagagtgtggaataatagacatgggagactcaaatgacatagagtgtggaataatagacatgggagactcaaataggatgtaagggtaggaggggggtgagagatgagaaattacttaatgggtacaatgtacattatttggatggtggttacaataaaagctcagacttcaccactacaggatatatccatgtaacaaaactgcccttgtaccccttaaatttatacaaatttataaacatgtacctgagaggatgactaaaataaggattggaaaggatccactggatttcactaatagaaattcattggtgaccttagccaaaagagtttcaggagaatctgtttggagggaggcgataagaaaggggtagaagtaggctgggcgcagtggctcacgcctataatcctagcactttgggaggctgaggccgacagatcacctgaggtcgggagttcgagaccagcctgaccaacatggagaaaccccgtctctactaaaaatacaaaattagccgggcatggtggtgcatgcctgtaatcccagctactcgggaggctgaggcaggagaatcgcttgaacctctgtctaaaaaaaaaaggagtagaagtcagattgcattgagttctcaagtgctattagagaccacttaatttagtgtctttttttcatcacttcatatgaatcttctgatgaagtgtgtacctgtattggctatgtaatttttgtttgtttccattttctttttatttttaaatgaaaattaaattttacttttggggccaggcgcagtggctcacgcctgtaatcccagcactttcggaggctgaggcaggcggat

SEQ ID NO: 138292 - DNA, 1496 bp, Homo sapiens
tatcttttgcatttgcaaaataccttgaatctaagatagtgcctcacctattccgggaagccttttaaagttatgctcaaagtcaactctcttaaagatatattgatagatgatacaaagtataaaaatactatgcttataactatattctgctgttaaaagattgtgatttatttttagcatctagcacataactcatagcatatgcttttgatacctgcttgttgaatacttcacaattattttaaaaagattgaatctacacaaaagcctgtttaatatattatacctaaagctgtctctgaagtttgaaatttgagggatggaggaaatagaaattgtattctacatcactgtaaatgaaatcccattaaagctgagtttttatgagcaagctcgcatgtcctatgtatgttaccttcacgtgacctttctactcagtaatgtttatgcttgacaagtaaagaaaaatgccgactttatataaaaaacacaatgtaactgtatgccattattcttattcttacattcattgtgtttgcatttgactgctacccctatgtcattctcaactcaaatcatggtttgttccactcccacatggctacttagagggcaaattcctaaatactgccagagaaaataagaatagagtgacaataatacccttttgtttcagctttacatatgttctcgtcagtctttgcaaatactgtgatgctctataagatggggaaatagaagttagtgaatttctttagaatatcagtaagtaaataattgcttttccaactgtcacacttatttgctcagaagaatagatctttctcgtttaagggttttattcagttctacgtaatagtatgtaagactgttataaggatttgatctgtttgtttgagggacttctggaatccaggatggtattttccctttccacttgggaaggttttagcttcagattttaggtttactggtctgttctattgtttgtctagcatagatacagtataccacaagcaatacaatactctctgggcaatgaacaggaattttttttttttaatttcatacattattcacaaatctgcagtggtttcagaaagtcagtgtatatcctggacacaaagaaatgaaaaacaaaaacaagggtatgattttcatatagttctttggaaagttaatgctattgtgcatggatttcatttttatttcagttataatacctgttcgagctttagcagccttatagttattaatcaaaagtgtacatgtttatcttttttcataataaaccgatagattatctccaaatacttggagctaaactatgaaggaatgtttgtatcaggaggggtaagcaatatgattttctgtggataatccagtgtttattttaattatgtttgtgacatcatctcagttgtctatatcagtactaccttatgtggaagagataatgagaaatgacagcgctttgtacataatatttgtgg

SEQ ID NO: 138293 - DNA, 2759 bp, Homo sapiens
agaacattataataagctcagttagtagtcctaaaaacccagaacgtggaagcacccagatgatgcctatccttagtgactgggtataataaattagtgagtaattattagaaattattagaaaataaatttagaaatgaagttccaacatcatgtgtttctaggaaattattagagaatcttttaaatgttgaatttccataggatacaggttgggaaggacaaatgggaagaaaaatgtcacatctaacaattgaaataatgtttttttgttgccataaacagtattgatcagtttgcatggcttatttagaactgaaacttcctggcagaggaagatgcaaagcactgagaaaatattatgggcaagttgaatgctgtccacacagattgtaagcattatagattatccctttttcacttttttcctgcttcccgtactttatggtcctgaggctttttgcgcactactttcctcactttgttctcctgattcagaagaattttgttttatctgtttatctccctcgtaacactgtttcttttttctttttcttttttgagaaggagtctcgctctgttgcccaggcaacagagtgcagtggtgcgatcttggctcactgcaacctctgtccccaggattcaagagattctcgtgtcacagtctcctgagtagctgggattacaggtgcccgccaccatgcccagctaatttttcttattgttttttgttgtttttttttttttgtatttttagtagagatggagtttcaccctgttggccaggatagtttcaaactcctgacctcaggtgatctgcccgcctcggcctcccaaagtgctgggattacaggcgtgagccaccacacccagcccctcacaacactggttttcacctccattgccccaacctgctattctacacattagttgtgggtaagaaaaactggggggaaaaatcaggaaaatataggtgtctaagcattgtttcaagtcttttatctgtcttaagtctcagcattctgtctggtttatgggggggaaaaaaaaccaagagcgacgatacacattactccaaataaaccctctcttaatttatgtaaaattgttctaatcttggtgggggtgggggaagaagcgtttaaaagggatagataaaaattcctggatgaaattcttggttgccagcctttttggaattatgacctcatcaccactggaatttacaagtgtttgtgatagtgagtaaggcatcaagtagataattaaccttttgtatttctatattaatgatttcatcaattagtatacacaattgcaaaatgactacataattattttgctctcaaaaaagtctacactcttaaaaaaactttaaaaggaaaaaatatcttttcataaaagttcctcaaactacagtgcatatttatttacatttgacaagtgtgaatgtgtttaatgaaaaggaaaaaattctgtatttcaatatgtagaacaggttggtaggtttagcattttttatttttgtctctccaaattcagtcaaaatagttcttactaaaacaggtcatacttaaattctactctagggggagttctttattattaaggcatgtaaaacaaagaaaaaaataatttaaagcactttccttataacctaattgatatgttaatgtttttctctaatattttgaaaatatacacctatgttcatccacgtgtttttgttttgttttgttttttaaacttggaggcttgctccaataaaagtaggactctgtagtgcatgtgtttatctgtttacctaaactgaagtatggccccaggaaaatagtatatttgattgattgtgtgtggtttttttaaaccaaatcatgcaaatcattttaattatgcataacttcaaactactacttaactcccattcttgacaattaaagaggttttgttctcctaattgggtgggttataaaagttaaatgttgcaaaaaaaaaaaaaaaactatgaaagaagctcaatttcgaagtatggcttcttttctgggccctataatatgtggtacatgtcctggcataattgaaggtaaaaagggtagtggttaggtggaattcatcacagagtatctcttcctctgtctccaaagctgcttttgcaccaattagctatgaccttttcttctagccttggggtgtaagattactaggggcaacaatttctgaaatattttctttctaatattagtttaagcaaatttccttgcagagctgactattctttcatggtttctggttttctttttcttttttttttcttccgtctgctgcttctttccactaagctgctaaatctttcgctgaggaattaaatgtaatgtttctagaaacattaatagcttgtgcccttttctgagtgtcctacttcagaaatattgcagctgcagtggtattacgggctatcatttcttcctgtttctctcagcagggaagttccagctttaaggtagatctgagttcttttattcctgggctaggtctcggagattttctttttctcaatgatgtgaatgccttagtcagggttttaaaagcctattgcttctttgtcaacttatttcacattggttcactatgcagctcatagtaataatggagaccgggcaagagtataaatgaataattataaatcaaaccctcctattggaaaagcaacccaaagcagggggctgtgtgggtactgtcatggtaacctcacctctaga

SEQ ID NO: 138294 - DNA, 1181 bp, Homo sapiens
ttttttcccacacttatgactcttaatagctaattgaaacagaactcacatgagtaatttatattaccgactacctgccacttaagcgttaatagagactgagcaagaatataaatgaataattacaaatcaaaccctccttttggaaaagcaccccaaagcaggggctctgtgaatactgtcatggtaacctcacctttatggaaagagaaataaagttttgaaataaaaggaaataagcctactttgaaaagattgtatatcattaacaatttttgtggtttatattttcctgaataagctagttttaaaacatataaacacattaagttggaagtgaatcttactaatgccagcactagttataattcatgattagcactggggcaagctgataatttgaaaatctcacagatttttactgctatttgtacccgtctatgttaactgtaccaatgataaaataataatcaaaggactgatggcttaatataatagctattgtgttctaaatatcttttatgctttgacattaaatgtctctcttgctttcgtatctgctttcaaaaatctactacccattcctgatagtatttaactggagttattagtcctttgacagtgctgcatgctattgacagtatcttttaatttgcttaatttcctgacatttgctatgttaattttttactttgggactttttaatgccagatttgtgcttaaaatagaaaagccctctactaataagatttagtcatatcacctaagtactacagagttgtcccagatgtaatagggagagataaagaagggatcacagataataagttttctctgctttccccacaaagttattactacaagctttaagtctcagcttttattgataaatataagtacaggttatctaaggaaagcctatgcctatttataatagcattcaaatctggtgttagtaattgctttaggccacaccactccataaacagtcccaaggcaatttgaaaacaggtatttgttgcataatctgtttttattacaaatgccttttgttttatgatttttgtattaaagtaatgaaactaaataatactttctggttaactagcaggtaaacgactttatgcaatatagatgtattatattttgtgaaactaccgatggtcattcaaagggaaga

SEQ ID NO: 138295 - DNA, 1065 bp, Homo sapiens
atagacacacctcaaatatgccctacagaccttgtaggtacagcacagcacagtatttgatgttcatgataattatgcgaattagcaaaaatgtattttcaatagattgtccttacggaggcagcaaagtgtacaatatatcttcaaaatatttctatacaaaatggctaagataaaaattgttgctatttaggacgtatagactctctgctatccagatcaactcactgtgtgaggtttctggatagctgagatcctattttagcttttctattttaaaatgaaattactcaacagctatttgtcctattaaattatgcaatattattatatctaagcttcctgttctaagtgtccatagctatttgttgaggcattattctcagatgggcatggaaacaaatatttatctgattattcttttgtaaatggcccagttatatgttaaaatatatcttttttcctcaaatgtgatgtttctaccgtttgatgttgcctttgttcgttgacccttgcttttttcagactttcactaaataagagactatttacatatttccaaacgattgcaaaatattaaaatcaaatcataaattattcaagctattggggaagtttcctgtgaaaacatatacaccataaagaataatgtatttagaatatctccctgttggtagtattacaattgaagcacagttgttgttactcattcctctcctcttacatgtaataatcaaataatacaacaacaaaaccaaatatagtaaaaataaattcactgcccgtggggaagaatcttaaatattacctttattgtatatgtttgaagtatgtttgtagctttagttgcatcttcatcactccttagcagtctccttgttcattgtttactgaatcatatgcctctgctattcttccagattttctctattctctgtagtccctcaaactgaaacttgcacctgacagttttagtaaatgaccatctttttcaagttcccttcatttccctcagtgtcacttcccgaggcaaactttgtgctcctaatctcattcctcttacct

SEQ ID NO: 138296 - DNA, 1019 bp, Homo sapiens
ctgaagaaagtggatggaactaattagcactcagcattataaaataggaagaattagataaagcagcttcaatattaaactcagacccctatgaagatattccctttagttatggggattttgaaatgatggacaggctaaaccaaaactcataatcctattacagtctcctacacccacctaataagcttcaagagccgtttccttggagtctgggatattgccatcttcctctaggcttttctgtatatagcttataaattctttacttgtttccactaaatactttgttatttaaaatagcataaaagagagtatataagtatatatacatattgaggtattttgactgtaataatacccttggcctgtagggaacttcaaattattaataatttcagaggaaagctttttaagaaaaaagctccaggcttagctgtaatgaggcatttgaaaaggaggaggggttatgtttatgtgcgtaatgaaaatattgaaccctttgggatgttatgaaccatggtgcactaataaatgatcttcccatttcagtgttccagcagacatctttgtacccctgatgtactcttgcaaaatgcctatagctcacatatccttttaaatatttctatctcctaacattcgttactgtgggtgggggtgcaacaggataaatctgatggagaaaggaggacaatacaagaagcagacaaagttggtggtttagaataatgagcccattttcagctgagctgtgtagttcatatgaattaattaaccccttacaaacatttgtctgacaatccaaattctcattcagttcaatgggttttataattatcatttaactaaatagcactaagaactgtttatatcctgacattaaggaagctttgtcgaattctttttctgtaaatcatctgaagttgtttacaatttgcagtagtcttggtttgtgctcaggttgctgttttgctgctttaaaaaatattttcagggtgctaattatagaatatgct

SEQ ID NO: 138297 - DNA, 1079 bp, Homo sapiens
taccatagttatgcaaaagtaatgctgcaagtacagaccaaagccccagaggaggtagttgaagttcagcaaaatagatttaccaaatccatttgtgtttgcctggttttatgttggcatttagagtctatctttattttggtagctttgtagcctgagagtgagagagaatatatgtgtataggtatgtttatatgtattgctgacaaattcaaagacatttgattaaatatgctttatgtaagaagtgaaaagtattgtgtatattttttctttttctgtggattacaatatcttcatttctgtggttactttttgcaaaagattagtccagattcatcactctagtttctaagaggaatgaaagacaatttaaagctaaattcaaattctatgtaagtagtataatctgatgaacacacccttttatcccaaatttagagcaacaaatgttttatttaatttgagaatatgagataggaaaagtccatcataaaagtggtttcagaagctcaaaatgttaactatagcttccatgcgttacagtcccgtgatgctcatttaattctaaagtaagtcactgttgtttctagaaaactagtcatagttagactaattcctttttgttgttgttcaaagatttgaaataaatgcacaaagtcttccttctttgtagtagactagtatcctggtttctgcatttttcctgaggaattatactttaagacctaagataaacaatgtagaagaatcctctaaatgtgacttgtggattccctttgtacaggacatattctttggtgttaatcatgatcctgaatcattcctgccccagccttttgtctcatcttccctattgtacatttacaaattggccctaatgggtaagaaagaaacagacaactaaaatagctataagatgaacagcagttttttaaaaaactttaaaatatttttcacactctacaggggaataagcagataatttgcatatacacttgtggctctgtgatgttttcatataccagaatttaacacctttgcaaaatcctagcagagaccatggggatacacaatta

SEQ ID NO: 138298 - DNA, 1502 bp, Homo sapiens
gtgatttgggctgatttgcagagagactgtaaaagctgaaaaatcagtttgacaacgttcctgctgggattggcctgcaataaatgtttgcagtggtatttggaggccatgccagtttattcagatcactggggcttaggagatgatgcctacagtaaaacttgagttcactgcttatcagggaatgtgtgaaggctcccaggctgaaggttcattaggtcagtatgtaagagctgtcaatcagaccaagctgtcaggggaatacttttttaaaaaacaaacagaagtaaaatttttctacttaggatttttccacattgcatcccttctgccatcatatcgtccatacaagagacagcccttgtgagagagtagaatattagcccattgtaatgttccgaatgtcagcctttggccaccatcacctatgagcacggctgctgctcttagtaatcattgtggtcacttaggatgaatgggatagaatggttgtccaaagtacataagtctttaaggagttaaggacttgcatcatattcattagccccagtattttaccactgtgatggaaacatagaaggtgctcagatgtttattgatctcaacatcaagaacagaaactactatatgaatctagcatacatatggcctttaccgccccatttcccattcttggctttaacaaaatttgacaaaattatttcctgtatttcttccatattgtcaagcgtgtattgttttatagctagaaaacctattatttaggtttgattttggtgtatttactgattgagcatgactagaagaatattcgaaaggtctttgtgaaaaaaaaaaaaaaaaacatcgtattacttgtaaaggaagccaagaaggtttggaggtgcaccgtttattaggttttgtgtgaacatttaacactaaaacattagttaatatatattaaccatttagatgattgtaaaacattatatccatgtggcaagtcactaaatcaaaacacaggtaactggaacagactgacagaaaacacagttggcctcatcagatacatagaaaccatagtaggatgaccaagataaacagtatagctatgaaaacatcaagttgatgatagcatagactctaattattatcatcgatagaatgtgaatgtataataaagtgaattatatagtttttgtttaactcttgttttaattagcaccagattcagctacagttgtatttatgaatctatgttaatttctaataattagaatgaattacttcttcctaagataatactcttcctagaatggaaatttagaaaatatactctattaaatatcagttgattttctttccaggtggcatccattaggacaaacattatgaaaaggccactgaccaaaatgttgatttcctagctgacacctggaagaaaaataaacttatgtttaatggaatagactgtctaaatccctgttttgagaagagttcacattcatgaatatgtattc

SEQ ID NO: 138299 - DNA, 1016 bp, Homo sapiens
aaaaaaaaaaaaaaggaaagaaaaacacagaaagagtggaggactttaacatttcttgagtacctattgttttcctggcatgttctaggtgtcatatgtacagcatctcattgcatcttcacaacattcctgagcattaggttttcttttcccaggtttacaggggaagaaatggaagattagagaagttaagtagcttgggcaaggtcgcagctggtgaatggctgaatcagaatctgaacaccagtttgtctaattctatcctgcatgctatttccttacaatgttccctttcacttaggggctcatgcaaaagatttatgatttccttcagattttctttggtcatagtgctctaaacacttgtagctgaatttttagttcttacctcaaataagtctgataacactactacatttttaaaaaatgagtgatataatttgtagaaatagtcactggaatgcttttaagagatttcaaatcatagagttgaaaattcatgctgtgctctaggcattattgatcctgagccatctcatgcaggtagatataaatcctcttcttaaagatctctggtgaaaaaacactttcaggcttttccatagtaatttacctcattgctgaaaatgtttacagataggtgtatgcacattgttaggaccaatgacataatgcccagttgcagtgaatcaagctaataaaataataatcctttttaaaattataatcttcaaagggtttccgaaaatcacttataggaagtttatgtgattttgctgtttctctaggaaaggcagttacgtttgaatatttaaatgatcaggccttgtgtgggtcacacagggatttttattttgcatttggattccctttatggtttaaatcacagatctctaccttaaatgcaaatgaatggagtgttgagaattgacataattttttaaattgccatagttatttccagggagctttatacctcagtataagtatcttatcctgtattataattgcttgct

SEQ ID NO: 138300 - DNA, 1364 bp, Homo sapiens
gcagagattttaaagaacagggtaaggccaggcatggtggcttatgcctgtaatcccagcactttgggaggccgaggcgggtagatcacctgaggtgaggagttcgagaccagcctggctgacatggtgaaaccctgtctctactaaaaatacaaaacattagccgggtgtggtggcgggtgcctgtaatcccagctactcgagaggctgagacaggagaatccctcgaacccaagagacagaggttgcagtgagcagagatcgtgccactgcactccagcctgagtgacagagcatgactccatctcaaaaaaaaaaaaaattaataatagtaataataaagaacagggtagatgattatcgttctgggatggactagataacttctagtattgtgcagcccagtgattccttgaatctcctctaaatgtaaaccttgctttattagaaatgagaaatctgatttgtggatatgaagtctccgcatcccccataactccttgattctcctttgccaggacctccccccaccctccacttttggtttaatctagttcttctaattaaatatgagataattaaagttcacagagtttaaacccagcaggtttgatttaatgataaaaatcttggtttgtcagcttttcaaggcataatcctggctgctgccttatctgacaggtagtcagcctagcaggtctgaggatgaaaaccagagcatctcatcttttcaggcatgacttgctatttatcttctgaggcataatttacaattgccctatagaaaatgggtagggttaaataagtagaaaaggtctccttttgctttggctcaattaattcatttcctatgcggttgtcgatgactaggcttacaaagtagacagatgtatttcaaatgaggagaaaatgccccaaacatagcatatttgattattgtaaattattcctttactcactgaatatgtaaagtatgtaaatttagtcctgctgtcaaaaggtagctctgtaccattagtttctgcagcagacaaggcctgctgcatcctgtactgcattttcagagagataattctaatgacagcttgagcaattgccttaatgagccagaaaggtgttcttttttattcgtgtttagctgcttagagtcatctgaaatagagatcatctgtagatattacagagtgaaaaaagacatgggttatcttattaatgtgtttctccaagcatgctaagaatgaaccatcaatcaggtatttgccaagaaaatagcttgttgtcagttctgtataggtgatatggcaacctgaaatgcaagtttaggttctaattatcatgctagctaagtaaaagagttgtcaagt

SEQ ID NO: 138301 - DNA, 1051 bp, Homo sapiens
aaattagccaggagtcccagctactctggaggctgaggcaggagaatggcttgagcctgggaggcagaggttgcagtgagccaagattgtgccattgcactccaacctgggtgacagagcaagactccgtctaaaaaaaaatctatctatctatctatatatatatatgtgtgtgtgtgtgtatacatgtatatatatacacacatcctttttagtttaaataatccattgtattagaaagaaaaagttacactagtgaatcagctctacagttttcagaaggtgaatcaaataattactaaattgaagtacagtaagatgaactatcatgtgaaattatatttccctataaatttcttatgaaatcttgcattgatttgtgcatgtgtgtttgactaatgaagtgaagtgtgggactactatagaatttagatttaatgcctaggtaatgggtacttgtccaattacaggtcttcatgaagtttctaatgaaaaaaacactaaagagctcttcttctcagctgtatcataaatgacaaaaatctcagctccccaggcctaagtcagtaataagtggaagagtgactcttctagttactaattcatttgtggagttttccaaagttagcttgcattgtaagtttcttataaggaggatcatttcatgagagttggttttttgctattgtcacaattgtgtaatcgtccccatagaagcatgatatgcatacacttaacacattcaatttgtaattcttcttgctagtaaagccaaaaattctatcccatgcttagacatccatggaggtgatcattataatgcattatttgtcaaattttattctttttcaaaactccaaagaaaatgtgacattctactatgtctttgaatctctgattatatacatttgtttatgttaatctataacatgttacttggtttctttgaagctctgttttctagttgatgatgctaaaatttatgttaattcacatctaggtgtacttgaaatcacctaatttgaaattgcagttcttaaacagctctaag

SEQ ID NO: 138302 - DNA, 1386 bp, Homo sapiens
tatactacatatttcctttttgaagcaggaaagaatgaactgtgcatcacagttctgttatctatagcaaatctgtaactcctgaatcctttcttcccgaccccacccaccctgggggctacttctctaccattagtttatggtcatcagagaattacaacaagtagagcagcacagccttgtgctttctactctaaaggtattgcttccccagacaactgaaacttgagttaagcccatgccccaggaaaagaaaggtcaggaagttattttgctttctggaaggctacagagatgagagcaaaggagatgaagagccttggcatctactccagaattgcttttgactgccagacttcgatctaatctctatggcacatcatcagcattcactgtgtacctcatacacaaaagcagaagagtagctggatttctttaaaattgtgcccttcatttgtttcccttgcatgttctatttccccaattaactttgtgagccctgggcaaattagttaacctcactgggcctcaaaggcctcatctataaaatgaatggtttagaatagatgatctttgatcccttccattgcaagcattctatgctgtgaaacctcaaggctgtaaactatatgagagtaggagccaatttttttttttatcattttttttatctccccacagggcctaatgtaactttgactgtactaccttgctttcactatgtgaagtagattttgaagacagctctaatatgtactaaactcgattagaaattagacatcccattttagttgaaagtcagcttattaggtagatgttatatgaacttgcttatttcaaaaggaaaaaaaattctgggaaatgaatcattgggatggaattaagtaatcccatttaggaaaatagtactttaataataggctatgaaagagttatgggttgaattgtcacccaaaaaggtatgtttaagtcctaatccccagtatctgtgaataggaccttgtttgtgattggaggctttgaaaatgtaatcaagttaagatatggtcatactggatgagggtgcaccctaaatccaatgactggtgtccttataagtaggccatgtgggacacaaagacacacagggagaatgccacgtaactgtggaagcatagactggagtgatgcgactgccaaggaatcccaaggattgatggctaccataaaaagctaggagagagaagtgcaacaaattctccatcagaaccttcaaaagaaccaaccctgccctgtaccttaacttcagaattcttgtgtccagagctgtgagagaatacatttctgttattgtaagtcacccagtctgtcataatttattatggcagacctaggaaactaatacag

SEQ ID NO: 138303 - DNA, 1444 bp, Homo sapiens
aaaaaaaaaagaaaagaaaagattaaatatcatccccatcacttcatcttacccagtggggaaacaaactattttaaactaaagtagtagcacatgcttactggcatagagcagaacattcttattaataccaactctatgtaaataactagatatatacattattcacatctgaatgtgtaattaaagaccatttaggtactgaacttgatgaatgagagggaaaaatgtctgggatgtcaatgtgatactgtaaataccgaaggcaattcacagtgtgactagtagcaccacctgtctcacacccaaagataattcatcaaataataccacgtctaaactggcagattctttgtcttcatagcctaaaatagagaaaagatcactagattttttttttaaaaatctaatcccaaaacttaccagctctgttacttcagacaaacctcttaaccctcagtgcccccatctataaaataaggataattatatttgccccacctcacagccttgaagtgaaaagaaatgtggtaatgtatccaggaagcatttataaactaaatgctatacaaacaaatggtgttatttcatacctattcaaatggactgaaagtcatttgaaaatgttatcaacttttgaccgtgattgtattctcattttccaaggaagtccaaaagatagattaaatttgaattcttcattgttgtgccttgctgatttttgcttgaggtgatcacactgcattgatgcatttttacacagcttttgttgaatattccttggtccaaaagctttcagctttatggctttgaagctccaattccctgatcaatgtctgaacttgtgaagcttgaaatttgtcatttggcattgacttatgtgtaaatctgagtcaaaattcagtgtcctttaaacatctcggggcaaattttcagcatggcctcatttttactgatatgatcatgtatttgtaagtacagattgccacttttgtcctcaagagagcacaaagtggtcattgcacctgccatgaggtaattgaaggtgcaaaaaatcccacttctacaaaaaagtctttataacactcccttcctttacacccctcccttctgttcctctgtgtgtaccgaaaataaaaaaaaaaaaagaaataatgctattagcaggctatgaatagagatcagcatttcttttcaagaaaaataaactgcatttaatttgggcttctcttaaaaaaataagatacccggtgtaatttaaaataaaaatattgatggaaatggcaatgtctttcataattattattcaattgcaatgttatatactccataacttaagcaaatgagtagttttgactactggaaaatagcatttgaaagtcaattatggaacttccagcacacctatagttttagtgtcctaaacttatcctctaaagttact

SEQ ID NO: 138304 - DNA, 1024 bp, Homo sapiens
ttacaaaaggccatctggaattccctttctacacatcactgttaaagcaaaaaactatatttaagtggtaccaaggtatcaggattccctgcagacagtttgagatctaatataaaatcaaaaaccccttataggccactggtctaaatgatgacagtaaaaaattcccaagactattaagttttattaatgaatatgatggaaaataagatcttggaatgtgaattaaatgtttttaaggtgatgagtgggtaagaaagagaggtgataaaagtttttgaaaacttgttttcaaagcaatactattacatattaaatatacagtttaaacttttctcatcctgctgacaaatacatacctgagccaagattactgttttgtttcattttaaccattcccctacatggtaatatctatagtgaatgaccatttctggagagttttactttgatatgttagcacatcattacctgttaggtagccccaaaatgtaaataaattatacctcattccatattgtcaaaacatagaaacagcaacaaagatacctaaatgaaagaagctgtgattgtttttcaaaaccaaagaagagaagtgtaagaaaagcattgaatttaaggggcagaaactatcccagaaagttactgctagaattcaaatactaaagaaagtaatagaattatacctttataaagatcaagggtaacaaatttgaattggtaccttttttttttttttttttttttttgagaaggagtttcgctctcgttgcccaggctggagtgcaatggcgcgatcttggctcaccacaacctccatctcccgggctcaagagattctcctccctcagccttctgagtagctgggattacaggcatgtgccaccacgcccagctaattttgtatttttagtagagacagggtttctccatgttagtcaggctggtctcaaactcctgacctcaggtgatccacccacctcggcctcccaaagtgctgggattacaggcgtgagccaccacg

SEQ ID NO: 138305 - DNA, 1184 bp, Homo sapiens
tgccaactatggtcagtgggccaaatccagcccatggactagagctaaaatgttgtttatatctttaaagagttgtaaaaacaaagaagaatatacagcagacaccatatgtggcccacaaaggctaaaatatttgccatctggcccttcacaaggaaaatgttgctggcctttcttccagatgctgaggatacaccagtgaacaaaaccgacaaaaaaaaaaaaaaaaaaaaaaaaatccctaccttcagagagcataaattctatttttttacaacaattttatgcagaatacgcatcttatttttgtaaatatgcacaatatttacatatagtacatactcaatatttgtgaaatgaatgaataagtcatagagtccatcatccaatattatataatattggcaaatatttccatatgatgtaataaaatgttgcattttttaaatctttatatgaagaatttttccctagataatttttagaccaaaaactcaaacactacttacttgtcaagacattttattctggtacttagtaatgatttcccatcttaatgtaacttttattcatgatgaggtcctgattatctagcctccttatgagaggtaatcataattatatttgattctgaaagctttctgaaatggtgattctttcataagagatcattttgtatacgtgacagttaaaacaatgagttagtttttcagagtttctatccttgaattctacaagtttgtgatgtttatagcttgaattcagataaaaccattttgctccacatttgaaacgacaaatcttttgcattagactcagagttgactaaaactatggcagcttttcataaagtcaggctatagatgtccctaattcccccacagagcccacagccctttgaaagtgatgatagaatactggggatggatcagagagtgctgagaggagagtggaagggaagaagggacaaagggaaaggaatccagagtgggaagagttggattcgtagagccagcagatggtgttggtgataaagaagattacgtgactcatttctgtaacccatgagtgtcaaagttctccactcagtgccatgtctccatcccattacccccacctaaataagttatctgttctaacacccatctgtccccacaccaaaccatcattaccagcaagcaatt

SEQ ID NO: 138306 - DNA, 2221 bp, Homo sapiens
ttcaaacacatatcactatggtagttcacagtaacatggaagaaatcattacagagcatttgaactggataattttatttattcattgtggtcagacagcaagtctaattctgttgtcatttttatacaggtgatggtttaagaaaaaaaattatttacagacctcaacagcctatctcgatttctgtatttttcttatcaatgaaataataaagatgagcgcttcaaactatgcctctcacaactttcacaaagcatggcaataatctataatttatgtcactctcacctgtaaggctgagaatcattgacagaacctaaagggagggaaaaaagtcatctttctagataaagtgatgatagtttttcccagcttttaaaaaaatatatgcaaggaatttgtggtgaaatacaatagcattttaataaattgttattaacttgtattactaataaaaatttaagcctattgatctcacctgagaagcttaaaacattgaccagctaaggctttagtcacacatattcttagagtttctgagaaaccaatagcttttatgattttaaaaaatctatttacaaacatcatcttcacattcctctagccctgctttttttaaaggaaaccctacaggcaaaaatgcaatttttccaaagttggacatatggctgatgtcagaaccagcaaaatcatgttatacaaagccaaacgctgagttaaacctcccaatgctgatgttcatcagaccccagaataggtgtctgttacaggatgagcaagatgttagtcatagaagtagaactctgtggagatataactactcacctgcaaaatcaggtggctctgaaaatgaatagcactgtagcgttgggccaattcctgctgcccttggcactgggaatgcaatcttgtatggcaaatcaaatgagcagaaggcttggggccagaatactatcaagctcttctcaaactttaaatggatgagaagtcctgctcactgccatggaacatggcatggattttaagtgcctagtaggccattttattttgttctgttctttcttatttttggtaagcagagctggcagtatgagataaacttacataaacagtgagttcttgatttttatatttctcatatagatccaaaatcagcagcttcatttacacgtagctgtaaaactagaggagataaagtaatagcgtaggattatgttgaaaaatcaggatggggaagaatccccagaagagcttgacattttattaatccctactgaaaaacatgttccaaaatttttaaaaatgtccttctaatagcatatatatatgtatgtatgtgtgtgtatgtgtgtatatatatatatgtgtgtgtatatatatgtttgtgtgtgtatatatatatgtgtgtatatatatatatagttttttccatctagttttctctcagtagtgtctatttaatctagaaagcttctcaagccatgaacttctctatggattagattctgtgtattagagcgcaagtgagtatagctttagtccttgaatgagcagggaaactcctcaatgagaaaatatgggattttccaagaaattcctccagggcccttcctattcttaatcttttctctgtagctgaggataatagctgcataccttctagctcccccaattctagaaacaagaataataaagccttgacaatccatgagaagactttaatctgccctcaggattcccgattccagctcagtttctaatgttcctggatggtgactcatatctcaaaggcaattttggatttaaaatggttttccaaatctacataaagaatttctggattgtttgctgttttaaattagccaaaccaccctttctctctaacagcctgtataattgagagttggctatacattgtttgatacctgtaaaaagtaattgaacattctgaatagtgtattttgatgactgcaatttcaggtgcccaagcttgaccaggttgcttcgtttttgctcacagtggtattcagatatgcccctatttaaacaacccaataaatgaaaataatattttacaagattgataaatgaaggtgatttttttcccctcagagatctcttacttttaaaagagattcattgtattgttagtcatgtcctccgttgcattgaaaacatctgtttcaaaaaaaattcacatttatgggttattttcctcaa

SEQ ID NO: 138307 - DNA, 1033 bp, Homo sapiens
ataaacccaagcctcgtgtgatcttgttactctctatacagaacttacatccttgattagtatgtagactatcagtttgtttatttttttaagagatggggtctcgctatgttgcccagcctggtctcaaacttctggactcaagcagtctgcctgcctggtcctcccacagtgctgggattataagcgtgagccaccacacatctggcccagactttcaagtttcatagtgaaagtgtctggcagattaatgagttgttgatgcattcagtcaagaaatacttctgaactatgaggttcataatttgaggtttatctggttaaaatcatgactgctttcattagtgctttaattagttgaattctgtatttcagagaggcaaaactaggaactgcattttactgataaaattgagttatactatgccttttaggcaaatggaaccctcatttttttttgtccttatggtcattattaatattttgtttgttcttatttttgcttggagaaggagaactatcattgcattactgcaaacagtatatttatttacctcctgcccatgaacacttctttccctatttggagaaataagatactgtttgttcacagacctccctagtggtctgtctgttaagcagcggcagtcctgaactaagggcacaagaaaatggagctggtaatcacaagcaaataatgcaagacttttaacactttacatgacagattcaggtggggcttgcctactttattatccaaggtgttgctatttcctttcatgcctttggagatcccagaagaaggggagctagctgagtcaaacctctgtctcacagggctttcatgaacaatgacaattcatttcagcctagaggcaaagagggtgccttttcttacgagacttttgttcttattgcctggtgaatttttaaatcaaattggtggaaaattggaatgttttcctctcttttgtccttttgcatctccatacctccctccctcccagtatttttgagaccagatagaagcaga

SEQ ID NO: 138308 - DNA, 1049 bp, Homo sapiens
cccaaagactctccagtgcctagaacagtgtttggcaaatatttatagtagttgctcaatatttgttgtattagtgattagcctgcatgagctatctggcttgcccatttcaagtgctgtgatgaatattctatgccggagaaatcatcctccagactggatcgttaccattatcttcatttggcattttattaccaacaagatagtaccccaggtaccatagtaaaaatgacttaagtgctttccatgtccatgtgcctttatattttacttaacaacatatattcttcacattgacatacattcattcagtaaatatttgttgaaaacttacaatgagtcagacacttacttgcccagaaatagaggcatagataagatattgcacctttactgtaactctactagaacacaaccctagaaaaaattcagaatctgtcatctccatagttgtggatttctctacaaagttgaaatttattgttgtttttgtgacaacaacatacgtttcctgatttttctgataccttttgattcatcctcatcattgatgtttctttttctccttgtacattaaatgcttttgttcaccaaggttcaaccctcacactctacacaagaatctttctgtgtgatttcacccactctcatatttttaactgtctatatgcaaatcatttctaactccgtagctatagcctacagttcttcctggaacttaaggcttgcataatgaaatgcctgctggacaattctacctagatgttcaataggcaccttcagttcatgtcaaaatcttaactctgctttttcttctaaaatctattccgtttttgattctttgtaggcggcaccaccatccagctactcactctagcagggaactgggtgtgaaccttgattcttccttctctataaatctccacatctcacaatctctgtatcctgcccgttttccttcctaaatatttcttgaatgtgtcacctctgtggcttcctaactaccattgtcctattcccatgttttaccaactgttgctgagacaact

SEQ ID NO: 138309 - DNA, 1581 bp, Homo sapiens
aatacaatattcttttactttagatatcaaccttataatttattaggagaaataaaaacacaaaagggcagtaatataccagcccacatgtagtctcatattccagtacagttttatctgactttgcctttttgatactgatgacacagggagcatctggggctagataaactgctcatgctctgaactatatgttgaatattttgatagaaactctttttgcctgtggcttatttgtcatatgccgcttgagtgtgaacttaatttgcatgactgcaataaatgaaaagtgtttcttatttcctactttgagtacataaatttgaccttgatcaatgtcagcaaaccaggcctctggcaaccacttcacaattttgactatccagagaagttcatcatcatctttagacaactttaccctggaatggcaggtttagttagtatcagtggagtcttgtcagacgtgtttcctaacaaaaatgacctcaagcaggagtgtgtggttttctctgagaaagcttttcttcccctgagcagatcatagcctccacaaatgtctttgaaacaggcatgcaaagattgctctatacagaagattgtgacaccgaacatgaggttgcttcgaatggttatcctaaagtgacctgccaaactgaagggcaaaaatgccactgctcttgaagtcttaaaatagtatctcttcttgttgaatccatgggaatagaaaaaagaaattgtggtcaggccatatgagaaggaatgccaaaaaaaaaaaaaaaagtcaccaaatccatttagcacttggtaacaaaaggtaagaatagacattgaatactgtactatttttagtatccattccagcatagtgctaagtatgtcttgcctccaaagtgtgttactccttctaccttctccatctctaacagtaataagcccagtcacctaagttcaaactctgagtcaactttgactcaagcttctcattgattccctagaaccattggttaccaatttagatttcattatctcttgaaactgttgtacctccaagtactctaaaattctcttatttgaacatgtccacttccttccacctttcctagtccacacccactctgcttctgcttttccgtttggtattctacaagcctttttcccattcaacttttccatctatctcatttctgtccctacccaactatgactctgctgtccaacatgtcagtacgtactcaaaagcactcctcattcattctctacccaattctcagctgctcctagccccaaccctgcaaataaccattgtccattttctcctctactgttcccggactaattaatgctggtaggcaacgacatataatagtagcatgttgatcaggcccactgcaagcgaaagaaaaattctaaattcattagttagaattttgaaaacaaaacatctgtcctaatacatctacttggttctgaaaaactgtgattactgtagttattgagaggtttctgtaacccaaatacttaactgggtcgtacatgaaaattatttttaagattaaaagtagagcatatattgtactgaca

SEQ ID NO: 138310 - DNA, 1061 bp, Homo sapiens
gaatccagaaagcattttcctaccaaggcagtgttataaatggtggttgggctcccctaggatagccaataatgttactgaaatactatacatttgcagtgaaacagtagtgaacacatttatcatatactactaattaaacaaaagcaataacgttgaataagatcattttatattttgggcttcaatggtggtgcttgaggaaaaacaggtttaattataagaggatgaaaaagtagatggagactgtgtgaaatctcaaaatagggctcatgagcatttttgaagacttcaaatgacacgtgttctttatcaagtctaactgattttaaaacttgtgaacttttacttccctttttgtggttctaagtgttttgtagtacaactgttgtgctatgattctggtcagtttttgactagtgatgaaaataaaacaagggaagaggataaaggaagaggatatggtgccagaggaaaattttgagaagagggggcttatatgcaaatatgaggattaaaaaaacaactttatactttagcaccacaagcattccacaagcaccagcaaccaaaggaaaaggagttctttcttgcttagttcttaggccatcctatataaatgtcctaaatagagataaaagttgcaataagttaaagaggctaagttgagccacactataaggagatgatatgtaaaccgcaaagcttgcatgagctgaggtaggaagagagttatttatttgcttttgttgttgttatttgtttttttgtcttcagttgtgtcttaatctgtttagtgttgctataaaggaatacctgaggctgggtaatttataacgaaaggagatttatttggtttacggttctgcagactgcacaggaagcacagtgccagcgtctgcttctggtgagggctttaggttaattccatttatggcagaaggagaaggggagctggcatgtgcagagaccaaatgacaagaaagagagagggaagggagcttacaggtttttgtttttgtttttaaacaaccagctttctcaggaactaatggagcaag

SEQ ID NO: 138311 - DNA, 1023 bp, Homo sapiens
cccgctctgtttaatctgtaattagtcaaatttaatcttagtggataaggtatctgaattgggttcccaaaactcatctttatttctatttttttttttacattttgcaataattatgaatattttgaatatttttgaattttgaacataaaagttgcaagaatagtacttggaaatccctgtataccctttgtgcagattcaccattttaaacatttagccacattcattttgttatgcctcttaaatttttaatacttcaattactgtttcctaagagcaagattattcttgtaggtaacaatagcaaagttaccaaattcaggaaatgtatcattaatgtaatacttccatctaatcaaccatccatgttccaatgatgttaactgtctcagtgataccttttatagcattttctcctccaatgcaagatccagtccagaatcacacattgcatcgagttgttatgtcttcttagtctcctttaatgtggaacagttcctcataccattgcatacactgttaaatatgaagaaaactggtcagttattttatagaagattcctcaatttgtatttacctcatgattagattcaggttatgtacttctgtcctaactactagataagcaaagtatgtccttatggttcacatctggaggcacaaaatgtctctctgtccctcactggtaatgttaacttcgatcatctggtcaatgtgttgcctgataccttcattttataggtattattttctctgtttcaactaataagcaatctgtggaaagacactttacgaccatgtaaatatattgctctacatcaaactccccctctagccttaactactattgatgattcattcctgaaccaatctttaccacaacagttgcatgtcatcttgtattaatttcttttggaatgagaagaaaaacaataatttactctggtaattttctgaagaataccgttgatttcctttgacaatgttctaataaaggaaattgctctctatggaatcgta

SEQ ID NO: 138312 - DNA, 1048 bp, Homo sapiens
ttctccttgtttatctcccattgcaccttaattcctctttgggctagagttgtctctgtatcttgtctccaccatccaccaaattttaagacctgaaagtagagacatcattttgttctatctcctaacatactttgcagttaataagaggcaaaataactgtttagttgaattaaaaatgaatgtgaggaaatattgtggccatctgctaaaatgcataggtaacaatgttggaaaagaagtggctcttttttaagtttgatgaaaaaaaaaaaatatatatatatatatatatatatatattcttaaaaaattaatcacttgtccaagatttaacagctaaactaacatttactgtatgttcattattctgcataatatgtttctcatatatgtaaaagcacattatttagtcaaaactatcatattaaatttctcccgtaattcctaagggctgtcagctgctcattaaatcttgattttctgtcaggaggaattaataatcttgcctttgagtgaatttagaagcaatgagggattgagcaggaatatttgaataccctctcggtggtaaattggatatccaattttcaacttagtcttaatgggaaaaaaagaataaattgaattcagaagctgttctttactttttaatatttcctccccacttttaactgagttaaaatggaagggtatagttctttctcagtggtggggaaaatcaactttcattcacttagaaaagtttgtcaaattcgaatgagacttaatatatggacaatctatatgactaagtctataaggtgatcctttggaaatcataggaaaattcagtacaataacacaaaaattgatttgcatgaggtttaaatcgtgtttttctaaaagcaaggaatcctgctcctccctctccccaaatgaattttgttgtcaaatactggtactaacaattattgatatcacaactcagtctctaaaagcaaactgtcctattattaccagagaggtgctaactcacattaacctaataatatatagctcttaattt

SEQ ID NO: 138313 - DNA, 1031 bp, Homo sapiens
tgataaaactgtatagttacctggtaaactactgtttataaactactttaattttacaatatcttatttgaaccttacaagaaatgtgtgaacatagtaaggtagggttactctcctcattttgcaggtgaggagactgagaattagaaaggacatgtgatggccgggcgcggtggctcatgcctgtaatcccagcactttggtaggcggaggcaggcggatcacctgaggtcaggagttcaagaccagcctggccaatatggtgaaaccccatctctactaaaaatacaaaaaaaaaaaaaaattagctgggcatggtggcgtgcgcctgtagtcccagctactcgggaggctgaggcagaagaatcacttgaacctgggaggcggaggttgcagtgaaccgagatcgcgccactgcattccagctgagtcaagatcccgccactgcactccagcctgggtgacagagcaagactccctctcaaaaaaaaaattaagaaaggccatgtgacttactcctaatttcctggcttgcatgaggctgagccagaatttgagcctaaagcttctctgagtccaaatttggtgttctctccactatatcgtgctgcttctacttatgggattgggaaatattcgggaattttaattgacaaaagtgaactgtgttcaggacagaacttaaaactaaggtagatattaagggaacaccctatagttcaatgggtgtttttctaggctatagatgaggagaatgccaaggttattacctactccaacaccaccactttgtggtacaaattaacaaagataccccccaaatctatgtatggttggcttgcacaaattaactttgtatttggcaaaaataaaaagccctcaggataatatttcccttatgtagtaaaatagctataatagaatttcacaatctttgttattttctgttgaaatgtccacaggaaaattagaattctgctaattgattttttttctgtatttataataagccctcatacaattgaagcata

SEQ ID NO: 138314 - DNA, 1082 bp, Homo sapiens
gacagaaatttattgcttacatttctagaggctgggaagtccaggatcaaggtgctgtcagatttaatgtctgatgagtgtttgctctctgcttccaagatgacacttcttgctgtatcctcacattgtgaaatggacaaacgctgtgttctcgcatagcagaaggagtagaagggccagggagctctctaaggcctcttttgtaagggcattaatcccattcatgaggatagaacccttatgacttaatcacttctccaaaggtcccacctcttaatacagctacagtaagaattaagtttcaacataaattttagaggactacaaacactcaaaccatagtaaagggtatctttgaagcattgcagaaacaaatggggaaagggaagtaccatacatgactcacagaacaacttatcctggaagttctaaagaaatagcatgtttaaaaagtgaagtgattcaggtcaactcatgcactatagatacatggttgctttgtaagagaaaccaaggaggaaaagccatcctttctacaaagcatcccttggtgactcccaccaaaaatagaatcacaaggctaaattgatcatgaatttggtattcttcatggctttagttttaaaaatatttttaaagtattaaaaggattagtattgaagatagtaatactggtaatggtttgcaaagcttcttgttcttgtcctactttggactccacctgcatttacacaaagtaccttcctgtcaaagtcatggacctagaaatccaggcttagtgcttgtggatgccatctggtatgggggtcagcttacggactttgaaactccacagatgtccaccacttattaactacatgatcttatgcaagctttttaatttcttggaggcttactcttctcatttgtaaaatggttttataatacctatcatacgggatccttttaagaatgattgacgcaatatatgcaagtcacttaacacagtgcatggtatccactaaatgctaagtaaacagcagctcttactattgttgtgagctaagtgagctatttatacaaccctggattcaaaaagttgt

SEQ ID NO: 138315 - DNA, 1049 bp, Homo sapiens
ctcagcagccgttacatatcattagtgaagggaggcaaggggcaagggggaccattttgatgtcagtttcattctttttaaagacaaatgcattcactgatgagaagtaaaccagcatctgtaaaattttacagacaagtaatattttaatgccttcttttcctgtagataaacgtataacttttcaataatcattaatataaactgaaataatgagtaattgtgttaaatacccataatgttggagctgcttttaaggaaaccagttatgaagcaactgtaacatcaagatcagtatatttctgttccaaaatagtctgtttcatagactcagtacatagcttgctgttatgccacttcggccacagttaatgccaaaatctaaaattttaaaggtgataatgctttttaataagaaatataatttggccttaactttccccttataaaaggccatattccatacacatcaactcaaaagtttgtcccattttctgacttttctttttctttatttgccaaagaatctctgtaattggcttgctctgcaaagcattttatttgcccttctgaacattaactattttaaagatccgagtgtattatggcagggaacacaagattttacttcaaccccttctatgccctcctctctactaaattaattatttctgttttgagtgttccagggaaagagtaaaattgttaaggtataacaggtaccaacgagtcatccaaacagaagtgccattccaggaaagtacagtatctgtgtgcccagcatggatcttggccctgccctacttttaagcttctaacatatcttcgtagtcatttcttctgtattgtgatttttttttaagtgagcacttttagatgtcccatatggtttaaaccaaatcagaaattcatgtccttaatgtttcgttagtcagaataattaagttgatagttcggggagcagttgaagcaaaataatggggtcattgaagcagtcaagctctaatgggaacctgagctcattcagataccaaatctaataattgttc

SEQ ID NO: 138316 - DNA, 1029 bp, Homo sapiens
tatattacaggtaccaaaaaaaaaaagatttaaattgcagttgctgcctttccagagctcacgataaaatgggggaagatagatcgcacagggacaatcacagtataaagctcaagctgaatcttaacagatgagtaggagtttcttgggtaggaaaagaaaaaggaagagaagcatgatccaagaaagggaacagcatttatggaggcaataggagaacacagtatattcaaggaagagccaactgttaacattgctggaacataggtatgagaggctggaaagatgaatagtcatgataggccatgtataattagttcgattattttactacatgggtgataaggagccatttcaggcttagacttatggtagcatggctagatatacattgtagaatgattatcttctaacgatatagaaggctgatagggtaagggtgaggctagagacaggagaaattcaatagggatctattataagagcctaagcaacagaagcataaggcctgcactagagcagtgacagtggagataatgcagaataaatagatgcaaaaatgattcaggggttagaattgactgaacttattgagcaactggatatgaggataaaaaagggaaggattctcggatgatttattgatttattttatgattgctatatgatagctgtagtaattttattagggctgctgtgacaaagcaccacaaactgagtggcttaagccacagaaatgtattgtctcatagttctagaggctacaaatccaagatcaatgaatgggttggctgtgccacgctccctgtgaaggtgttagggaaggatatggcccaggcctctctcctagctcctggtggttttctggcaatctttggcattctttggctggtagaagcatcacgttgatctctgctttcattttcacatggcatcctctcttggtgtgtgtttgtctccaaatgtttcctttttctagggacactagtcataagggattagagcccaccccaatgacttcattttaac

SEQ ID NO: 138317 - DNA, 1006 bp, Homo sapiens
aattgaaagctgaattgtgtgaaacaagctaagtttgtgctattggagtcgagaggagagaaagatcagcgaaggctagagggatcgggaaggtgggatttgagttgggctttgaaggataagtagtcttgaatggaggggaaggagaaggcaaagtgggtacataagcacaaatctggaagatatatagatgtgtttgtggaacagttgtgaagccaacctaactagattcaagggggaatagtagagaatgggagaaaatctgattggatagagtgggatctgtgtaaaaacaaacaatttttaaaaacccagaaaatatgtactccatgaatctctcctgtacttttttagctgccacaaattttggggccaaatttattacacatgtattctaatctgccgaagctacatcctttagtgtgaatctgttcacttttatcttcatatgtcttctcttgcagtgaattttaatctgagtccctgaaagttaacttgttaccatttttattgttgtttttgtcttttcttcaccacttcaaattaggattgaaccagattagtcttgttttaaatccactgcagccttttgagctggggagtacggtctctttgagaaaactgttttctttctttttttttttttttttagaactaagcatttgttgcagtttattggcactgcatatttttatttttatttatttttatttatttttattattatactttaagttttagggtacatgtgcacattgtgcaggttagttacatacgtatacatgtgccgtgctggtgtgctgcacccactaactcgtcatctagcattaggtatatctcccaatgctatccctccccgctccccccaccccacaacagtccccagagtgtgatgttccccttcctgtgtccatgtcatctcattgttcaattcccacctatgagtgagaatatgcggtgtttggttttttgctcttgcgatagtttactgagaatgatggtttcc

SEQ ID NO: 138318 - DNA, 1156 bp, Homo sapiens
acaatgctgcaaagaacatcagtgtatgatgatctagctttatacatttatccgataatgtgaggactggctttgtcccaatagatgtaaatgtcaggaatgattctttgagacatcttatatgagaagcaagttgctaggttagtagccatttttattcatgtataggctcagcctggcactcaggttgtgcatggattgtgttagacactagaaatataaaggaacttgtgccaattatgaatatggaatcaagaagctgtgttttaactgtgtcctaattgttcatatttaaaacaacttttgactggcttctaccttaagggacaatttgtattttaaaacaatggcaccgacagctgttaaagtgtgtgtgatattaaccatacaggttgcctttgttcatacaactggttaagtaattaagcacaggctagcatggggaacattgctaatgggaagcacctgtttatagactcttgcattgtaagctgtaggttaagtatcttttatcaaaatcataggcagtggtatatttctgtgatctggttctttgggaaatggagacatcatgcagggtgaatgaacgactgccatttctgcctcactgctgaaactagcgagcctgcatatcaagggtacctgggcttacttaagctggggagttggactgactaccctaaaacttccatcatcagcaagaaatacgtagcccagacccaagagatgggttgcacatgttaaaaacaaaaagagtagatacatggtcttagagtgattcagaaacaaaggcagatgacaggtaagtgtattctaagtcagcatatcagcaacaaagttcaggcagatcacaaacaactgcctcagaaaatgacagaggattgtccatcatgtgctcaaagttagagaaatggctgatgcctactattcttagtcataggcatatatgccacacatggagtagaaaggcacagagatgacaggtgatagtaatgaattgaccttgtagccaccatgccgtttaacagctagtttattctccaccaacccaaatggctgcttgagctctcaccctgccaaacactcctggcccaggttattgcaatctatgccttcatcggcttttctactgtcactcttgatactatctaggata

SEQ ID NO: 138319 - DNA, 3616 bp, Homo sapiens
ccaaggggactgtgcttgagagactgcttccatttcttttatcactctgacttcgcttaccaagaaaagtcatttattgctgattgcagaactcttgaactcagccgggcagctgccgcatgaactcctcagatctgagttccttgttacttatttacattttcatttgaagtgatttttcaggactatttgaaaacctttctcaacctaacatcatgtaatagcaaagatctaaaacttaccatgcttttggtcctttttctgtttgtcttacagataacagacgagtacctttggaaaggtcacgctctcgccacaatggagctatctcatctaagtgattcctgatgccaaagaatatgaaaatatttaagtaaaaacaaaatgatgcattttgagaagaacaaagtgtgcactcagcggctggaaaggaaataagtgcatttctgcaaagatcaagataagctggatgaagtagtgtgcatttgtaatactattgcaagactcctcccacaattattctaatctgaacacagttatcaggattacaaaatgtgttccattttagtgtaaagatgtgtatcatttgtaattgtgtgtgacctgactgtgatgatggaagtgtaagaaattgaagagttctaaggctttcaaaaacactcagtcaaaaatttaaaatcttaaatgtgtaagtcacccccaccaaaaacaaaagagaagaaaaagaatagaaagaattatccagtgtcagcttccaatccctagtacatatataatagaaaagggccaagaaaaatatgcatcttgatttggagagaggctaatattatgcacactgtaagagaagccattttggaaattcacgaaagtactgctccaccccagttgagttatttagaattttatctcaagtgaaagctgatggattcatctgctttggctgaaattaaacttatcattagtctagctagcatttcagcatgatattgcaagcacttctcattgctaaaaataaataaaccaaagtttaaccgaatcagttagggaaagtgatttaaactttatttaaagaggtattttctaattatgcacagatatctactttatacaaatactttatatggctatttttgagaaaaccctcacattttaatgtttatgctagggatgaacctgaaaattctattacgtttatttagatttcaaaggcaaatattgattcctatgctctgtggtttatttcttttttctattgcttctttctcccttgagtcccttgaaggcagggaatagacttctagaaaacctgagaggaaaaagaattctttttacaggaggcagcagaaaactgtctgaaaggtcaattgttttatctccctttccactctctttccaatttcactttggtggtctgaagaagaaaaagaaattttatgtatgtatgtgtaaatatgtgtatatatttctatctcttgctacaataattccaactaagtgaacttctcaattatcatcatacttacttaccttatattaacaaattaagatgatgctgccaaaacaagtctagcagggaaaacaggttctacatttttcttaaataaattagggagtaaaagttatacttaacttgtctgtctattattttaaaatatgcattgaaataatgtggtataacttctctggagtgcaattttaagtctaattcatgcagatgattgattgtgattattgtaagaaatttcttacatgtatatttcttatgtagaaaatactgtttctactcattcaaagcacattgtagatattcagagagaagaacaaatggctggcttggcaaatccccatctgagataaagtaaacaagtgaccagcagcccacagatgattcctttatatagatgtataatgattcaaactgctgcctttgcctccagtgcatccttacttaggtattatacttctttaaaaagctctgaagctgctacaatagaaaaatcaaaaagggtaacagtatctgaaatttcacagtcctatccgatctgaaaacacacatacacaaatgcacacacatgcacacacacatttaagggacatagcagtaacactgttttttaacaacaacaaaagtttaggttctaatttatgtaaatacctagtatgtgtatttttgactttacaaagtctttcttttctgaaatcttcgtggtatggcttttttaattcttttgacagcttatcagtctgtaggagaatgatcttgaaatgttaaccctgactaaaatttgggagcatatgccttgctatattatcaagctggtcaaggtagaaatactgatatgtatcatcaccttttccagatacaaacttgccttattttctagtttgtgaacaagaacgaatgaagtactattattgataacttatatatttttatttagagcaatcccacatgcttttcacaaacattaaaaaaaaaaacctttcagggtctttcatgaagttccaatagttgagtgagttaaaaggtttgtttcccagatttgtaatggtcctgctctagccatttgcagttttgttttagatgattggaaagtatatcaccaaaaaaagtatatagtgacatttttagtatgaaaccaaattacactaaggtcttttgttggccatattactgccacacatgagaagcaccatttatgcagattttcttcagaatatttttaaaaggtacagaatccttaaaatattaacaactaattgcatccatcatctcctttggctgctgtaacaaattaccaccaataatatgatggcttaacacaacagaaacttatttgcttacatttttgaagggcagcaaagccatgctccctccagaggctctagaggagaatctttccttgccacgtccaccttttggtggctattggcattttttggcttatggccacatttctctttctgctgtgtcttcacatcaccctcctctgtatacctaatctgcctctgcctctgtttaataaggatccttatgatgacttttagggactacccagattactccaggataatctcctcacctcatgagtcttaacttaattacatctgcaaggcccccttctccaaataagataaattcatggttttggggattaggatgtggctatgtcttttaggaagccactcttagcccaccagagtctgccctttggcccaaaatttatgtctgtctcatgtgtaaaagacattcatcccatcctaacattaccaaaagtctcaacccattatatcaatcctaagtccaaaatttcattcaaatatcatcggttcaaaagttccaaagcttatcatttagatcatctaaatcaggtatgagtgaaactctgggtatggtctttcctgaggccaaattcctcttcctctgagaaccagtgaaacagaaaagttaatctgctttcaaattacaatggtgggaacaggcataggataacagttacagacatttctgtctcaaaaaggagagaatggaaattggaatggagtctcctgtcccaatcattttcaaaatctagccaggcaaatttctgttatatttcaaggcctggcagtaatc

SEQ ID NO: 138320 - DNA, 1813 bp, Homo sapiens
ctaacactagacttgaaaatttcctcagctaaacatccaagttcatcatttattcaacttttcacactactgtagtagacaatttagatagataaactttttgccactatatgacaaggattccctttcttccattttccaataaaatcttcatttccttctaaaccatcactagaaatgcctttaacattcatactactaccatctggtaaaggcaatctagttttttctatcacagccaccaaaattcttctagtctctacccattatccaattccaaagcctttttcacattttaagacatttgttacagaagtacccaatccgtcccagttccacaatctgcattagattcccatggctgctgtaacaaattaccctctagcccagtggcttaaaacaatagaaatttattatcttgttgttttggaggccaaaagtccaaaattgaggggttggcagggctgaacgtcttctggagactctaagggaaacactcttcccgtgtcttccagtttcttgtggctgccatcattccttggtttgtgactgcatctccctctcctctgtcttcacatcacttcccctctgtatatataatctacctctgcctctctcttataaggacacttgtgacgggacttagggcccatccagattacccatgataattcccttattccaagattcttaattatatctgaaaggaccttttttccaaataaggtactatcacaggttccagggagtaggatattgaatatcttttttggggagggggcaccatgcagctcactacactattcattgcacacaaatgaatttttcactttttaagatgcattcttggtgctcaaaccagatcgaagtttgtctctaaaagctattgtctgcacaggctgctgcatgctctgttgttaaatggatggacaggctattctaaattttggttgatacttttgctactatgggcaattaacttgaaaaaaataatcgatcccaactctgtgctctgatgtacctcttctgccccttttatgacacctttgaccaaatgccttctatggttcacagtgcaggcacaaaactacctctgatacagaagggttctttacaagcttattttacataccgtgaatccctcacctaaagggagaggtgaaagcaaagactgctttgaatgggtattgagggagattgtgtccataccaagccaccctgaagaagtatttcacttgcagtagaactgtggatttgtgctgtcatttcaccttggaataaacacctatctctaagcaggaccaagaatgacttgcaatctatatgtaatggctacttacttattcaataaagttaagatatacgttaaatgttgtgctgcctatgataattaagattaaagacaagtgaaaaggcatgaactatcgggggggagaagcttcaaccaaacagaagtgcaggagtgcttttgtatgtgcctggtccagtggagatcatgggatcatattaaaaacatacttgtaggaatcataaggttttctttagcactgcttgccagagtagtggagatatggtacaactgaaaagtttagaaacatcagaagggtgatttacacgctccagagaaactgtttcaacagagaagtttttcgttttgttttgttttttgttctgttttggtattgagtatagaattaagcaagtgggcttcaaatgcttagaagggtaaaaatctggaatgagtaataaaaggactgtagattattattttctggagagccttcaatagaatagctcatcatgggtggggtga

SEQ ID NO: 138321 - DNA, 1009 bp, Homo sapiens
cattatacacacatgcactttgctctgactgttatggcctcactgcccagcctcaccctttttctcctatcaatccttcaaggaccaatgctgcctttctgaagcctttcttaatttttcttcccccactaaaataaattgtgttatctatgctcccacagcaatttgttcatacctctattctggcctttgtttcattctgccttctactacagttgtctgtgtccttgactaaagtgtaagttccttgatggcagtgacggtctcattcatctctgggcctttacacaaagcaattgctcaatgaattaatgtgtagtgtcaactctcagggaattaaacaaatgaaaaggaatgtttgctacaggtaatggaaaatcatagctaatttcctcatccaggtgagaacatagccttcatcactgtcctgggaactgaggacctgcctaaggtcagcattaaggacaaactccccgaactgtgtttagctggaagttgactttagaggagtactttcaggaggtgaggaaggattgaagacaagtaggaagtttttttcctccaaggtcaagcttttaacaagtgcctgcaatgtacactgagggatttggctgtactccaattatgctaatatgttttatatatgggcctccagcatccaggaaccacctccctcaacaatttaataagtgtaaatatcaaggcagagttgtaaatgtggaacttatttgtaatgtaccaaccttgttattatcaaatgtcacagggtataagtcatggcaattatgctgcctgctttttattacatttattttactttttaaaagtgcagtatatcctcataagcttctcctattctgccctacccaaggaacctagtgtgcctgtgtgttctggagtcacagaaggcagaaaatttagagtcacaggattaatgggcatccctagtaagaaagcgacctcgtgaatcattgactccacgcactgacaccatacctctacattaggc

SEQ ID NO: 138322 - DNA, 1017 bp, Homo sapiens
ggcaagctcccactcgaattagcacctgtggaaatgctgcctttcaaagacccagcttcatagcctccaagaagtcttcccagattctctcaactgaaagtcatctttcccatttccatgctataccatacacattattttagtatattaatacattttcaaatgttttgagtagataacacattcatttgtctcaaactcagagagggtaccgaaggatatgcatacaacattcccagcccgtcccccttcctagccaaactaattcctttccttagaggccaccaatgtcatttgatttttgtatgattttgcagataaatcttacatacatatacacatgtatgtaaacacacatttcttccatctctttttcaacaaatggcggcaaagtaaacgtgctgttctgtaccttacattttttgcatttactagtttaccgtagtgaccattccacatggaacgtacagtacatgaaatgtttcattgaactttccactgcgcattaaagatcattgtatttgtgtctgtctccctgacaagccttttaatttttgaagggtatacattttgtcttcttttccgtatcctcgcaaagctctgcatcctggactctggtgctatacacaatactcaataaatatttattaaattgctcaatcagaatgatcttcttaaaatgctcttttgcatttgacactctcacccccaggaaaataacattaacttctaattgcccacagcatactttctttctttcttactttcttttttttttttttttttttttgagacagagtctcactctgtcacccaggctggagtgcagtggcgccagcccagctcactgcaacctccgcctcctcggttcaagcaattctccttgcctcagcctcccgagtagctagaattacaggtatgcgccaccacgcccggctaatttttttgtatttttagtagagacagggttttgctatgttgaccaggctggtctcaaactcctgacaccttcacagt

SEQ ID NO: 138323 - DNA, 1005 bp, Homo sapiens
tcacttttagagaaactacattcttcatctttggcccttcgtgaactctgctccaccagtgatttcaatctcaaagtttcctgaagggctttggccagatgtgaccaacagctcatcatgagctgatatctggtatacggcctcaaacaataggaagaagatgatcattgtattcatgcaacatttatataggtgtctctctccagattctggcaagaaattgcaaaaaaatgaactattgcttttgaattggaaacaaagtacttggctgctaaaaatgtggcactgcagcccacttacaacagttgagggcattacaacagttggactctcttggtgtcattcctttaaagaaaagcattatcagcaagaagcaaatatgggtcattcttattaatatttccatactctaacttccttctgaggggcttggtgcattctaactcaattatctcacttatctttgagggcttttgattatcttgggtggggttgtgggacagggagggtcgacacacaagcacatatcctttaagagctcacagatgcttttacatctagcaacttgtttgagcctcgtaagtctatgaggtctacagagatgatcataccttatttgtgaaagaaccatgtttgaaagccagggcttccagcactacatcccaaataccccgagagctgtggctctcagcaccactgttgctgtagacagcattcactgttctttaacttccaaggatgtcagggtagccgtgcgcttgcaaagagggggcaccagggcttttttcttcccctgcttcatttgctctttatttcttacactctgactccttattgaaggtttgtggccctaaatgcagtttctttagctgtctctttccctccaaccccaggtagtattttagcctggatagttcccataggtatttctttatacctaaattcaaaagtgtttcttgacttccttaaacctatgcccttttatgatcaacatcttgcatgtcc

SEQ ID NO: 138324 - DNA, 1054 bp, Homo sapiens
aacaaacaaaaacagaacactaggtagactagctgttagcaatctgagaaatagaaaatgttttctatacaaccatcattgttaattgatacagtccaatgcccaataacttacccatttatgagatgtttatcaacaagctactatgaaagatacaaaaactgtaaaattattttttaagatgcatcctgagcaattcacattttgttaagggttttttaaaagcaaacaaaccaatctaccaggttatgagcatcatcttttaaaaaggcgctttcagcattgtcttatttgaaaagacaggcataaaacagtatctgattgtgctggagactgtggaaaacactgaataaggggataaatttgagcagaaataatgtttgagcctttgaagcaaaggcaacgttgaaagaaagaggtagtgcattgtacaactttgaatcccacatcttcatcctcttagcagatgccttgattccttgttttgttaaataaaagtaagctctcccttgtctctgaaatttctcaatgtcacccattcaattgtccttcttacctacttcaatgcaagaaagaagcccatctcattcaattccactctttccagaactatggaaatttgtctacttccatttcacgcccacatttcctacatcttcaatctcttccctgcactagcttattctgcttagcttttaagcatgatcaagtcttctcatatgctaaaaaacaataaaacaccaaaattccctatcttaattctgtgacttcttttaaggtgcttattcttaagctagaacttactgagctctcactatgttccaagcaactgttcctaactcaaactctttacatgagttatttcattttatcctcacatcaaccttacgaggtaagtaatattattcccaattgacagagcaaactgaggcttctgagcttaagcaacttacccaaaatcatgcaagtatttagtggtggagttggaatttgaatccataactaactccaaattctaagctcttaagctcttaaacactgcactgggatacat

SEQ ID NO: 138325 - DNA, 1050 bp, Homo sapiens
gaagctgcaatgagctatgattgcactattgcactccagcttgggcaagagtgagatcttgtctctaaagaagtttttttttaatttttttattatttatttatcatttttttgtaaaggctctgtcatcctagatgtataactgcatgtagaatgcatctgacttttaaatctacaccaagtcaaataactgatttgaactcttcagagaagtgacaagatgttgtaggtatcccactaatataggtttgagggacttaattctgtgggcgtctttatatgaaactttcaaaaacggtcctatgtttttcagagttgtagtatctcagtgttctatcttttggggaatagctcattggccttctgtgtcacctcatatttactagtaaagttgctttttcaaatggtttataagcacctagatgaagtccagcactttgtcagattattttctccatcacagaagccaaaatacaaagatttcagtctagtcaatctctgcttatctcagtcactgtcagcacctcttatttcttagtctcaattttccaggcagccttttgcttgatttccttgctccccatgcatcagcacaaatgatttatacttatgtacatcttgaaatctcttctttatggattgaattgaatcgagccccagtacaaaaatgaaaactccaggaactgttgtgattgcccaaattacaacttggattgtatgactgtacacgccacactctcatctatcataaatattaaattctcaagcacttatacttcaatatgttttaactttgtctgtttgaccagctcagcactaaagattccattgaagataattcaattgctttgaattctgaaaggggcatctttttaatctattttcatgttgcactgggagttaagtgaatttcaggtgcatagcctgtgaatgatgggagaggcctatgtgccatttggcatcacagaggccaaatattgggtgacatttgctaactaatgctgatcagtgaaatggtctaggacaagattggggttcatcagtcttttc

SEQ ID NO: 138326 - DNA, 1111 bp, Homo sapiens
ctgggattcttccatgggctgaatgaaacaaaatattgcttcaattatttagaaaagccgtttaaaatctcagttctgatcctgtctctgactcacaaagccagatgcttttccttggttaacaaaattacacagttttggtgtgtacagctggtcatggccaagacagtgtgtactagacatagtgaggttgtgtgtatttctaatattcagtccctcctggagagttcaactggcaaacccattcagaaaggagagaggcccacttacagctgaatacagaccaggccatttaacctgaatcagtcacaatgccctgcgtagggaaaatgacacttcttttcttttataccaaaggccactggactcggtggaatacttaggtccaatgaaatctatagaagagcagggatgattgatttgttcattcaactgatatttgttgagcctactctttgtaaggcactgctctaggctctggcgttagagagatgaaaaagacaagaaatgcacattctaaagtgtgagacaatcaagtaaataggtgatttgcaatatagagtaataaatgctaatatagggtgcaatgggacattctccattgctaggataataacattttgatatatttcctacattatctttatattttcctaattaattaattaatccattcaagaaagcaacatttattaagcaattatagcatagaatgataagtgctatgatgtggcaaatataagattctatagaaatttctctatattatgttacttacattgttctttatattatttcattaaaccattctttcatttgttcattaatttatcccattagcagttattatacatttagaatgtgccagataatgtactacttcccggggatcaaaaataataaaacacttgtttcttgaacccagggagcttacagaaatacagacaagtaaacaggtaatttcaattcagaataacatcctattcctgagcacgttacattcttactctccaggttgggacaaaagggtactacatagtaggttcctctgttgggttacctgtgtcaaacccagtccctttatgagctgtagatccagttacagggctta

SEQ ID NO: 138327 - DNA, 1115 bp, Homo sapiens
gcatttttacactgtgtggaggaacatatgctaaaggcagtgagacttatgtactcctttccaagtaacacactcagtctatgtggcaccccactaataggctttaagcggccagcattgcaggaggatgtgccattgccaaaagcccatcaccagctccaggagaatacttggcactcctgcatcatctcttttgttaacttgtaaacagccctgagctgttaactaaactaaactgtagtagcaacatgaaaaggagatggaggtaaatagccaggaggatattaggttaaatacatacctcatcaccagcaatgcttcttcctgtcttttgagcaacattgcctttaatctggtggaatgattggttcaaggataaactgatttgaggaataaattcaagatgaaacattctagattgtagtccttgaggtagctgatcccaaaaaatctcacacgcagctgaagctcaaatttcagtgattagtttaataaacattgggaagtgtaaacatttgggaataaagaactaggctaaaaagtgtgtgtcatatttttattggaataaaacaacattatgattgcactgaaggaaaacttttcaaacaaaggaacaaaaaatcatccacaagctctctaacacaggagctattttcacttttagatttccttttctagtctgcatgcaaatacatacacttttttttacatagttgcaactgaaataaacatagactttacagttgggcttttttcttatagcatcatatcataaacactgtcaatgtctccacataatcttaatagtctttttcaaggtttcatttgatgttttgtaattataaaatcaatattattataattttttttttttgaaactgagtctcgctctgtcgcccaggctggagtgcagtgacgcgatctcagctcactgcaagctctgcctcccgggttcatgccattctcctgcctctgcctcccaagtagctgggactacaggcgcctgccaccacgcctggctaattttttgtgttttcagtagagacagggtttcaccgtgttagccaggatggtcttgatctcctgacctcgtgatccccccgcctcggcctccc

SEQ ID NO: 138328 - DNA, 1026 bp, Homo sapiens
ctgaagttattctacaaacaatgggaattaattgaaaagttctaagtagaattccttttatgtttattaaaatctctctggctgctgtgagaagaatgaattgtaagggggcaagagttttaaaaggttgaccagttaggaggtaactgaaagagattatagtggcttggactaggaagtggtagcagagatggaaataagtaaacagatctgggacatattttaggtaaagcatatacttggtgatagattgaatatatagagaatgagagaaagggaagaacaaaaaataacatagattctggtttgtgcctttgggtggacagtggcaccattcactgggattaggaagcactgaggaggaccagtctggggtaagtgatgagcatagttttggacatgttaaacttgaacagtctatgaagtatccaacaggagttgtctagttggcagctgggcaaatgtgtctggagcttggaaaacaggtgcttgaatggaaatatagatatgggggccatttgcctttggatggcattcaaacctatgggagtctatgatatggtctaggaagagagttcaggacaaaaggagaaaagagctcaagactgagccccagggaatcttcacagttatttattttgagacatgctttcacaatggctttcattttataaaaaagatacacactcattataaaaataatggagaaatataaaaatacaaaaaagagaaaaaatcccttcaaatctgcaccaaccaagaatagccattattgtgcctcaattttcttatctgaaaaacaggaggatacaaacagtacctataggttgttgtgataacttaatgaggtaatccatttaaagtgcttattttgcctggcatggagtcttatgcccgtaatcccaacactttggaaggctgaggtgggaggattgctcgaacctaggagttcgagaccagcccgcgtaacacagggggacctctgtctctacaaacttttaaaattagccaggcatggtggcatgt

SEQ ID NO: 138329 - DNA, 1268 bp, Homo sapiens
agatcataagtggtcccttttttaacatgttttggcctggagagaggagaaacaaagaatcccaagaatgaccttattcgtgaggttccctggcaggtgcactctgctcctcaccaatattgacattttccttagtccttttcgtagttttcatttaccacaatcttaatcagttgttgagagtgtggctttcttggtaaaaagatgtttttggtgggcttttgttaaaaccgtaaactcatctggtctaataaggaaccagattttgggaagacatgtgtttcaatggcgttagtatttgactggtaaaatactgtgagaactgttgttggctgaattgatccctagggcacactttgcattttacttgagccactgactaggaacacataggaaggtcttcattagcaggaatagattagaatgtatgtaagcaaatacagatgttgaaatttgggtaacaagtacattaactttttttctttaattttaggacatttagggtcccccctgtgaattagaaagttgcttggctggagaactgacaacactacttactgatagaccaaaaaactacaccagtaggttgattcaatcaagatgtatgtagacctaaaactacaccaataggctgattcaatcaagatccgtgctcgcagtgggctgattcaatcaagatgtatgtttgctatgttctaagtccaccttctatcccattcatgttagatcgttgaaaccctgtatccctctgaaacactggaagagctagtaaattgtaaatgaagtaatactgtgttcctcttgactgttatttttcttagtagggggcctttggaaggcactgtgaatttgctattttgatgtagtgttacaagatggaaaattgattcctctgactttgctattgatgtagtgtgatagaaaattcacccctctgaactggctccttcccagtcaaggttatctggtttgattgtataatttgcaccaagaagttaaaatgttttatgactctctgttctgctgacaggcagagagtcacattgtgtaatttaatttcagtcagtcaatagatggcatccctcatcagggttgccagatggtgataacagtgtaaggccttgggtctaaggcatccacgactggaagggactactgatgttctgtgatacatcaggtttcagcacacaacttacatttctttgcctccaaattgaggcatttattatgatgttcatactttccctcttgtttgaaagtttctaatt

SEQ ID NO: 138330 - DNA, 1048 bp, Homo sapiens
tttcccatgtattttcttaggtcgcttttaacctcttcattcttttccttctctctagggcaccaggggccagggaggcccaatctcagagcgctgcgggctctgctggtgatagaaacaatatggtgaagttataaggagaggggaggggtggggggcgggaaagattccttaggatagaaaaaaaacaatgaagaaagctccacttgaagacctatgaaatttccgacactagaacctttgtatatagttttcggtaaccttcggcagggggcgctctgaaattgttgccactttccggacagcctcccatactttaccctctacaaaattgtacagtgtttccggcccttctcagttgtggacgctcgtaagttttcggcagtttccggggagactcggggactccgcgtctcgctctctgtgttccaatcgcccggtgcggtggtgcagggtctcgggctagtcatggcgtccccgtctcggagactgcagactaaaccagtcattacttgtttcaagagcgttctgctaatctacacttttattttctgggtgagagacgaaggcgcctggggccggcaggggatcccgggcttttagttgtggggggtgtgaccctgagcggcgggagctcaggtcgggaacggtgtggggtttgggcggccatcgcgcctgggaccccgacgccggcgaccagtgactgggccccgaacaaagagctcaggcatctcgccggcgctggggtcggagtgcgggacgaaggcagccgagaggctgagctgggacccagacgtaccagcgttcgagttcgatacgggaggcgaggtggggccttaagcccccagagcacgcagacggtgaccctggacctttgcaaaggcaagcaaggcttgcccggcccctttgagggctcacttgcataatagtgtctttcttttcactgcttcgtaagagaggagtgtttcgcaggtaagtatggtatgcctccactcccgccagtctatccttgggcttgcttttgtgtaccagtcctttgtaccctgtg

SEQ ID NO: 138331 - DNA, 2120 bp, Homo sapiens
gccacctggtgtcctgagatggcttgtaagtgaatgaatgaatgaactattaagatctcctcagaggaattttaaaaaggatcgaaacgattctgaattatctttttggctgaaataagttgtttttaaaaatacgtgtgattattttagagtaccatttgaaagggacatgacaaagtagttcagaatactttttaaacatctttcactacattcatcgtcattctcccttaaatgttgtatgtgtggaaatacataggaacctgttttaaaaattatattaaataacattgatattttttgtagtcactgatgagacttgcagatctttaggtaaataccagtgccaaagtatttatttgcaccaaagttaaggaaaatctaacacgtgtcagatcagtctgagaactaacatttgagagtacctacacattttgtatttagtttcagtggtatatttcctttgttaagaggtctgaagaaatacaatggaattgggattggagaacactattttgagtcttatatttgatgatataagtttactttctcactaaagatctatgttataaactcagaattttaatgttacctattttcttccttagtggggaacattccttatgaagctactgaagagcagttgaaggacatcttttctgaggttggacctgttgttagtttcaggtgagatccccttttccttcatggtgggagcttcttaaaaatcaccacagatttggctcttagtaataatggcaggttttctttactggtgacttttcacatacattttgttcttgtaacagctttattgagatataattgatacactatacaattgacatttattcttacctaaaatatgtttttttcgttaaaaatgttttttaggcagggcatagtgactcaagcctgtaatcccagcactttgggaggccgaggcaggcggatcacctggggtcaggagttcgagaccagcctgaccaatgtggtgaaaccttgtctctactaaaaatacaaaaattagccgccgtggtggcccatgcctgtagtcccagctactcaggaggctgagacaggagaattgcttgaacccgggaggcagagatagcagtgagccaagatcatgccactgcactccagcctgggcaacagagcaagactccatctcaggaaaaaaaaaaaaaaagttttaaaaaatatttctgtgaggctgtcagagatataaggttatttatgttacagtgggcccaattaaagcatggcaatgttagcaggaaccctgtatgtgtgtaacatttgttcctgacacttggttctgctctccagattggtatacgatagagagacaggaaagccaaagggttatggcttctgtgaataccaagaccaagagacagcacttagtgccatgcggaacctgaatgggcgcgaattcagtgggagagcacttcgagtggacaatgctgccagtgaaaagaacaaagaagagctgaagagtgagtacaaatccaacttggatgcagtatgagttagtaaagatgtaacaatgaagattttccatttctgatatgttttagaatatgctgaaatggttagccacgcagcttgtttattacttgactgacctgatgtgcctgagttaggcaagtattatatatatctttttaaaaactttttataaattttttttcaagtaattgtctgaaatttctatacccttgctctggatggagcagggcaaggcctcaaaccgtttcaaaactgttctggcaagcactgtagggatgcatagggtcactgcagacctaagcatgctggaggcttgctagtaagtgtatatctttaagaaacagataaagttgacattagaaattcttcagttgctccagcctgggcgacagagtgagactctgtctcaaaaaaaaaaaaaaaaaaaagaatttccattgctaaggagttatttccagttaaagatgaattcaaattcatcaagccattagtagtactaactgtggcattagtcattcctgtcactcttttcaggaatttttgaagttagcgtatttttctcttttaaccttttgtttctgaaatgacttgttaaaagaagtcaa

SEQ ID NO: 138332 - DNA, 1979 bp, Homo sapiens
gaaggtgggaggaggcattaggttatgaataaagcaaatcacatcaggttttcaaggagttacttgaattagttccctgagctcaaatagaaattgtctgtagaccaccatttcttgcaccttcaatattctgtatgtacacagtatattttacattttgtacaaagagctttctatttttgtacacaaacacagctatccaaacaatccagctggagttttgtggcccatagatgtcagatgtagatattaaaatttggcttttttcctaaatgataatatcacagtatttgaaatgcctctttcttctcttgcctgccatgaccaaggtttttttgtgccatgcaaaaactaatgataaagagcctcttgaatattacatttctcagaggggaatggctctaaatcactatcagtttctaagtcataagtattaaacctgaatctgcttatcttctcagctctgtgtccagaatagtccccaggaggcacggaacatgttacttcagaaccctcaactggcttatgctttgctgcaagcacaggtagtgatgagaattgtggatccggaaattgccctggtgagtgcttctggttcttttatggaaatggtcgggtaaaccttgaatgggataggaactacctgattgctttgttaaacagacagctcataggtttgtcttttcactttttagaaaattctgcatcgccagacaaatatcccaacgctgattgcaggcaaccctcagccagtccatggtgctgggcctggctcaggatccaatgtgtcaatgaaccagcagaatcctcaggcccctcaggcccagtctttggtagggctttatcccttaacatttttttgtatctgtcttagaatgtcattttctttttaggagaatatattgaaagaagaatggtcaggaaccagagatgataatttcaatttccaggcataaaagcaatttccaggttgcagagcacatgacatctgaatgaatatagattcgattccaagtttgtaaaacaaagagatccttcccgtatgcccttttcttataagctaactttgtgtgtatgtgcatgcctggcactgtggttggcacttcgttattccatatgcattatctcatttaatcctcaaagcaattgtatgaggttggcactcttattatctccattcttactgatgaaaaaagtaaagcttgctttcaaagcatgacacaaaaccttaaagccataaaaaattgatacatttgaaaactaaaaaatttctatataaagaaaaaaataagtatcaaagacatgacaaattgagaaaaagtatttaccacacatgtgatggaaaacagactaataaagagcccatagtcattcacaagaatgtttattgccttagagtgaaaaattggaaatgtcctaaatgtacgtcagtggaagaatggagaaaatgtgtggtacattcatccagtgaaatactgtacaacagttaaataaactacacgtatcaacatgaatgactttgaaaaacataattccatacagcagttaagatgaactaggatacataatatcaacacaactccaaaacagtgacatacggacatgaaactaagtgaatatggatgcattcccgaaatgtaggatatatgtttctgcataaatccccaaaatatgtggaatgagttgcaaaataatatattgagtatgtaatgattcatataaaattttgaaacattaagaagacgtcttagtggtcatcaaaggagaagagagcacaggatgcaattggggaagaccgtacaggccattggtttattttatttacttatttatttcctaagctgggtggctattttattttctatatgatttgtatatctgtaatttttcataataaattttaaaaggcctcctataaattagtaagaaaatttccaataacccagtagaaaaatgggaaatagacataaatatttcac

SEQ ID NO: 138333 - DNA, 1018 bp, Homo sapiens
tttgtgttccttaaacgtatatgtgattttttttatataacttggcttttattctttatttattgagctgtttctaattcaagggactactcagttttttggggaatgcacagatgaaaagatgacattctctttttctcaacgagttttaatgtagcatttaaaaaaatatatttcacattcccccaaaaccagaattatatctaaggacaggagtgagaaaagattggttaaattaaaaaaaaaatttaattttaaaaatgtggactaccagcagttgttttttttaaaagagtcccagtctccttttatgtttcttgggtttagggcttttttttttttttttttttactcttattggcagccccaatcatgaagttaacagtaggtgttatgtgctgccttgccacacagataagacttgtcaatctctacattgagaatatgttccatcttaaccgtgttccatataaccaggctcatgacgtatattgcttctgtggagtttaaagtgtgtgacaaatctaatgctgcataagacatgccatacaaaaaggatgtttagtagtgtatttggggctgttcatttgaagaggacttttaaggtcgtagacttagtatattgagtatccacagaggcatatacatactctgttttttttgcttggtcagggtggaatgcatgtcaatggcgcacctcctctgatgcaagcttctatgcagggtggagttccagcaccagggcaaatgccagctgctgtcacaggacctggccctggttccttagctcctggaggtaagtttcatttagtcttcaccatttcagtacttgctaaagttttgtcatagccactgttgcagtgcagccaaatatgataatgggatccttaggtaaaattaatacacagctagaaagtatatatcttaggtggaggaaatagtagatttcttacgttaaatcctgtatgtctaattataagaacagggaaagggacagtaaagtgaaagagcatagtaa

SEQ ID NO: 138334 - DNA, 4140 bp, Homo sapiens
tctgccctttatcttctaggaggaatgcaggctcaggttggaatgccaggaagtggaccagtgtccatggaacgggggcaaggtaaataaatattaatgtctgactaatgttaattggtcatggaagtgttccacatccacagtatctaatatggcagccactaaccacccatggctatttcaatattaagttaattaaaattaagtaaaatttaaaactcagttcctcagtcacaatagccacattccaagtgctcagtggccacaggtgactagtggataccatacaggacattacagatatagaacatttctatcatcgtaaaaagatctattggacagtgctggtctagactttccacctggtgattcagagtccagctctacaagaattgataatgaagcaagtggatcgtttgtttcctgattcctagtctaataattccactgacatgttctctctccctgtatggatatctgttgactgagtaaggaattttaataatgagcatgtaaatatgtggctgggtatgtagaagactagatttaaaccccagagaaaactgggagggaatcataggtctgtaacgcctacttaatgaacatatgttgtaccgtggctgtactgctatatacaacagtagctgctgctccaaaatctccatgttgtttcttcatgttactggagtttgaaggacaagaaagtgcagtggttcagttggaaacaatgttaggaggagagatcgtaagaaaagagaaggaactgagtgcatactatatgccaggcactttaattttcataaataatcttgtgagttaggtggcagcacctcagttttacaggcaaagagttggaagctcagaataagttactttctcaaggggacaaggtaagtaaatattaatgtatgagtaatgtggactggatttggtgctcttattttctcttccaactagtaagtggcagagctaagattcagaagtctttgactccagaatctgtcctctttctgtcactccacactgcctctgttaacttccaagcatattcttcagtgtcttctactcttattccttgggaataaaatgatgggaaagactgctttggacaagcatagagaagcttaaggttttttcttttgtagcatatggtttataagtggaacccatttaaaaagcaaaatattggccaggcgcagtggctcatgcctgtaatcccagcactttgggaggctgaggtgggtggattgcttgagctcagaggtttgaaactagcctagacaacatggcaaaaccccgtctctataaaaaatacaaaaactagttgggcaatggtggtgtgcacttgtggtcccagctacttgggaggccgaagtggaaggatcacttgagcccaacaggttgagactgcagtgagccataatcgggcaccactgcactccagcctgggcaacagagcaagaccctgtctcaaagaatatatatatatacacacacacacacatatatatacacacatacatacataaacattaatatacaagcctgtggtttttacactggggttggttgctgaagtgacagaattaactttttcttgttagaagtctgacagcaggacaaactccctggccaaatatctcatattttctctaagcatccaatgcttttgtgctattgtacatccctctatccccaccgcaccactgtcaatagatcatatatgttccccagagtatttctgcagtaatgagaaggtattagggtttcagtcatacttctgcctgtcatggggccagccctcaatccatcaggttttagctgtttaacgcatacttgcacaagacatcttcctattatagttatcttcacctttttgtcagaaattggcaaagggaagtgactcatgttttgagggtatttccaggatgtcttcatgcagagactaagtgagatgagctttcttttatagtttccttcagtacccagcagaggaagcaagagtcttttcgtgtgtgcctagtttgtcttacttttcctgaaatccatgctgcttttaatgctgaaaggagatggagatgtttgagaagatacttcttgcttccctgccatgtttgtttagtgtcggttcccatgtcatctcattagtctttgtttgctgttgtcatgatgtttattatcaaagacttgctgtggcagagtatttcttgtggagtgatattctctttcatcatgtaaagttcattcactgcatttccccatctgatacatttttgacagcagaaatttttgtgctttaaaatgtgacaaaaatagaattgccgtacttcagttatggccgtttcagaatgaatcttgccttccagattcagtgcagtttcttttatgttttgcttctgaaactacatttatgttctttgcataactagaagattcaaaactatcctttttatatatttttttcctaatgatttcataaggagacctaacggaaaactagtagcagaggtgaaaatcgaaaatgtcaggttattcccacctagatcaaaccagtgcccccatgggattccctttcaaaagctatctggtcaaaatggaactatttcagagacccaaaggagctagtgtagtttagggagattttgtagcctggagcaagccgatgaactcttggctttttaacttatatatgtaaatctcaatctccatgtgtgtgtgtttctgcgtgtgtatgcaagctattttaagtgtctgctctttctccttttgaacttactgcttacctaggaaccctacagcactcgcccgtgggacccgccgggcctgcatcaattgagcgagttcaaggtacccattgtatctgtgggtttccttttgcttgtggtgttcagggtgggacgttgagaggaaaagagctgcgtggcagtcatcctcgcgttcagaacccaaaagggtagtgtttttgggtttttgtttttttaattttttcctgttgaggccacaagcctaagattgacctcttcacacagggcagagaacatggatgatatgggcatctgtccgaggctgtactccctccctactggtgtcaggaggcttggatggaatagcagtctgtaaggagacagcgggttcttgcagagccatggcagtgttcacatatgccaagactctacctctgttttgtgactctggtccttgaactaagattgattagaaggaaaaccaggagcataagtttctccaggtcgcagtgctagtccttggcaggttgctccccagtttgctctttatataattccatccatacctctgacatggcacagattctgcctacaccctgcttctgttcttgagctgcaagaggattctgctgtggtgaggtttcacccactctaaggtgtctgaattatgttgtcagtggtatatagagtcatttcttgtttgcttatgtgtctttcacagcagtaactccccgtttgtttccctgtcagtgccgatgcaagaccccagagcagctatgcagcggggatccttgcctgcgaatgtcccaacccctcgaggcttgttaggagatgctccgaatgatccacggggaggcactttactttctgtaactggagaggtagagcctaggtaagcactaacatagaaggaaacagttgaagaaatcagaattgtcccttcttccctgagaacaaaatctttctgtaccagttgtacctgtttgcctacttcaaaaggtagatcaatattcatggccactgtccaagggtaagcacttctcctaaggcagaactatgtacttgagtatgtcattttgagctattatatttttagaaattggaaattttagtatacatacttgaacagggaaatttatagtagtggaaatattaataatagcaataataggccgggtgcagtggctgacgcctataatcccagtactttgggaggccaaggtgggtggatcacttgaggtcaggagttcgagacctgcctggcctacatggtgaaatcccatctctactaaaaatagaaaaattagccgggcgtggtggcgggcgcctataattacagctactggggaggctgaggcaggagaatcgcttgaacccaggaggtggaggttgcagt

SEQ ID NO: 138335 - DNA, 1031 bp, Homo sapiens
catgtccctggccatgagagccgaggaccacccccacatgaactgaggggagggccattacccgagcccagacctctaatggcagaaccaagaggacccatgctagatcagaggggtccacccttggatggcagaggtaaggggagatcacattgcaaatgccataatgaactcaactgtcttaggctctaatctgggataaagaatgctggaacagtaggtttgcaagcatctttaaggtttatccacaaatctgagaaactggggaggagacaatagtctcatatgttaatagctgaggggacaaatgtgactagaagagatttctatctttcttggattgttcatcattcttgcagtacatgcaagtagctacataatggttttgttacatttttctttataggtggaagggatccccgaggaatagatgcacgagggatggaggcccgagccatggaggcaagagggttagatgccagaggattagaggcccgtgcaatggaggcccgtgcgatggaagctcgtgcaatggaggcccgagcgatggaggcccgtgcaatggaagtccgagggatggaggccagaggcatggataccagaggcccagtgcctggccccagaggacctatacctagtggaatgcagggtcccagtccaattaacatgggggcggttgtcccccagggatccagacaggtatgtgtaacactgacttctggcatccaagtgaaatcttgatctattcaggaattgattattgagcctaattattactgccttctgacttgggctgtttcttagcttgttagaaagggaagacttggatctccctgtagcttctctgtcccttagggtggtgattttctggctatcaggattgtagttcaaaaaaaaacaaccttatcccacaataaatagctattcatttggagcagagcccctgaaaatttaggggttagaaagtagtcttgattggggtacaaaccaacatcatgtacacggttttttccaagatatacttgcccgga

SEQ ID NO: 138336 - DNA, 2082 bp, Homo sapiens
cttctctcttctttttttatgtgtcttcctccccatgtctgtgtgtatgagagagagaaagataatggcagagctggaatggaatacatcaatcatctaattccctcagtttatagatttggaaattaaggcccaagaattcaggtgacttgaccaaattcacatgactaaaaagtggcagagcaaggaacagaagccactactttttccactttactactctgtcctgttatctgcacatttgtgtgtgtgtatatgtgtggatatgtgtctaccccctcctctgtaatatgaaatacaaatagagggtttttttgctatgtgtagaataaaactgttctctattgtgtttgaagtgtttgtgggccttgatttttattgtactctctatggtcagtagcctagtaacagaaatggtttttatgcattcattctgtcactcagcaaatatttattgagcacctactatgtaccaaacatagatctaggtacgggggatactgcagtgtgaacagaacaaagccccttcccccatgggcttacattctagttgggaagacagataacaaacaaataactacataatgcgcttacataattttactggtagttctatgatgcaagacattgcaagtaagggttggaagaacatttctggataatattttgctcctttctctctgctggtacttgaacttattaccctaatactaggtttataccatttttattagtagattcgataaagccaattagatctgaggcaagagaaaatacaaattttatcttcaaacctttaaaaaaattttaaattaatatattaacttataaatatatatattcgttcatctataaaagatatatgtattaagaacttcaagccaggcatggtgacatgcacctgtagtgccagcactctggaggctggggcaggaagaccatttaagtctaggaacttgaggctgtggtgcattctgatcgcacctgtgactagccactgcactccagcctgggcagcatattagactcccatctttaaaaaaaaaaaaaaagccagggtagaatcctgtagtcccagctactctggaggctaaggcaggaggatcagtagagcccaggagttggaggcccgcctacacaagatagtgagaccacatcttaaactaaaaggaaccttgcttcctctcctatgcttgtctcccctgtggccctctaggtcctgtagataatcacttttattagatttttcatgttactttctggaaaacatgaatatatattatttttcccctttcactgttctataccttttttttttttaacttaacaacatgtccttaattcatacttttaaattagattttaaaattaactctagtccacttagttagaaacttgtgggcaaaaggcttattattactagggtgattatataatttatcatctaaaggagaacatgaaagaaagtgctgttactttacttggaggcaaaaacataaactgggactatcttagggaaaccaagatgtatggtcacttttgctagtacttgtctgcctagaacaagcacacctagaaacttaaaatggccgttattgagtggttagatcacaattacagtacctcagattaaagcttcaaaaagattatactcaattccgaattgtgctgctataaactcatgtgaccaaacaccacctgttccccaataacctatggaaataaaaaattttaaaaaaaaagattatactcataggtgtttcagacccataatagctcgttaatgttcagactggtctctggaaacttgtctctggtttcagtattgataatgaacagaacagtgataatattctagcagtctatacaaatctgtactaatgtttcatctatccattgtctttgggaaatgagttaatgcatgtaagtgaatgttccagataatagaactattctaccaagttttttaacttttttaataaaaaattataaaaagtatttgatatttcctttcttgaacaggatacaaaaaaatagtttaatcagttttgactactcaaggtcatcattgaatagattcat

SEQ ID NO: 138337 - DNA, 1197 bp, Homo sapiens
gtcttgcaaagggttgaactcattgaagatcttaagtaccagtaagtatgatatcactgtacttggttttttcactccagtcagtcatattttttggtctacatttagcagaaagcatctgccatatgttctctatggaaagctataaacagcaaatgttgggctaatagcagtctttttcctggaggccttcccattgcctttctgcctctctgacattatgaacatctctgcctcacttgtgggatagggccctttgggacaaactacctgtatctgattgaactagggtagggggtggccctgtgaatgtaacttccccagtggaccagcatacattttctctagactctgttggctttcatttgtatttccagtgagcactagtttccagggtgttctcagttttcactgtgcttatttggctgaattttgattaattcagtggtatccagttgtgctgtgtaatatttgttgatgatgctggaggtgttgtaagcaagtatgtcgaacttgctagttgatctctggctaaaccctgccttctgctattgctaacagtagaaaatgatcttcagagtcattgatttgctttttttactcatatctgtatagagatcataatttgtcacattattactgaattcaggttacctatacattaaaaatgccaaaaatctctcttttctctttgtacacataggtcccagtcatgcagggaacaggaatgcaaggagcaagtatacagggtggaagccagcctggcggctttagtcccgggcagaaccaagtcactccacaggatcatgagaaggtaagcaacactgtctgactgcctccttatgcacaattctagcctttttgattcctcttttcacagttaccatgtgacgatcctgggtcttcaaagtccctttggaggtgatgtttattctaacttagaactcttttatgatcttgttacctgaaaatttgtgagtctggtcctgaagttcctaatggatgtgaagttcttaagtggatgtaaatggcagcttattttatatttcacactcatctgccaatagcaggtttttcttgttcaggccagattgacctgaaaatccacaccctttttccttccctttctactttatccctaaaaacaatagtagattccccatgattatatctttctgtttttatatttgaccattg

SEQ ID NO: 138338 - DNA, 1050 bp, Homo sapiens
ccagcctaagcaacatagtgagaccccatctttacaaaaattttttaaaaaattagccaggcatggtgagatgcgcctatagttccagctacttgtgaggccgaggtgggaggactggttgagtccaggaggtcagggctgcagtaagccatgattatgccactgcactctagcctgggtcacagagtgagactctgtgtcaaaaaaaaaaaaaaaaaaggatccaggtaacctgcttcataaataatcatgtgacaacttgattacacatacatgtatcagtgtttcttttttaaaaaaaatttccccagcattttgtattttataaacagttcttttttctaaaaacagtttaaaattcatgttgccccactatcaggtaggacagcacaatttaaatttctactttttaccccatccatattataattcctattcttatgttatataatagtgaactcatttaactattaataattaccactcttacaaaatatatcattttaatccatacttgtgatgtctttaaacatttaaactgcgactatgcatcatatatgtatttagaccttaaatgaattaatgagaagctatcatagatagaaggctcagtagacttttggtaccttaacgttttattccacaaaccccacatattctttttttttagtaaaagtatagactacctattacattcagaggaataaataaaaattatttcttttactaatttacttaagccagagaaggcattccctacaatgtgagaaaattactccttactgtttctggatagtagaggtagaaatgtttctgaaatttctttcattatagttttgcttataggatgtttaatttaaggccttgcatattaaccacaaggcaaagtttttgtctatttttttaccttttatttttaaataatcatagactcaaggaaagttggaaaaatagtacaaggagtctcatgtacccttcacccagtgtagtgcaaaaccaagaaattgacattggcacattactgttaacttgactgcaaactcagttttc

SEQ ID NO: 138339 - DNA, 2282 bp, Homo sapiens
taatctatgggtcttattgcctagtatttctctctctcgccgcgccgccgcctcctcctctccccccaccccaaccccatctctctcgtagtggcattaaggaggaacatggtttctctctatcaggccaacctcaagaggttaagagttgccttaataatcagtaaagttctactggaactacttttgagccaatttatattcttggaattctatcccctgggttaggattatggtcaggtgaattaaaagcctggcataggcttagagaatgtaatagcatattgcttacatgtcaagcaaaagaatgcaaagataatcaactttttgagtgacaatgaaattgagggattttctactcatataaacatttataagaaatttgttgattaaggtatttcatattacaactttgcaagaaaaacttgctcaaagcaggtgaggagctttctgtgtatcctgctcatccccagttcaacttggatgttggctatgcataggatttattatattcattaccatgaatataatcacgaatttatgcctactcccataaatattcaagccttgggatattgattttggcagccatcatatcttgaagtgagtgtgtcaatatatttagacatggagaccaagagtgatgcctttctcattaggaactcgttgtaagtttcaagattccaaatcaaggtcattgaagatgaagttgtcatttggtcagtagttgtctaataagaatcatgtcttcaaggtttcattgtgcattttcccaaagccttattaaacctgaattagctgaaatccgggtgaacaaattggcaacagcagtggtatccctccctatgtaaacaaccatcagtattgttttactgttgtaataaatgaaacatgattagccaccatgagttcatgacctacctttattgtgctcagactagtgacaaaaaaaaaccaaaaacagttttatccctcaagccgtagaggttcctaaactattagaaacaaccatttgttcattcgtggtcacttaatggtagaaaaaatagataatataatgctaattcagtacaaccattcttctaatctataatgagttgaattgtctgggcacaatgaagtgtgaggtttctctcttaagagccctgggcttctctccttctagggattcactgtgacgactaacatcccagagccagtgtggtccttgtaggccgaggttgggtagatggcagaaataaaaagcattctgatagagaatgaaggcattttgcttatgttattagctgaatgattccttagcgatataggtaggagtccacaaaaatctatgaaaattataaattgttattttttaaactagacattaataaactcccttaatagtgataaagagctcctcttgactaaataagtcatcctaacatggagttcaagttttcacaatcgcttttaacagaataatacaagatgacagtatagctgacttgcaattataatacaatttcaattacaatgagcatactttctagattttctttcccaaatggagagcccaaaaagaagtaacaaaagactcattcatcaagtgaagaagaaaatcctttattttttgatgagcaaaaataagaataaattgctgttcacactggataagaccatatcaaaagtgacagtaaacatgtacactgttggtgttatatggggatggggttctcggtaattttgtttattatttatgtttattattatgttttatcattaattattcaataaatttttatttaaaaagtcaccctacttagaaatcttctgtgggggtgggagggacaaaagattacaaaccaaaactcaggagatggtaacactggaattgataaaatcacctgggattagttgtataactctgaaccaccaaacctctgctatcaagccttgctacagtcatggctgtccagaaagatttacagttatttttctgagaaaggatccatgggctttaagaacttcagaactttaagaacttcagaagttcttaagttgctgaagctcaagtaacgaagttgaatgcaatcaaaaaaagaataccagggagtcaaggcttgagaggcacattcttatcctaaagtgactgctcaaacctgacgagaccaagtaaattactgaagatacaaagagacaaaatgcagattaccgtccttattcctataactcaaaaattttctttgttgaagtagaattgaacctttctaggatccagactggaatatcggtgacagcat

SEQ ID NO: 138340 - DNA, 1097 bp, Homo sapiens
catatttaaatgtgctgcaacgaggaaaaaatgttttctctaaaaagaattcatcctatacagatagccaccacagaatatggaactgtgaaattatagtcctatattttcaattcacttgccaattttagctttaagaaatctctgtgattcaaataagcaagtagtgggaaccaatgtggaaatgcaggatctctgagatgagcagaggaaatttactcagaagtggaacaggctgtctgtaccaaaaacagtcagggtgtgagtcagcagagggagaaaacacaggtcatgtggaaaagccagaaatggaaaacagtagggcagcttttgttcaccacattgcctgacattcttagccattatagatactaggcagatcttgtcctggcttattaaactaacatcacatgttcctgggtttacgatataaggaaaaatcaattttgtgcttcatagataattacaaaaaggccaagaaattgttaaccttaacccatacccctccttttagaaagtctttgacaggcacacaatgtaaggctggccagtcagcagaagtgcaacaaaaattgcctggctgctgctgtcagctcctctgctacaacattgtcacactccatagcagtcccaagttcatgaagtagactcagagaccggttgtacagagttgaggagagaagtcagatttagctgccatggagttaagcatattctgtccagcttatacctagtaaggcctgttttttggggctaaatgcttctttgaagcattgattccttgtctcctttgctagcagcttctactgctggatcaggttgttcttgatttatgctgcctggccacccaaggaaatcagcttaaaattttgctcctctgaagttctcccttctcaaatatctacctgtttaaaaattttgctccaagaggtttgctagtcttgactaaatttattcaatttttaaagacatcttaaatagaattggttaaaaattttaagtgtttttattatacaactcttatgtgcttataactgcaatattagaaaatacagaaaagaataaaataccatctgtaattgtacctctaagtatga

SEQ ID NO: 138341 - DNA, 1049 bp, Homo sapiens
ggggatatatggaaaatcttcctaccttcctttcagttttgctgtgaacctaaaactgctcttaaaagtagtcttttttaaaagaaaaacctggaatataacattattggatgaaacaatcaattatgttaatattgacaattgatttaatagaactgtcttggctctaaaattgtaattttaaatgcatctttgtagaaatgaaactatatcttaaactatatgttcattaaattattttttaaaagacaccactattttggttcttattgccctgtagaacattaaccagctttgattctaatttagcaatcttattttagcattcctttggtgtttttactgactatatataaaatacctgttttcatatcctcttttgagttggctgccaccttactggtttcctcctcaatgagttaaataaatctttgatacatatgaattctctatttgtatgaaacttatgtttatttgttttagatttattttgagaatcatatgttaacaatgatcccatttttgtaaaatacaaaaccaacaatatgggggggtagaggaaaatgtttcaagcttttttcagcagttctgtttgggaaggtgggagagaatactagagatttctcctgtgtttagtgttttgcaacatttagattttgtataaatttacacgatatttgtaatcagaaaaatacattgctttaaaaagtaaatatgtatgaaaatgattcacacacagtgtgtgccctcaacaagtttaagatctggctaaagatagagacatgcttcattcaactaaatagaaatacaaggccagttatgatagatgcctttgaaggaagagggctatcatctgttgagtgcttatgagataccaagggccatcttggatcattaatatagattcattttatcatcacaatgactctgtgaggtagattctgtctctctttttcatataaaaaagctgaagctgagagtaacttgcccacggtcacacagctactaagacaaagagccagaatttaagccctggtcttattccaaag

SEQ ID NO: 138342 - DNA, 1319 bp, Homo sapiens
aaattttccttctgtatattctccccagcttcctcagtgacttaacatcctgggaatgcagagagtttaggggtgtggagtagtttctgacctgaaaaacctgctgccctcacccaaggagaaaagactctagtgatacattatgtaaatgaacccttagaacttcctacagatggtggccttttggttctgtaaaaatcctccagatacacaggagaagatggaattgtgaaatatggtagtggggcagggaacttgctcccttccatttgcaaacacttttaaaattgactactctcttcttactttctgaaatctttttttaaccattttaatgtttgcaatttaataaatctcttgatgattgcagacatataaggctgtttggtggtattcagaaacatcacagtaatggcagttttttcaattggtttgtagtcctcaataattatatattaaattgctgtcaaaccagtaagactgcatttatgcatccatcattttcaggattgttggtaacctgggcatattttccccaaataactttgcctctttgcgtcacaagtcccagtttgctcacatttacctcaatgacagtacctttggtaataacacccaaagttgtatacagtgggaatgagggattcttctttacaccaagtattggtaagcaaaaggtggctttcagttcaggatgtgttacatgggctttcttgaaatgcaagcccattggcctgatgagtctttcatatttaggtggttttcttataaagccatctccaacaaagcagactttagtaaccatcctcttccatgccttcttctttctctttcctgttcgaataacttttaatacttttgtttctccttgggcacatacttcaggcagagggacttcccattttcccaccttctcttttcgtttctgtttaatcatattggaaagtactgtagctcgagattgtgcctctctgtccagcagataggcaggtactgatccccgtggagtcttttcattattcttgtgtttggtgtttctcttttcatgcatcttgatagtctttttcatttgtattttctcagcatggcacggtttatggtaaagcttagccttcagaccatcattttctttgccttctttgaacgttcgtagcctctcgactttccttctttctctttttctcatggtaatccaaacgatatccatagcgtttacagtgtaattcaatatattcgttctgtggcatggtgaaggccgcagagttgccagtagcagcctctggggtgcgaaaatgctctcaattttcaggtctcagaga

SEQ ID NO: 138343 - DNA, 1042 bp, Homo sapiens
tgtgattgaatgtttttgtcacttccctgtataatccagagggttttcagttgtgagcaacagaaattgactggctaatttaggcagaaaacgtatatattgaaagcatattgaatagctcacaaaatcaccagctggactggagaactagactcaggcctatatagccaacatcacagctgccactgttactaccaccaagaggagaaagggactctccctggactacatgatgactcaatggacaagctaagagttgaaagcaacaggaaagttcacgaatcttgggccattaccagatcacctccctagcactagtgagtgcctaccaccaccactctaactgccatcagtgttaactcagattctccaaggagcagatactaagatggaattagatatgcaagagattgattgagggaaatgcccatgacagaaagcgtgagaactggaagaggctggaagaactgtcagactgcaatgtaaatctgacatttatggataagagaaggcaagaagaagtttcggaaggaagagtcttggcctgaagagcagttctaataaaatttgccctagctgatgggagtcctttagccaaagctgcctattggaatagttctgtcttccggaaatggatctgacttagtatcactgctgtgctcagtcactggctggaagcaatgtggcctcaaagaaaagctgcgaatattgggctgaatttagaacctagcagctagctagggccaaggtcatttacattccccatgctgggagaactgaaaggcacattttcgtagctgtctcaatcagagattttccactgctttgggtcgctggctcccagtccaagggatggatccttggattgggtgagccaaggtcatgtgcctgtgttctgactgcaagggggacctgcttcccaccaagattcctaagccccctctcccaaataaaggggttcatatgctggacagcaacccccacaaaggacaaatgtccactatactgtgtgacctccttaagagcaaagatctttgtcttg

SEQ ID NO: 138344 - DNA, 1564 bp, Homo sapiens
ctctagctgccctgaaaaagccatcattgttattagggaagcaaggcatatactcttgagaccagttaaataccaaaagaattggggtcagacagtagagacttaattattcagaaaacaaatatccactgggccggagaatttaaagagagtcttataaagtaagtgaaacttgggcttgagctagagggatgtacagtggataggagaaaagaaggcaagaggttattctgatgggttggagggggtgggcaaatgtttgcagttaaaaaatatctcctacatgagaagtttgaggacaatgactattctaaaatagagcactcatattgggagttaggcgtgtttgggccaggtcatggacagtcttgaatgctatcacacagagtttgggctgtccacataggctgatgttttgccaggcttgcttaaaacatagattctcaggccccaccttgacctactacatcaaattttctgggttggagcctaagaaatcagtattttgagcaagctccccagatgttgatgatgcacattcaagtttgagatctattagatagacagaaaggagcccatgggagcttttgctgaagggagtgatgtgataatagcagtatctttggaagctcaatagggtgggacagtgtaggatgtagaaactagagtaaggaaaccagttaggtgactgttaaagtagttcagatatgaacttcacaaattcagattttctttctggctggtacccttggaattgtcaaattgactcctaaaatttccctgcaggccatattttaattttcaacacaatttgtttgctgttttaaatgactagggcccagggaccaaagcctgacttccttggttcaaatctgagctctactacctaagtgattttagcttagacaagttttcataacttttctgcgtttcaacttccttttctataaattggagatgattatagctcctaaatcataaggacattgcaggtgttaaattagatcataaagggctcacaacagtacttggcacatagtaagcactcaataaatgttggtattaatattatttaaactaaagagccccttagtttattacaatttgtataatagttaaaaccagtcaattacctttcacacacacaaaaacatgttaaatgtgcccatttggtatgttaaaactgagtgctaggctttttgctgaatgagttgtatttcaaagcatagtgcttcagttaattttatatatgattatccttcataaaataagtctaaacaggatgaattgtttttcccactgattgtgttaatctgtgattagttcttggctatgaatgatatatctttttaaactttgtcctttttagattgctactagctttcagtggatgctatttgtgatatttatttctgaagaaaagaatggacactcttttgctcttcagggggactgatagtggaaataaaatttgatttgttatctgggcatgtggcctggtgtcagctgatcccatgacttaccctggaggtgtggcaacaggtttctgaaggggtgagaaagt

SEQ ID NO: 138345 - DNA, 1066 bp, Homo sapiens
tctttactcgataagcagcctcctagaagacagcaggctatttgttaaggctgaagtttcagaaactttcaggtttggcatattgctacattgcagaccctgggagcattacagtggaaaccaatctttggtttgtgaataggaagaatctattaggcctctggtctgaggcagattttttttttgagatagagtctcactcttgcccaggctggagtgtcgtggcgtgatctcagctcactgcaacctccgcctcccgggttcaagtgattctcgtgcctcagcttccccagtagctaggattaaaggtgcgtgccaccatgcccggctaatttttgtatttttggtagagacagggtttcaccatgttggccaggctggtctcaaactcctgacctcaagtgatccacccgcctcggcctctcaaagtgctgggattataggcgtgagccaccacaccccgccgcggctgacttaaccttagatttcagattccctttcaatcatgcccgtttgcttgggtttgaccactccccactcctggatctggactgtttcttcctgttgctgtcagccttggttctagtttatagtcttgtctcctccgtttctgcttatggtgtggacaaatgaccttttttaagcagctggtaataattttacattgactggagcctgtgcatttgctcagagatgctacaatttttagatatttctaagacttctggattcttgaggtagttaaggattaaaaccagaaacagtcgaggttttttaaaagcagggtaagccatgaagtgaatacagggtgactgagtgatcatcagatgagattaattcttttgggttttcttggttttaaggcatctcgaatgccccttgaaaatgtagttttccctggtggtgggcacctgtaatcccagctactcgggaggctgaggcaggataattgcttgaacctgggaggtggaggttgcagtgagctgaaattgtgccactgcactccagcctgggtgacagagtgagacaccatctcaaaaaaaaaaaaaaaaagaaaatgtagtta

SEQ ID NO: 138346 - DNA, 1048 bp, Homo sapiens
ggtaaaaccccatctctactaaaaatacaaaattagccggtcgtggtggcaggcgcctgtaatccaagctactcgggaggctgaggcagagaattgcttgaacccgggaggtggaggttgcagtgtgccgagatcgcaccactgcattctggtctgggtgacagagtgagactctgtcgcaaaagaaaaaaaaaaaggtgtaaacactagttgctcaagctgaaaggcttactgagatattccaagggaaagtactttggaaaaaatgaagtgggtctgtccaaaagcacttctttccttgttacttggagtgatgctagatccaaagggaagatggcagagcccttggctcctgtgcgtttctgtgaagctgaagctttcccttactgctgggcttgagttatgtcctgtgggcctgtcttccataggcatcaccaactctgaatttcatactggtcaagcagagaagattttgccagggctgctaaagtcaaaggaagatggacagtcaattgttgctgtggtgaacccagcccgtgccggactgcgtaaggatgaacagctattttgatgttcccagtattgtccatcaactttggttcttcttttccacaccatgctacgggtgctcccagtgggctggctctgaacctgtttcccctctatttctaatcaatcctgagttctggtcagttggaagtttgtgataacagagaccatggtagttaattatactaatagcaaggtgtttcttccttcagattacaaggtgattcaagccattcgaaacttcagggccatccacacgctagtttttgtttcctgcaagctccatggtgaatccactaggaatgtcattgagtaagtcttgacttctgtttaaaattttttgttctgattatcaaagccattcatgcttattgtacacacaattggaaagtgatttgagctttcaagtcattagaagtgtaaagaaactgaaacaaaaaaaataccacctttaagactcaattacagggctgggtcagggatgaggcaagtcaggtac

SEQ ID NO: 138347 - DNA, 1048 bp, Homo sapiens
gagcagagatctcgccactgcactccagcctgggtgacagagtgagactccgtctcaaaaaaaaacaaaaaaataaaaaaacaaaaagtttaggccaggcatggtggctcacccctgtaatcctagcactttgggaggctgaggcaggtggatcgcttaagcccaggagtttgagaccagcctgggcaacataacgaaaccccatctctactaaaaatacaaaaaataagccaggtttggtggcgtgtgcttgtagtcccagctacttgggaggctgaagtggaaggatcacctgagcttgggaaatcaaggctgcagtgagccaagatcttactactgcactccagattgggtgacgagagtgagaccctctctctaaaaaaaattaaaaaagtatttagttcttcattcccactgaccacatttcaagtgctcagtaaccacatatagctagtggccactgtatacgtagaacacagggcaaacagaacatttccattgtggaaagctctgctgggcagaactgacatataccttgagtgttcagtctgaaaggtcagataaaatgatgagcttgcacaagagctcattcttgacctttcctcattacctttttaggtctgtttttgttccttcattctgggttcctcatctgttgagaccatgagccaagaatctgtgggacactcttcttttgtcctgtttgtttaccattctttgcggtgaagctacaaaagtatttcatttctttttttttttttttttttttttgagacggagtttcgctcttgttggccaggctggagtagtgcaatggtgtgatctcggctcaccacaacctccacctcctgggttcaagcgaatctcctgcctcagcctcccgagtagctgggattacaggcatgcacaaccacgcccctctaatttttgtattttcaatagagacaggatttcttcatgttggtcaggctggtctcgaactcctaacctcaggtgatccacgcacctcggcctcccaaagtgctgggattacaggcgtgagccaccg

SEQ ID NO: 138348 - DNA, 1094 bp, Homo sapiens
ctgccctaagatgcaatctgggaagggtccactttgactggtacgatcaagcatgccagcttcctctttaggtgggcattacatgacagtggaaagtagaataggtcgggagttcaagaccaggctgaccaacatggagaagccccatctctactaaaaatacaaaattagccaggcatggtggcgcatgcctgtaatcccagctactctggtggctgaggcaagagaatcacttgaacctgggaggcggaggttgtgctgaaccgagatcacaccattgcactccagcctgggcaacaagagggaaactccatctcaaaaaaaaaaaaaaaaaaaaaaaagaaggtgtttagcattcatgtggcaatttggcaattaaatatgtaatggctttttattacatttaaacaatgatctatgattcacacaggctttatttcttacagagattcagaaaaatcacacatgagtcagtacattttgcagcacttatgtaggctttatggtttaagatagcaaccaggctgagattttttgccaaaatatatttttatcagtgctttcttctgctttcatatagttttttttccttgtaaatcttattgaagtataacatatatactgaaacatgcacatagcataagtatgcagctcaaggaattttcagaacattcccatgtaacccagcactcatattaagaaaaagcacattgccaggtgctgtggctcacgcctgtaatcccagcactttgggaggccaaggtgggtggatcacctgaggtcaggagttcgagaccagcctgggcgacatggcaaaaccccgtttctactaaaaatacaaaaattagctgggcttagtggtgggtacctgtaatcccagctacctgggaggctgaagcaggagaattgcttgaacccaggaggcagaggttgcagtgagccaagattgcactactgcactacagcctggacgacagagttagactccatctcaaaaaacaaacaaacaaacaacacaaaacaaaaagaaaaaaaacaaaaaaaaccccacatgaccagcaccccagaaaccttcctcatggccccttccagtt

SEQ ID NO: 138349 - DNA, 1087 bp, Homo sapiens
cctctcaaacgctacgcccatgctctggtgtttggaatcctgctcacttgccgcctgctgattgctcgcaagcccgaagaccggtcttctgagaagaagcctttgccagggaatgctgaggagcaaccctccttatatgagaaggcccctcagggcaaagtgaaggtgtcatagaaaagtggaagtgcaaagagtggaccttccaggcagttgcgtccatgacaccaggaagatgtcagtgtgtgtttttcatttgatttatttatcttggggaaagtgaaaaatgtaatctgcaagttaatgaccctattggcttgtgtacatctatatgctaaaatgacttccccacattgacatttgtgcgccacctttaatcactctggggcaactctcacatcttgctgcatgtacatgtatacggctactattgaagtgtaattgtgagatggactccaacaagcatgtgactgtgagattgtgtgtgggaaaatgtatttaactactctgtgtgtgtgtgtgtgtgtgtgtgcgcgcgcgcgcgcacgcgcacacactcacgcacacacaagcagagaaggcgctgatcttgaactaatcctgcacaggcatccttccctttatagattgattccagcaaaggcggaataaaacaaatttcctatgaagagaatcctgatatgaaacaagtcatgtagtctcatggccgggaatctctccacagatactaacaacttaaacttactactttaggagaaaaaaaaaaacattcaatttcggacactgagttatatatgaaattaattaggctctagtccaacagttgtttacattttaaatagtccatattgaatttaattaaaacaagggatgcatgcagtcaaattgatagtttaattcttcaagtgataatataggaagtttcaccttgcctttgtccaagccccacctattaaaaccctttactcacagtttgaaactgaagcagtaaacttgtttccagacatctttttcagattgtcttaagcccaaagttgcctcacttccactattctcagcagccaaccaggatttggcagctgctccactg

SEQ ID NO: 138350 - DNA, 1233 bp, Homo sapiens
cctcccgagtagctgggattacaggtgtgtgccaccatgcccaactagtttttgtattttttagcagagacggggtttcctcatattggccaggctggtctcaaactcctgtacgcctgacctcaagtcaggcccacctcggcctcccagagtgctgggattacaggtgtgagccaccacgcccggccgagatggattagttttggacccacttatatgacatagccattctaagagagaacttgcatatgttgcctgtactcttactggttttttccactagaaagctagttcagctgatgaatgttaccttgtcaggttgtttctatttctatttagggcaaggactttctgagaaagtcaacctctagactttgtttcctggattgttgtcaacttatttattgtatgcctgttgtatgctagctattgtatactaaatactggaaacacaccctgtctctgtggagaaaaaaggactgtttggctgattaatgataacttaacacttgtttctgtgtagaacatatgcagtaatgtcacctcaaaagagagttaagaacgtccaggcacaaaacaggacttcacaaggtagtagtagttttcagaccacgctttcagcctggaaagtaaaacaggatccaagcaactcgaagaacatctcaaaacatggacaaaacaatccagtgggagattatgaacatgctgatgatcaagctgaagaagatgctttgcaaatggcagtgggatattttgagaaaggtaaaggtggattgttttccttatgaaactcctatttctgtaaaaatattctagtctttttttcttaagaatttttaaaggaaagcataattttgctcattcatgcttttgtttatttaatagacattgagcaattactatatatcagtatgctaggcactagggacacaacaacaaaacttactagcagagtggttcccaaacggctgcatattgggatcacttgagaacctttttttctttttttttttcctccctctctacccctttggctctgagaatctttaacaaacaaactgatgtcaggcatctactcttagactttctgattttattggtatgggatgcaacctggcatagggattttttttaaaggcttcctaggtggttccaatgtatggtaaagtttgggaaccactgtcctaatattgaaacaggttgtagtctaagttcagtgcttttagtttagaa

SEQ ID NO: 138351 - DNA, 1047 bp, Homo sapiens
atcgctgttaaatattctttagttaaaaacatctttgaacagtttttgggaagacacttcttacataaactcctttatttatttttggagacggggtcttgctctgttgcccaggctggagtgcagtggcatgatcattgtacgtttaaccttttgggcacaagtgatcctcccatctcagcctcctgaggagctgggaccacaggtgcgtgccagcatgcccagctagtttttaatttttttgtagagatggagtcttgtcatgttgcccaggctggtctcaaactcctggcctcaagtgatcctcttactttggcctcccaaaatgctggaattacagatgtgggtcaccacgcctggttattaagctattcctttaaagagttccaaattcttattattgaggccgaagactgaaataattttaaaggtctcactatttaatattgtttcttttttcaggtcccattaaagcttcacagaataaagataaaaccttggaaaaacacttgaaaactgtggaaaatgtggcttggaagaatgggttagcttcagaagaaattgatattctattaaatattgcactcagtggcaaatttggtatgttgaggaaatgctttttttttcttttaactcacctagcacctatatttttttcttttaaaaataaatcttatatatatatacacacacacacacacacacatatatatatatacttttttttataatagagacagcatctcactatattgcccaggttggtctcgaactcctagactcaagtgatcctcccgccttggcctctcaaagtgctgggattataggcttgagccaccgcacctggctcgagggggatgttgttttgttttttgttttttgttttgagatggagtcttgctctgtcacccaggctgtagtgcagtggcaccatctcagctcactgctacctctgcctctcgggttcaagcaattctcctgcctcagcctcctgagtagctgggactacaggtgcgtgccaccacacctggctaattttttgtattt

SEQ ID NO: 138352 - DNA, 1081 bp, Homo sapiens
gtgaagagcgagactccatctcaaaaaaacaaaacaaaaaaacaacatgtatggagtatacagatgttttctattttagaaatttttttttcgtgacagagtctcgctgtgttgtccagactgcagtgcagtggtatgatcatggttcactgcagccttgaccttctggactcaagcaatcctcccatctcagactcccaagtagatgggactacaggtgcgtgccactgcacccagcctccttttgatatctcagaaattaatgattaggttatcttgatgtctgctaggacttgaggtgtctcaaaatgcatgcctcagactcgggaaacttttatatagcaagttaaaaaataatctctggctttctattgttacttttcattttttttttctgttaagctggaatttgctgaggtcaaatgtggcctccttaattccttttctcccttttattatagttatttctgtgatgtccccatccctactagatctttacatgcagctcttttggtaagttgagatgcatatttagaggcaggtatggtagaaatgtcatcataattaggtacaaagggactttagactctttaaaaattaagtcacttggaagtaaaaatagaattaatattgaattctccctttgaatttggtgcacatgtaatgtgttggtggtgagactattttaaatttcgaagagttagtggatgggagtgagaaagaaaacaagaaaaacaagaaaccacaagagtggaaagcagagatttttatttttgtgattcattacctatcatcactgcttcctttcttctccacagaatgatagtgtagaaagtgatgagatatattctaattcttgaagccttaattaacagaaattgagataggatatattcaaagccagtctctatgacatcttttttttttttttttgagatggagttttgctcttgtcacccaggctggagtgcaatggtgtgatctcagctaactgcaacctccgcctcccgggttcaagcgattctcctgcctcagcctcctgagtagctgggattacaggtgcccgccaccatgcccagct

SEQ ID NO: 138353 - DNA, 2523 bp, Homo sapiens
aacaatttattaataatgataagagatactgaattttacatactgttggtttttattgccttcaatataacgtgaggtgtggtgtttttttttttttttttttttttgagatggagttttggtcttgttgtccaggctggagtgcatggcgtgatcttggctcaccgcaacctctgcctcctgggttcaagcgattctcctgcctcagcctcccgagtagctgggattacaggcatgctccaccacgcccagctaatttttatatttttagtagagatagggtttctccatgttggtcgggctggtcttgaactcccaacttcaggtgatctgcccaccatggcctcccaaagtgctgggattacaggcatgagctgccgcgcccagcctaatgtgagatttttagatccaagagtgaataatagtaaaagaacaatcgagacactaaaatgtagtttaatttagcttgtctcctttccaggaaatgctgtaaacacacggatattgaagtgcatgatcccagcaacagtaatatcagaagattctgtggttaaggcagtctcctggctttgtgttggcaagtgttctggtagcaccaaggtaatctttttaaacactttgatgataagtccttcagaaccacttaagggctggcaaggaagagccacttatgaagtaatggcattggccttttgtgcaaagcctgtagttttggaacaatatatcttgatgcaaggactatgttcaaacagaaatttttactgagaaataaaatctattattctactttgtgcctgaagcttctaaaatagccctggtggcgggggacggggggcggaattaaactcttctgtaccagttatatttctttaaagataagtattttgtctcttcaataggtacttttttatcgttggctggttgcaatgtttgacttcattgatcgtaaggagcaaattaacttgctctatggcttcttttttgcttcattgcaagatgatgcactggtaagtaaaaattggacagcattaggcatcaatcaaatagtacatgtgtgtatattgatgcaccatatatgcttcagtgtgctacacaatatgtttttccttattttaaaaatatatcaaacatatagaaatgtaccaagataacgtagacatatcaaatatacagaaaagggcaaataataacattctattttgcacctgtctctcagattaacaaatagaaaatttttatcgtatttactttatgtcttcttttaaggaaataaaaatgttacagataaagttgattccacgttggagtcttgtttgctgatctggagcactcattgccatcttttcccttttaaaccacttcaacagagtcctttgagtcatttactctacattttcttgattaacactgcaaaagcctcatcagaattaatgagaaggagaggattacttttcatgagtgccaatggagtgattttgattaaatagcataattatttctcttaaaaacattaataactttaagaaatcaatctactgtccacctggaagactttcaaggaccatcagtagttcacagaccatgtgaatcactcatctaactgtattgctcttgcctttgggaagggaattcatttattgattttattttttaaaaatgatgtttccagtgtgttcattgcattgtcctagccactgtagaagattcaaagtttagcatagggtttctatattccacgaacttgaaatctcattggggaattaaggaaatcacataaattatcaaaaacagtatatgatagtttgaggataataattgctgtaatatttccaggaaggaagaaagcactgtaaatcaaaatgattagttaaaacaccataaagtatgtgggtgttgagctgggccttacaggttgaataggatttgggatttgatgacagaaagtgatacttgatatgatgggaatatttcaagcaaagttgtgaggtgtgtaaattgtgttttaggagaccttaaatagaccagcctgacctaattagaggtggtgttaggtggtaagcctgaaaaagttgggtgaggacagattgtagaggtcttccaatgtgatgctaaggaattggaactttattcagtggggaaatcactgaaaatttttggctagaatatgttgaaagcagctttgtaggaagctatatctagtagttcccaacaatgtgaattaagagagaggctgaaggcaggaatactagttaggaagctgacatgataatctaggtataacatgatgtcctagacaagaaattctcaaatatggtctgtggaccccctggggcttcctgagaccctttcaggaagtccaagaggtcaaaattattttcataataataccaaggtattatttgccattttcactttgttcaccttagcgttgatggtgctaaagcaatggtgggtaaaactgctggccatttaacaggaatcaaggcagtggcaccaaactatactagcatattcttcattatg

SEQ ID NO: 138354 - DNA, 1509 bp, Homo sapiens
agctgcttgattatggcataccaattgtaatttcctagataattttccaagaattataataatcaggtattagcttctcttctggtcctgtctccttgaggtctaaatcaaggatgagtaaactttgagtcctgagtatgctaccagtgagaataagctatgctatgctagtaagtatgactggtcagcctaaggtataggaagagaagagaaaaatacaaggaagaagtaaagttggaaaaggtcctaagagagaagatcacagtttggagagggttgttttatggtggttgacttaaatgtctggttactcattccttgatttttgatagcatcttcctatagctatatctcagcgaaattatggtctgaatatacttttttccttcttattggtatttgtttcctcagtttcttaatagccacagaattgaaaatggaaaacttattttatttcagggaatgcagcctcatctccaggctttgttgtcactgtataagttctttgctcctgctctgatttcagtatctttgcctgtaaggaagaaggtaagggattaaggagagagaaatcatattaagattgaaatatgttatttttggtaaagttaacttacagatttcaactaaaatgtttacagcctactgttttactgtctagtattgtggtactgttttgggaaagtttttttttaggaattggtacttcgtgttgatcccatttggtatatttaatagattactaatcagaaaaaaaaatactttaagtgcatttgtatgggtgtaaaggatttcataatatattttcaattaatgaggcattttagactttatgttgcttcagtttatgggtacctactctcttgtactttatatccaaatttatagatatattttaagaattcagagaatctatggaagacggctctgcttgccgtgaagcaaagaaaccggggaccttctccagaacctctgaagttgatgttaggtccagctaatgttcgtcctctaaaaagagtaagtatctaaagctcaaacaacttgcatggctttcttttattaaatccaaataataaccattcagatcttagaggagattatagatatttaagtatatgtcagttacccaggattctgtgtaagccatattcagattcctttaattgaaacaccttaccagttgcttttatatttgtggtttgtagtctgtttagtccattgatagattattttattatctttcttcagaagtggaattctctctcagttataccagtgctcaattccagtagctacactaaagaatgtggaaaaaaagagatgagtctttctgattgtctgaatagaagtggatcatttccactagaacaacttcaaagcttcccccaacttttacagaacatccattgcttagaggtatgtgactggaccatgtgcttctttgcattttctatttgaatttcatggcctttgtttttttgtttgtttgtttgttttgtttttttgaga

SEQ ID NO: 138355 - DNA, 1622 bp, Homo sapiens
taattttaaggcagtaagaaggtagagggattttgttaaggaaacactgctagatggccaccaaaactcactgggtggctccactttgatgactatcacaatccaaggattcttcatctttgtatgttcagaaacttgctgttagggccccagaatcatcctgttaatggtaacgaaactcagaagagacaaatgtacaagccagaatgtcagcttattataaaattaattatttctggtaagcgaaatgctcatatctgccaactagagtatcccctctgctatcagcatatatgggagccaaatttgtcattagaagatttcttaattatagaattaaaggaaagggcagtgagaagtctttcatccaagccatagtaaagcctgagcatttcattcctccaatggtgggggtcggtggggaggggcgggtatatttctctagagataatatttcttttgaccaaatttgagtgtttctttactggatactggataagcaactcctgattcttctggtggttaaagttgcttttagttggttccaggccaattcttcttcttcttctctgaatcttttaaacagaatatgatatagtttattagatttccatgtactaaatttgtatcactcttacattatacccagcatactctaattgaagtttagggtattctaaaactttcaattcagatgtttgtactttcttggattgctatgtgatataaagcttatcatattcattatatgtgaattctctccatttctataagcttttccctatatttacactataagcttttccctatattaccaagttgttgaggaatatctcactatcatctccatgtgactgttccagtctacatcatgagttagctaggatgtatgagacttatggcttttttactttgtcacttgtcactttagtgataattatgttttgtgcacttttttattgtggtacaactagatgcttatatttactgtttctgctctagaatgtatttggtacaaggtgaataattatgaacatggaaaagaatttaccaacttcctggataccatcatcagggcagagtgcttcttacaagtaagatttcacttgcttcttccactctccaccactctttactaaaatttatttagatatccattgaaaaccttttcttgcccggctgcggtggctcacacctgtaatctcagcactttggaggccaaggcgggtggatcacttgagcccaggagttcaagaccagcttgggcaacacagcaaaaccccatctctacaaagaatacaaaaattagccaggcatggtggcatgcatctgtagtcccagctactcaggaggatgaggtaggaggatcacttgagctcaggaggtcaaggctgcagtgagccgtaattgtgccactgcactgcagcctgggttacagagtgagatcctgtctcaaaaacaacaacaacaaaaaacccttttttttagtacctgacatcttttgtaaataatatttgttcagtttgaagctcattatagataaagctgagttttatctttgcactgttagatttgaagaaagaatatgttatattatgcaaataaaagggaaaagcctgtaa

SEQ ID NO: 138356 - DNA, 1038 bp, Homo sapiens
ttcctgtgaagcattcctgtataagagccttcctctctgggatggcctttgttgtcggtcacagttccttcagcttgtgagctggattccttttagtagcttctctggtatgtatcatgaaaatttggagtcatttgattcaacgtactatgattgaaaggattttgaataatcttttttttgattcctagaggtgaaaccacttctttttgaccatctagcgcagctcttctttacatcaaccatttatttcaaggtaacaaaaacttgtcttgcttagattcaataggatgtattattctattgctagtggtacacaattccaaactgatattacagcaatggttttataacaggattttcttggacctgggctttgaggtactgcatcactcaactcaaagttaatgcatagaatgttccttttttaaggctgtgttgcatacagttttcctgacctgtttccacttgtagcaaatgacatagtgaacgaacaagtggcagatgcatattaataaaaacaaacaaactgagaaatacttagtttgattgttgtggtttatatttttgtagatacatttattcatttcacaaatattttttgagcacctactaaatacccttcttgacactgggaatatagtagtgaccaaagcaaacaaaactccctgtgacattcatattttatatttatagtaatagtcgttttctgctagtaaaattgttccaaccttatatataatatgttactattttggagtggtctccaagaagaccaatatggcttccagaagttctacctgaatgagtttgagagccactttcttatagaatggttattcctattctagaagaggggcaattaagtaatttttcttttataacttttttttttaaccttaaatcacttactgttggccacattgacaggaaacatgttgtcctggttagcgtttgtcgtaattgaatggcacttgattaattacctatcatattaacttggatttgaggtctatttatgctaattgtaacttttac

SEQ ID NO: 138357 - DNA, 1238 bp, Homo sapiens
tagagaaaatggcaaaataaacttgtacttggcattcgtctgtcttctggagactaatcatggtgtagaagcagctgttgggttcaaaatttgatgtggtcatctccatggtccttttcatctctaagcctctgttagttctgaacactgttatgtctgaatgatttcatgaaatcttttttcattttgtccccctcagtgtagtgtgcttcagagtctgaaagagctattgcagaattggctgttgtggctttctatggacattcacatgaaacctgttacaaacagtcctctgtgagttatctaacggtcttccacaagagacgatctgtatacaaatgtttgcatatgtttaatagtgtggcgtgaaacaatttttttcatgtaaatgcttagtagtacttttttggaagacttttttgtgacttttcactcttcttcccccacaatcctgaaaggaaggctaattctctaagttcctattgtgtaaatcagaaagcaacccttatctgctaaatgacttctttcaagagttaatataacaaaacactagagagatgagactagaatttgcaactttgacttccattcagtttaactcattttataaattatattcttatatttaaagccaattttcatgatggctagaaaaatctctaacgtaattttgcgtacaactttgtttttatgtttctgtgctgtattttggttatatgtgttaatttatcttaactttggagtttaaaataagagccctaaattgttaaatgtgtgctttaccttcaaagtaaaagtaaaagactaaatttcaaggaactgcataatcaggttgttttgactctttctacctaaaatctttgccttctcctacatatatatatatattttttgagacagtcttactctgtcacccaggctggagtgcagtggcacaatattggctcacctcaacctccacctcccagcttcaaatgattcttctgcctcagcctcccaagcagctgggattacaggcatgtgccaccatatccagctaagtagagatggggtttatttagtagagatggggttccaccatgctggccaggatggtctcgatctcttgaccttgtgatctgcccgcctcagctttccaaagtgctgggattacaggtgtgagccactgcgcctggccaagaaccactattataaagaaattccacttaaacatttaatctcttctacctaaattacat

SEQ ID NO: 138358 - DNA, 2589 bp, Homo sapiens
tggtgcactctcgctcactgcaacctttgcctcacaggctcaagtgatcctcccacctcagcgtcttgagtagctggaactataggcatgtgccaccaccgcacttaatttttgtattttttgtaaagacgggcttttgccatgttgcccagaatggtcttaaactcctggattcaagagagcccccgaccttcgcctccctaagtgctggaattacaggtgtgagccactctgcccggccctgaatttttcatgtcacttttatgtgaactttttttctccacttaacttttaatggaatacctattttttaatggtttttatatatctcacttgagaattttcatatctgcttggagcttaatactttatttctctggtatttactagtagagtctgattgcttagaatgttctatgaattcgtcttaatggttccctggagggctaagtgtagttttatgattactcactgtgattttttaaaaagtgaattatacgttggagcactgatagtttttaaaatcctcaccaacattttgctttatattattcagctttagcttggaaattgtgaacactattgctactctatatctgaatgttatggtttcttattgcagagagacaactttgggtggatccatgaactctgtgtctaaactgatccactatgtagggtggctatccactactgcaatgcgcttggagagcaacaatactttcttgctgcactttattttggatttctatgagaaggtagtacacattacattttccccatttggatttatgtgaaggctatccactttattggcttattatttaaatttcatgcacaaccattaaggtgggctatgatcttattagcatcattaaaataacctcacattttgaagttcatgattattttctcaccagaataactgactttcataaacaaagtggaaaaacaattgcttttatttagggccaggtaccactacattgacctgtgttaatactggccctagagagaagtctattgttagcattattttttgttcatcccattcccaactcctggcagaaaccaaaaatatcttgttgtttcttcagatctccatttctacctttcagctgccttacttctcttgctacctagtacgcttttattgttttatagtatatgacctggacagaactataggttggtgcaaaagtaattgcagtttttgccattgaaaacaatagcaaaaactgcagttacttttgcaccaatttaatattatccatgaagtatccattatagtctcacttttcccagcttcctctctttactaatacctagttgtcttgtgttatgcatttgcttagaagcatgctcctttgttttctaggttgacagctaactcacatggtaagtaaatattatgggacttaaggataaagaaatacttccttaatctaccctgtccccctaactttaagacctttccccccaaaaaatgaaagatttgagtaatggccttctggaaataatcctctatagtgtggctgatgtttggtgaagtatattttaagccagcttgtagatgtttatttaggagtcaggcatgtccaaagctaatgttatgttattgcttatcttgtactgatgattctttgggtgaacttagttgaggagttctggggaatactctgtatactgatgttatcattcttcctccaaggtgtgtgacatatatataaattataaccttccattagtggtattgtttcctcctgggatcttctattctgcactcctcagcctggataccagcatcctgaaccagctgtgttttattatgcacaggtacaaagcctttttaccattttatgaaacagtgtattataattctctcttcctctttcagctataatacaataaatattcctactcgtcttctgccagggcctctggaaataggaaatgtggcttgcttttggacatgaccttccgatatggggccatggtagctgtgttttttaaatcctccactgctgtggctacagaataaaaaaaaattcatagttaaggacttgttgtgcaatggtactgttgcactcagcattgttcattctaattgctgtgtcttcaggaaaaattagtcatttggtgataattgcttgaagtgtttgtagcttctctggtaaaaataacattttctgggcgataaggggagctattgccaattatatgaaactgtaagtattatttctggtctcctctaattctttcacttgtggactgaaattactttcttcagtccataagcgtagactttttttttgagatggagttttgctcttatcaccctggagtgcagtgacatgatctcggctcactgcaacctctgcctcccgggttcaagcgattctcccccctcagcctcccgagtagctgggattacaggcgcccgccaccacgcctggctaattttttgtatttttagtagagatggggtttcaccatgttggccaagctggtctcgaactcctgacctcaggtaatccacccacctcggcctcccaaagtgctgggattacaggcgtgagccaccatgct

SEQ ID NO: 138359 - DNA, 1104 bp, Homo sapiens
tagtcaactacacatcttaagtgtacaacttattgagcctctattttcacttgaggagaatgtatcacaaaaggataaaatccttaactagacaactggatatttgtgtatatgcacatttgcatatatttacatttaaaatgtatgttttttttaaattttaccatttcaaaggcattatattcaaaggcatgttaaatgtttcattctgtttgttttttctgttagatatcgtaaaaatttgactgccgcaaagaaaaatgagttggtacaaaaggtatgaatgagaaagctctgtgttaaatcactgttgtttaaaaattaagtctagatatatatgacctgatgggagtaagaaggaaagggagaataggtgatagtgacaattttttatttctttcccattagacaaaatcagagttcaatttcagcagcaagacttatcaagaatttaatcactatttgacatcaatggttggttgcctgtggacgtccaaaccctttgggaaaggaatatatattgaccctgaaatcctagaaaaaactggagtggctgaatataaaaacagtttaaatgtagtccatcatccttctttcttgagttacgctgtttcctttttgctacaggtaagggtatttaaagaatttttagattttgtatcttaatactgtggtggcagaaataggaagtgccataaatttaatgtgtctgaattgtaagacgtgtgtttagtaattttttttaagtaacaactaaattttgggcattgtgctaggctcagggattccagttaatttaagtaagtttctgtcctctaagagagcttgagcttgtaacagagacagacttgtaaacaaattactataatacagtgtggcaaaatgagaaaaggttcagttgtaagaaagatgggggagtgattagtccagtcctgcctgggtagaggtggtgccatgtaaggaaacgcttcatagatgtggaagctctcataaaatccttctagacaagatagaatatgtaggttagttaatagtacaattagagtcttagtcaaagactgctgatttaatggattgatatcaatatgcaggcaggtggaggag

SEQ ID NO: 138360 - DNA, 1496 bp, Homo sapiens
gaggattgcttgaggctgggaagtcgaggctacaatgagctgtgatcactgctgcattccagcttgggcaacaaacagagcaaaaccgtatctcaaaaaaaaaaaaaaaaaaatatatatatatatatataattatctcattatcaaaaactgctatttacacatttaatataggcagtaatataataatatctgctcctatgttatctcctagagtgtgagaatgatgacacatttccattgcacagtacttaaatttttttgccaacataataaaatggacgtttagcccttggaattgggtactttctggtttaaatgttacttagtgactgagctcatttcccccccgaactaattttgatatgtgcatgcgggatgctgcaaactcttcctagggaaagaggaggaaatagagaaaaagcatagtaaaatattcgataagtaattttcctttttctgtgcctgcagggaaagaaatggagctggtatttggactatttattttcacaggggttacaaggcttgaaactttttataagaagtagtgttcatcattcttccattcccagagcagagggcataaactgcaacaatcaatattaaatgaatgttgacataaactgaacacactggactaaactcactcctcattgctagagcaaagtggctcatcttgagttcccattttcatttcactgacagactgccatcctcaaggagtactcagactggccttctgttcatggcttaggagagccttggtgtgcctaactgatttttcaaaatttagatttttttagcctaccagtgaaaaatgaccccttcatcatcaggctctgcgttctaccaaattgtatgtaaaaagacacatctgttttgtggtaggattttttcacatttttgggtactatgagctgcattgatggaagacagcaggcaatatgtggtgacagttaactcacagacataaacatgcaaaatactttgctgtctctggggatattgccatttttcttactgtgagcaacagcaccaacaccaagttaacaggatgcaacatgtgtatgactctaaaagccctaagtagttggtaacttcctgggccttcaatcatagcaatttgatgagggaaggaaggggagaggatttgttgggtaatcaagacattcccgtatatgtctgatttcatggaactgctctattttgtttgtgtgtattgtatatgtatatgtgtatgtgtgcgtgtatgtgtgtgtctgtagcttcagtttttaagtgtaaggactaaataaactaactgaaattttactttcagaaggaattctgaagttttaaaaaagttaataatagctagaatatcttgctgaaaatgtactataaaattttgcctgctgggcgtggtggctcacgcctgtaatcccagcactttgggaggccaaggtgggtggatcatgaggtcaggagttcgagatgaggctggccaatatggtaaa

SEQ ID NO: 138361 - DNA, 1055 bp, Homo sapiens
gtcttactctgtcatccaggctggagtgcagtggtgcaatctcggctcacaacagcatcaatctcctgggtttaaacgatccttccacctcatcctcccaagtagctgggaccacaggcatgcaccaccacacctgactaacttttatatttttagtagagatggggtttcaccatgttgagctggctgatctcaaactcctggcctcaagtgatctgcccgcctttgcctcccaaagtgctgagattacaggcatgagccacggtgcccagccatactttcttatttatttgtatcactcatcattttttgttgaaaactagacttttgaataatctgatgtggcaactttggaaatcagatgctctctctttaccaaggtttattgttgttttgacttgtttttactaatgtgggtgggtggttgttttagtgacttctctgaactagtctgtattctttgtcatatgtgaccactgaattctctactcagctattttagagattagttcatgattggacagagcttcttaaatgcccagaaccagcaaatctcctagtctttgtcaaagaactccgtgtgcatgttggggtgtactttcaacaatcacccaggccattaacaactctgccttagtgttcacttcctgattgtgcaaaggctcaaggtcagccaaacatgacagtgtggggccttcttgagtctttccagagcatgtttacagtcctatgcatgcttatgcccttctagatcttctgaaaaatgtaggaggttttcaaagtgcttatagatatattcttccccaatttttctgtttaagattttttattagtctattgtgtaccttaactgttattcacagccttaggcagctgcaaagctaaatcacttgcctgtatttgtttttggcaaatactccccctggagaaggctttttgcactgtgttatctctgagcaagtggtattttccagggaaccaccagacatatataacaatgacagttgtttaggaatgaggctttgaataagctcccacctctttctgctccctca

SEQ ID NO: 138362 - DNA, 1093 bp, Homo sapiens
tcccaccactgcactccagcctgggtgacagagtgagactgcctcaaaccccgtcctccccacccccgacaagtcacccatttaaactatacaattcagtggcttttagcatattcagagttgtacaaccaccactgcagtcaattttagaatagtttcatcactccaaaaagaaaccctgtatccattagtagtcactccccacttctccagaacctctcccctgcccagcactaggcaaccactcatctagtttctactaatctactgcctattctagttatttcatacaagtgaaatcatataatacatggtgttttgagtcgggctcctctcatttagcatattttcagggttcatccatgttatggcatgtatcagtacttttttccatttaaaactgactaatactccattggatcaatataccacattttgtttattcattcatctgctgatggacatttgggttgctttcacttttggctattatgaataatgctgcaatgaatattgatatattagagaatatactttaaaggtagaattgacaggagttgggtcaattactgggtgttgaaggagaaggaatcattaaggatgtatgtatttctaacttgaacgacaactgtatttttcaaagccacaagagagtgtacagggcgaagagagaagaaggcaatataggctaaatgagggtcaagcagctgtatagaaaatgtgtgctgactctaaccttatactgttgagggttacaattttaaagagactggagttggtattatgaggatgggcttagcatggtgctcttgaagtacaggcactactccccacccccatccccacaaggctagcggaatttttatgttctatatattcccttcctctcagcaaatcacttatccaagtactgcttaatactgctttaaaacaatcagatgaacagttaatgccaggattgttttagtacccaccaaacatctttgttttcatcaatgtaagtacagttgtatgctgcataacaacattttggccaatgacagactgcatatatgatggtagtcccataagattataatggagctaagaaatt

SEQ ID NO: 138363 - DNA, 1137 bp, Homo sapiens
tgtttctgggttctccattctcctccactgatccatctgtcaatccctccaccaatatcacagtgtcgctatataattggtcctgaaattagaaggctgattgctctgactttacttttctttgtcaatattgtttagccattctagagtccatatctttatttatttatttatttatttattttttgagatggagtctcgctctgttgcccaggctggagtgcaatggcacgatctctgctcactgcagtctctgcctcccgggttcaagcgactctcatgcctcagcctcccaagtagccaggattacaggcatgggccaccatgcccggctaatttttgtatttttagtagagacgggtttcaccatgttggccaggctggtctcgaactcctgacctcacgtgatccgcccgccttggcctcccaaagtgctgagattacaggcatgagccaccacgcctggccaaaagcctgtatcttttaatataaattttagaataagcttgtctatagctatagaaaaccttgctagaattttggcaggaattacattaaacttgtagatcaatttggggagaactgacatttttactatattgagtcttccaatccatgaacacagttgccttggcttttatactctgtaaatcaacatttattgagtgcctactaaatgtaaaactaagttaaggatagttgtagagctctttaagctttactgaaatataggtatcataatataacttgtttattgtgttttatttcataggtccctgatgtcaaagaaatggaaaaaagcagctttactgaggtagagcaatcataatataacttcatttttacccttaatgtgttttatttaatagctcattagtttcaaatgaatcaaataaaccacagaagctacttttgagccttccttctcacctctaaccctcatcctaaacacatacactgggtttgattcactaaaaaatgaattcattgtttgatgtttgataactgctagaggaaaagatacaatttggccagtgaccccgtgtattctaatctgctctttttattctgatatttatttcaaaagccattccttgggagccagagctcacttttaacagcagttgtttgcaattg

SEQ ID NO: 138364 - DNA, 1113 bp, Homo sapiens
gcctcaaaaataaaaagaaaatgtgttcttaaaacctcaagtcataggaacggttctttagtcttttccttattattatatttattatgttatttattactatattatttagtttttttttttttgagacagagtcccactctgtctccaagccagcggcacgatctcggctcactgcaatctctgcctcctgggttcaagcgattcttctgccttagcctcccgagtagctgggattacaggcacacaccaccacacccagctaatttttatatttttagtagagacggggtttcaccatgttggccaggatggtcttgatctcctgacctcgtgatccacctgcctcggcctcccaaagtgctgggattataggcgtgagccactgcgccccaccttatttagtattaaagtgttctcattacttgtacacacaaatttaaatgtcttagctttacagtattgcttgctcagcgaatatatgtcatgagaaaggtctgtcagattcatacagtaaacttgagcaccaattatgtgttttgacactactgggcacaaagacaatggaaaagaaaaggtgtaacaaatcccctgtctgagattaataagccccaaggcaacaatttgggcttttgtttgttttgtcaatctgagaaatgcagtttcagaactttgataggtggtactgttagccctgatgacattcaaagtcctcatttcaaatattcaaggtagaaaattcaaaactcagttgtaaaacaaaagaattggattagcagacccttttcatgaaatgaaatcttacttagaagcctgttatgtaaagcagaaaagccaagctactctggtggttagtatctggaagccttcctactgttgtgttgtcacccacctgcactgccagtgatgcctaaggctcatcttcaagcttccaggttttaccaagcacactctgaaagtgagtctatgtattagggataacagaaggaaatcaagcaaaaacttgctctttatttacaataaactccataaggaatttgaattctaaagttaacaaatcaatgaactccatgtaaaatagtctttacatggaataatggaaaacaatcgatg

SEQ ID NO: 138365 - DNA, 1546 bp, Homo sapiens
tagaaagcttgaaagtctttggtatctctattaatcatgcagcctccctgaagcgccctatctcagtattccagaaagctgctgtgtagcattagtttggcatattcctacactgagaactcgacaggatcctccaggtttaagccctcttgttaactcctgcctctgaatcaaagatgcattaagcaaaaacagtgcctgtcacagcacgcatgcaatgttatttgaatgaatctgaaagttgggcacaaactgccatagcctcatttccctacgtcgggagaggaaaactccatcaaaaaacgaaagccaggggcccaggatagccaactaatcgacccagtcaactaactgacccagtgcacaactctggtagctcagaaaacgcgggctaatttggaagtggacaggggcggagctgtggggccagcacggaatggatcacgtggtctgaagtaacttccttttctcctttcttttctttttggagtaacatctcaacggcacctcggctctgggctgtaagccctgcgatctcaaggcgcaaggctgggcgcaacggcagggttgcggggttacgggattgcggggtccggggagtggaacccgccgactccgggaacgaagcaccggcgccaaggtgtgggaggcggcggggtggagttggacgcctgcctcgcgccgacgcagtgcactcacgggggcggtcccagaggcagctagctgtggttccggttccgtcgcggagacacgtgaaggtcggtgcggagttcgtctctgcaagcttggtcgccctgggatggattcctcctcctcttcctccgcggcgggtttgggtgcagtggacccgcagttgcagcatttcatcgaggtagagactcaaaagcagcgcttccagcagctggtgcaccagatgactgaactttgttgggtgaggagcctggggctgggacctgaacactgtacctactttccctctgtccttgtaccgcgggactcgcgacaacgtcggggattcggggtggggggcgggcacctggcagcaacccttgattttctcaggttcctgtggcctagccggatgggagaagggtgactccgcttctctggggactgtcattccggacctcggctttgttggtgtagaggactgggtatcaaagaagacttatgccactggacacccagcactttcaggcacccgaggttgaagctgcctagtgctggtcaccaagactgatcggagcccccagtactgggattttatttttggcagcccgagtcccagagagtcagtgaatcagtgaatctgctattcctggactcctcgggatttaccttcattacccagttctaaccctctccgctgaaaaatgagtggctccagcccagtaactataaaagtggtgtaatctcttccaacgtacatacttatttgctttcttgttggattgttgtgtaataccaagccgttttgggtctgaaggttgaggaattgagcctgccctgtgaggggactttggcaaaagggtggaaggtatttgca

SEQ ID NO: 138366 - DNA, 1038 bp, Homo sapiens
tgtcagtccacaatcttccaggaggaactctctctctctatatatatatatatttatttatttatatatattttatatatatttatatatatatataacacacacaagtgtatatatgtatacatatgtatacatacactggtgtatatataggtatattatgtatacatacacaagtgtgtatatatatatatacacttttttctactttcaacatattttttatttcaagatatatattaaaattagtaccatctgaatcaaatgatgccaccacctcaaattagtgtatctgtcttacctttaccccccaaacaccctccatttatgagagctggagaggtcaccatgccctcaaatccagaagaatcacactcaaagaaaaaggagttgacgacctgatgaaagaattaaaatgtcaaactgctactgttgtcctttcctccctaatcatggaagtggattgttctcaagtgccctagtccctgatctcttccctgcaactccctgctgcttgcctttgcctgctactctccatttccatgaatcttcaatgccaacctgggtttgggaaagggatacagtgtgctatgcacatgacagatgctcagtaaatagggtttgagtgagttgactgaatcactgacatggacaagccctggagggtgctgtaacctccaatctgcttatgaccaggagccactcaagcagcactctcccttcacaggtggtattccaaacacatgactcggagtcaggctgagcaactgctaaagcaagaggtaagtgtggaaccactagcacacagcattctccttgcataagtgaggatcttgaactgagggcctgttctgccccctacctttgggcaaggcagtgtcaaagctgccatcgtctgggatcccaattacaccattttttttgtttttgtttttctgagacggactctcggtctgtcacccaggctggagtgcagtggcgtgatctgggctcactgcaacctccgccttctgggttcaagtaattctcctacctcag

SEQ ID NO: 138367 - DNA, 1068 bp, Homo sapiens
tgcctgcgatttattcggctaagagaagtacaccagacatggtttgttgggatgcttctgaccccatttactggtcacagtactcaatttatttagggttttattttttatcctgtaatttgagtctttgattgtgaagaggtacttaattataatttgccacaagaataattgtggtatgattacagggctctcaatgagttggtagttcctgagaatagagtagtattatttggttaccactactcctgagtaaatgcataattgtaatgttaaaatgaacctctttgagtttagagctaaaactgagtgttgggaagggctgattgtaaactcatcaatttgtcactccagtgagagaccatttaaaccagggagtcagggtgtgtggcagggtggagggaaaggtttgcactcttgcccaatttttctcaaaatctaatttacaaaatattgaattaatccacctccagaagatagtggcatacacatggtagataagtggcaaagcgatcttccagaacacccctggtgttcctttgacgtattttcgtctccccagcatgagaatagaacctcctacaccacaggaaagagcaaaataacagtgtggatagcccccaggctttgataaaattcactcccttgctttcctagtgtgagcaataatctgcttaaaaagtagaaaaaaactgctggctttattcattctgcttccacggtgccaccaaaagcataaggagtttacttaaaaaatagacacattcccacccccacccccccaccagaggaaaaatccctaccactaattaaacttgaatggagggctggtggttttttcgttacttacttagtgtttttttgttgttgtttttgattttgttttttgagacggagtttcgctcttgttgccccgactggagtataatggcacaatctcggctcactgcaacctccgcctcctgggttcaagcgattctcctgcctcagcctcccgagtagctgggattacaggcatccaccactacgcccggctatttttgtatttttagtagagacggggttttg

SEQ ID NO: 138368 - DNA, 1102 bp, Homo sapiens
tctgggaaaaacactgctcccttcactgaacgccactacgtagcagagtccaccaaaagagataaagtgacgaaacgttgaaagctgcggggcgggaggaagtcggggtgagtggaccaccctttaggcggagtccttccttaagctcccgcccgcggctccgaactgagtcctctcagccgcccgagggcgctgcgctgagccttacactctatgattgctcctaccgactcccatgaggaagtgcgatcgggaacctcctatatacttccgtttgcctcgcggtttctttctttccgcgccgatagcgctcacgcaagcatggtaggacttgctggtgggggccgagtaacatccagcttaatctttcccccccttcgtcgcccgtgctatgccgggatgggtccaggctcctgtgtggactcgatatatcagagcaacccaatcttgccgggatcaaccctaaagggaccgggctacggggccaggaattgaagtgatgggttcaaagaggtagagttagccgggggtggagttaatgaggtctcttccctctttggggctcgacggagggaggaagctctgcttgaagcacatggggctggcccaccctgtagtcagaggtagcaagtaatgaggagtcctcctggagtgcctcagctttagctgggtaaggtagggcgttgtgccattgtggtcaaataacattgcacgttctgaactgtttctttactaggttaacgtccctaaaacccgccggactttctgtaagaagtgtggcaagcaccaaccccataaagtgacacagtacaagaagggcaaggattctctgtacgcccagggtaagatggattccgcataatttggtgttaatgtgacatttgtgttgtagaataacatacgagtccgggtctctctccctccacgcctggcttgagcgttaatatttctgctgcgaaattaagataaaacctgtaagacttacttgctgatcttcagtattttataacaaataccaattcgttttcccaggaaagcggcgttatgacaggaagcagagtggctatggtgggcaaactaagccgattttccggaaaaaggt

SEQ ID NO: 138369 - DNA, 1074 bp, Homo sapiens
gagatggagtctctgtttccctggctggagtgcagtggtgcgatctctgctcactgcaacttccgcccacctcccgggttcaagtgattcttctgcctcagcctcctaagcagctgggattatagacacgtgccaccatgcccggctgatttttttgtatttttagtagagatggggtttcaccatgttggtcaggctggtcttgaactcctgacctcatgatctgcctgcctcggcctcccaaagtgctaggattacaggcatgagccactgtgcccagccttctctttattttttttagtccacaagttctacacattttctcttaaattcactgatttttagattattttctccctatggcttaagagtatactgagtactatttaaagcaaagcattgcaaaagaatagttgccccactattcatttgcaatgctttgctttaaatagtacttaaagtagtcatttttgaagaaagtgatcttctgtagttatttattaaggctttaatttaattttttttcaggctaaaactacaaagaagattgtgctaaggcttgagtgcgttgagcccaactgcagatctaagagaatgctggctattaaaagatgcaagcattttgaactgggaggagataagaagagaaaggtatataattatgggtggaaggtgcaatctttttcatagctttattatttgaaaaggtgaacatctattcattgtggcatagagctcaggggtaatcctctaaaaatattagatctatagctaaagatatgtgaggtcttttgctacaaggaggaaaggaagaatgaggcagcttaacagcatggtgagtattttaggaacagataatgttcttaatggggcagtagttcatggcaaaatacaaaacaacttttttctgttctgttacagggccaagtgatccagttctaagtgtcatcttttattatgaagacaataaaatcttgagtttatgttcacttcatttgtttgctgttcatcttttgggagggaataagctagagccatcaatacaattccgcttgtggggaaatttatgcctct

SEQ ID NO: 138370 - DNA, 1936 bp, Homo sapiens
gattacaggcatgagccaccgtgcccagcctctacaaactttttattccattaacaaactatatgcctgggatttaagttttcttaatacttgatggagtcctatgtaattttgcagcttttaattttactaagaccattttagttctgattatagaagtaaattaactttaagggatttcaagttatatggcctacttctgaagcaaacttcttacagtgaaaattcattataagggtttagacctccttatggagacgttcaatctgtaaactcaagagaaggctacaagtgcctcctttaaactgttttcatctcacaaggatgttagtagaaagtaaacagaagagtcatatctgttttcacagcccaattatacagaaatccgacagtactgcaatcactggcgaaattttgctgacattgatgattcctggaaaagtataaagagtatcttggactggacatcttttaaccaggagagaattgttgatgttgctggaccagggggttggaatgacccagatatggtaaaaacttgagccctccttgttcaagaccctgcggtaggcttgtttcctattttgacattcaaggtaaatacaggtaaagttcctgggaggaggctttatgtgagagtacttagagcaggatgctgtggaaagtggtttctccatatgggtcatctaggtaactttaagaatgtttcctcctctcttgtttgaattatttcattctttttctcagttagtgattggcaactttggcctcagctggaatcagcaagtaactcagatggccctctgggctatcatggctgctcctttattcatgtctaatgacctccgacacatcagccctcaagccaaagctctccttcaggataaggacgtaattgccatcaatcaggaccccttgggcaagcaagggtaccagcttagacaggtaaataagagtatatattttaagatggctttatatacccaataccaactttgtcttgggcctaaatctatttttttcccttgctcttgatgttactatcagtaataaagcttcttgctagaaacattactttatttccaaaataatgctacaggatcattttaatttttcctacaagtgcttgatagttctgacattaagaatgaatgccaaactaacagggccacttatcactagttgctaagcaaccacactttcttggtttttcagggagacaactttgaagtgtgggaacgacctctctcaggcttagcctgggctgtagctatgataaaccggcaggagattggtggacctcgctcttataccatcgcagttgcttccctgggtaaaggagtggcctgtaatcctgcctgcttcatcacacagctcctccctgtgaaaaggaagctagggttctatgaatggacttcaaggttaagaagtcacataaatcccacaggcactgttttgcttcagctagaaaatacaatgcagatgtcattaaaagacttactttaaaatgtttattttattgccaactactacttcctgtccacctttttctccattcactttaaaagctcaaggctaggtggctcatgcctgtaatcccagcactttgggaggctgaggcgggcagatcacctgaggtcgggactttgagacccgcctggacaacatggtgaaaccccatttctaataaaaatataaaaattagccaggtgtggtggcgcacgcctgtggtcccagctactctgggggctgaggcatgagaatcgcttgaacccgggaggtggaggttgcattgagctgagatcatgccacctcactccagcctgggcaacaaagattccatctcaaaaaaaaaaaaaaaagccaggcacagtggctcatgcctggaatcccagcacttttggaagctgaggcaggcagatcacttgaggttagg

SEQ ID NO: 138371 - DNA, 1048 bp, Homo sapiens
tttattcagtactaccacagtagaggaaagagccaagttcaattccaaatacaacaaagacaggtggagatttatagccaatgagcagattgagggggtcagtggatggaatatttaagaagacatcaagggtagggagcttcttgctaaagcttcatgtacttaaacaagaagggtgggggatgagggaaattgatcagatatcaatggtggcagtattgacttagcaggattcttgctaagaggtcttgctaggacagacataggaagccaaggtggaggtctagtcgaaaagaaggctcatcagagaagtctaactaaagtttggtcaagaagagtctttgtcaaggtaaatctatcatttccctcaaaaggtaattttcaggatcccatcaggaagattagcatggctgctagctttctcctcagttctgggctatagctcacatgcctagtttgaactagctcagcagaactgggggatttattctttgtcttccaacaaactcatctggatgattttgggggtttgtggggaaaagcccccaatacctggtgaagtaaccttgtctcttcccccagcctggaatggttctctctttctgctacctcacgattgtgcttctacaatggtgactcttttcctccctctcatttcaggttcacagcaaaggactgaagctagggatttatgcagatgttggaaataaaacctgcgcaggcttccctgggagttttggatactacgacattgatgcccagacctttgctgactggggagtagatctgctaaaatttgatggttgttactgtgacagtttggaaaatttggcagatggtaatgtttcattccagagatttagccacaaaggaaagaactttgaggccatggtagctgagccaaagaaccaatcttcagaattttaaataccctgtcacaatactggaaataattattctccatgtgccagagctcccatctcttctctttcagttcattaattaattaattaattcatgtaaaatccatgcatacctaaccatagct

SEQ ID NO: 138372 - DNA, 1403 bp, Homo sapiens
gacttattaaataatgacgttattgtttctctggcaactgggacggttatccccagaggtagaccaataatcagtcacgtaagacgttccgctaaccaatcaccctcttcctttcttgatattgacccgccctatttccataccagaaggaagtgcggcaccttagtgatcccgagtttaagccgagagttgctcacgtgaccgagatctcacatgacgtaggcgctcacgtgattactcgcttacgtgagcagaagtagttctggtcgtcgtctaccgtctcgctatagccgtttgagggaagaaggaggaaaattacccggtatcgttagaggttggtgtgtgggtgggaactggggacccaggggtggtgatgatgaagaccagagcggggttcgggggccgcctccgcctctttcgttctctgctttcccctcccccctcgcgctctctccctcctcccccccatctcagtgccgggaagccgcctgtgctgcgcctggtggggaaatggtggacgctcatgactgtgtatgtgtttttgtatatctgtctgtctgggccggtctcgggggacccctaagggtgaccgtaaggcgaaaaacgtttgaaaaccacggccctgagttaagaaaaacagatactgaaaatagtggtctgagtgctggtctatccattcaggcactcagtctccactgcctgattgtctgtaaggggaggccccaagtgaattttatctgtagagtcacatctaggcaaatgcgtgcttgacaaaggcgcccaataaattactttactgaatagagtatttgaataatgtttatttttctgctgataacaacaatctacatattcaatttcgaacatttgaaaaataacaatatagtataaaatttaaaaatacacataattcaccacccggagacgactgctcaacctgatgtcgttacagttttttaaaaaatgtgtataacacacatataaatacacaaattcttaactcacaaagagtcctggttcccactttagccagcagtcctgatggccttcccaggagacgcagtaatgaagtagaacctctctgcccctacagaagggctcttaaggaatagagcggtgcagggaattaaatgggacgggttatcccagggataaggcaagcaaaaaaaaaaaaaaaaatcctgcaaaatgaaataaaaaaacagcttgtaaatctgtcactgagaccttaggatggttaataggaaaactgttatcactgcagatgcagtgtgctaggcacataatcggcaatcagtaaatgtttgttaaatcgtttcctcagtgtagttttatggccgttattacactttgtactttgtttccaagaggcccagtgctcccagaccatttcagataaacca

SEQ ID NO: 138373 - DNA, 1838 bp, Homo sapiens
gataaagtataattcattcagccattcctctaatgatggctatttaggtttccaattttctgccattactaacagtgctgcaaggaacatttgtaagtatttctgttgactagattcctggaaggattctagcagtgtcaaagggtatgggaacatgtattttgtacacagttgatattgtaaagcagttgtgctcttgggtcacttacaattatagcataagtaatttctcatgttattaaatatttttgtaacttttaaaattaaatgcataatattcgttttcttaataaagtacttttcaaagaatatatagctccataaatctgtctgaatttcagatcatctccttagggcacataactgaaatgtatttgctgtcaaaaggcgtgatacatattatcaaattgctttcaggatatagtggggtttatcaaaaaggaaatagtttatatcaattatcactcttctggtagtgtattagtttgtgaactgcatagcactgatttactgttgctgtttaatttccattatcttgatgggtgaaaaataacgattagttctgattttaacttgctggaagattgattaaatttgaacatttcccagattcctctcctgtatcctcctatacctgtattctctcatacttaatctgttatcaagtcccgcagattccactttttttggtatgtgtagatacatcttttctccattttactcctgttgccttaggcgattcctttaacatatatttatgagacaagttctaactaatctccctagttccacgtcgacccccttctgtttgagtgccacgctgttgccagggtgatctgtctgaaagagttttggtgaagtcaccctacatactccccggtttaaaagtcttaaaaggcgcttagtgtttgtatatcaaagtctttgggatctgatctatgccttgccagtcttttcacttgcttttccctctcctatttgtgcttcatcataattaagaaaaaaaaatgtttatggatccctgggcagattagtctgtttcatttaaccatttggcctccaaccaatagaactgatcaactagtccctctttgatactatgcttacactccactcagagggtcatggcaagtataatgtatatttgcatttacatctttaataatgacattcggtgctcctgtaggaccataagcccattctgggcttattgattcttgtatgccagagccgaatattggacatggcaactaaaaaatgtttctaaaatgaatgtgtgaattcccaataatgtctttttttcatttatctctggagcccaaatatttccctgattttattgatttgcatacatttttatataatgaagatattatataaagaacttacataacctgtgttttgtttgtgttttaattgttgtttaatcttttgatctagtgaagttttttatgtttatatattcagatatagccatcttttatttgttgacatctcccactgatttgttgctgttaattttttttttttttttttttttttttttgagacggagttttgctctggtcgctgaggctggagtgcagtggcgtgatcttggctcacctccacctcctgggtacataaaagcgattttcctgcctcagcctcccgagtagctgggattacaggcacctgccaccacgcccagccaattttttgtatttttagtagagacggggtttcaccatgttgaccaggctggtctcgaactgctgacctcaggtgatacacccacctcagcctcccaaagtgctgggattacaggcgtgagccaccgcacccggccgattgctgtt

SEQ ID NO: 138374 - DNA, 1838 bp, Homo sapiens; identical to SEQ ID NO: 138373

SEQ ID NO: 138375 - DNA, 1838 bp, Homo sapiens; identical to SEQ ID NO: 138373

SEQ ID NO: 138376 - DNA, 1838 bp, Homo sapiens; identical to SEQ ID NO: 138373

SEQ ID NO: 138377 - DNA, 1838 bp, Homo sapiens; identical to SEQ ID NO: 138373

SEQ ID NO: 138378 - DNA, 2376 bp, Homo sapiens
acagaaaagctgtcagcataattgaattttctattaatagtttgcttttttctcttactatatcacgagcatttttccatgacagtagtcttctttttttttttttcagctacaccaaaattgcattgagccaaacttgccaccaagagcccaacaatcaccatgatgctgagcacggaaggcagggaggggttcgtggtgaaggtcaggggcctaccctggtcctgctcagccgatgaagtgatgcgcttcttctctgattgcaagatccaaaatggcacatcaggtattcgtttcatctacaccagagaaggcagaccaagtggtgaagcatttgttgaacttgaatctgaagaggaagtgaaattggctttgaagaaggacagagaaaccatgggacacagatacgttgaagtattcaagtctaacagtgttgaaatggattgggtgttgaagcatacaggtccgaatagccctgatactgccaacgatggcttcgtccggcttagaggactcccatttggctgtagcaaggaagagattgttcagttcttttcagggttggaaattgtgccaaatgggatgacactgccagtggactttcaggggcgaagcacaggggaagcctttgtgcagtttgcttcacaggagatagctgagaaggccttaaagaaacacaaggaaagaatagggcacaggtacattgagatcttcaagagtagccgagctgaagttcgaacccactatgatccccctcgaaagctcatggctatgcagcggccaggtccctatgataggccgggggctggcagagggtataatagcattggcagaggagctgggtttgaaaggatgaggcgtggtgcctatggtggagggtatggaggctatgatgactatggtggctataatgatggatatggctttgggtctgatagatttggaagagacctcaattactgtttttcaggaatgtctgatcatagatacggagatggtgggtccagtttccagagcaccacagggcactgtgtacacatgagggggttaccttacagagccactgagaatgatatttataatttcttctcacctcttaatcccatgagagtacatattgaaattggacccgatggcagagttaccggtgaggcagatgttgaatttgctactcatgaagatgctgtggcagctatggcaaaagacaaagctaatatgcaacacagatatgtggagctcttcttaaattctactgcaggaacaagtgggggtgcttacgatcacagctatgtagaactttttttgaattctacagcaggggcaagtggtggcgcttatggtagccaaatgatgggagggatgggcttatccaaccagtctagttatggaggtcctgctagccagcagctgagtggtggttatggaggtggttatggtggtcagagcagtatgagtggatatgaccaagttctgcaggaaaactccagtgactatcagtcaaaccttgcttaggtagagaaggagcactaaatagctactccagatataaaagctgtacatttgtgggagttgaatagaatgggagggatgtttagtatatccagtatgattggtaaatgggaaatataattgattctgatcactcttggtcagcttctctttctttatctttctttctccttttttaagaaaacgagttaagtttaacagttttgcattacaggcttgtgattcatgcttactgtaaagtggaagttgagattattttaaaacttcaagctcagtaattttgaacactgaaacattcatctaggacataataacaaagttcagtattgaccataactgttaaaacaatttttagctttcctcaagttagttatgttgtaggagtgtacctaagcagtaagcgtatttaggttaatgcagtttcacttatgttaaatgttgctcttataccacaaatacattgaaaacttcggatgcatgttgagaaacatgcctttctgtaaaactcaaatataggagctgtgtctacgattcaaagtgaaaacatttggcatgtttgttaattctagctttttggtttaatatcctgtaaggcacgtgagtgtacactttttttttttttaaggatacgggacaattttaagatgtaataccaatactttagaagtttggtcgtgtcgtttgtatgaaaatctgaggctttggtttaaatctttccttgtattgtgatttccatttagatgtattgtactaagtgaaacttgttaaataaatcttccttttaaaaactggaaaaaatcttgaactgattgatttttattatgttctgtcatatgggcacactgattgactttacaattccctcaa

SEQ ID NO: 138379 - DNA, 1621 bp, Homo sapiens
cttgcaccttctgctttccttcctgatacccccttccacagcccatttggtgcaggcattgtacttagagagggcaggtcgtgtagggggcgggtggggagtgctggtcttatagtctaagagagaaataagtgattactcaaagaagaaacataaaaggccacagccaagggccgggagtgggtagggggatgcagaccctcccctgtaactgaagatgggtaaactccaaccacaaggcgatgatgccacttgtgggccctcagattggagaggacggagatgagtgacaacgcgtgcgcactggggcaccgagcacagaccagagaacggggatgtctgtgcgtgcggagtggaggaggggggagttcctggtgactggccgccggcccttggtgggtggtagggggtgctggggaggagggcgagctcggcggtgacgcgcggtcctcacgtgacccggagctgcagagctacgcagccttcgttgcagtcgtcactcgcatctggctaccagctccccgctgccctgcgctcggcgggctggcatcgggcccggggaaagcggagcaggtaagggccctggggcccgcgcgccctggccaggccggcagaagctcactgaccccggcagcggttacggggcttgagggggcggtggtctatgctgcctcaagttcgaggagcctttgcctctgattctccctagcccccttgcccccgcctacatctgtgcaggcgaaccgtgggctttgatttgtggggagattgtctctgccagagggaaatacagagattgagatgcccatcgctctaatcactggccacacatgtccgctcgcttcctgctcaatttagtggaagggatgcgccacggtggcgtttgcagagaaaatggtgggccttagagactggacggtggggttggtaagggtggtgtctcagactgtggggagggacgtttgataaccaggttcctgaacccggaaaggcgagtattgggatctatgtcctgggctctagaccaacactaagtggttttactctctcctgtctgtcggacagtagttcggtgtagcactgtttgcggcgaggagaaaggaaggagaggagaaaactgcactggatcaaggaggttagtgtgagtacagacactatctaaaccattggagttccatatgaattctatgacaggaacttaggtgcggctgtctgaatgggatgtggggtggggctagcttggggactttccctaaactgcattttacttaccaagcttaggacttttaaattgtatgttgaagaccaatgaagacagcaaacttttctacagatgcttttatttgcatttcagataatattgagaaaaagataaattatattaaagaatattattattattattattttttagatagcctttggtggggaaggatagtgattttgtagaagcaaaaggcttcccctatagcttttctcttctgctggagactcctagagataggttgaaagggacgtggacagcagtaggttgtggttctagagtatgggatctggggtctcccatctctcctgccatccttcagttttccagatccctctacctacctgaccatcttgg

SEQ ID NO: 138380 - DNA, 4076 bp, Homo sapiens
cccaagcaagaggattgcttgagctcaggtgttcaagaccagcctgggcaacatagcgagacttcatctctacatataatttaaaaattagctgggtatggtggcacagtctgtagttcctgctacttgggaggctgaggtgggaggatcttttgagcctgggaggtcgagactgtggtgagccatgatcttgccactgcaatccagcctgggtgacagagtggggctctgtctcaaaataaataaaaaataaaataaataaaataaaataaaataaaataaaataacgtgcctctgtctgttgccttttacttttcctgcctcccttttccatccttcccatttcagtgctggggaagccccaggcttttttttttttttttttctgccagcaaatgggtctctaaatccaggcaggcaggtacagggacctatgtcttagatggtaagtgtcacaagtacttaacatccactctcttctttttctccatctgttccaaggtcttcccataggcctgcagtagggctgtttaccattggaagcaagggaaagaggaggagatcaatctagaagcatggaggttggtgtgaagtgggggtagtctctggggatgacaagagagggtgggcataggaggtgggtgagatttaagagggtctcagtggagtgctggattgccacagtgctgccatgcctcctgtggatttcagtgcaggaaatgataggaatatgggggtaagggtgggctggagtatgactgggggaagacttgatggggggaccatgagatggtacacattagtatatagaacctgggctctggcgaggcagacattggggtcagggatcaggttgcttgtctgttctaccagggactcggtttccattacctactgtttgtttacttgtccatagatctgcctgcatgtctgctgcagggcttaagatcactggaagcaaagaaacaaagaggagattgctcctgatcagtatagactggtaagagtgtggggactgcctgggtagacctctagagtgggttggtggagaccagtgtgcatccagtaaggaccagtgaccagtctggaggatgaggatcctcagtctctccttttccagccacctttcccaccatccctgtcatttactccataccctcaccttaattctggtacagggaaaagagtgtgacagtgtcttagggagtggggtggactgagaaacgtagaaaggtagtttgctaataatatgtctgtcccatcaagaacaaactctctactcccatctgtccctccatctgtctgtctgtctctaggtccagagatctcatgaatttatgtatctactttagggtgtactgccaagagaagcaagaggagaggagggaactgcctcggatcattacaggttggtatgagggtggggccctgtagacaggtgaccagagtaggtccagtagaaatcaaagtctgggacttcttggttgctcccatttatcgtcagacctcctaccatcctttccactgttcatttggtgtatagaaatgtgtatagaagtatcttggaagaaaattattgggcattggggaaggtggagagaagatgaaataagaggaatggagaggctgctaatcatcctctcttccaccaagcacatggttctaccattttctgttcctctgtgtatctatctgtatgatgcaacaaaatcagaagagaaattttagtccatttccttcctccacttctaggtccacctccagaggcagctgtagtggcctttgagtggctgaagaccagcaccctcacaggcctacacccacaactaccactctctttaccccagcccgagtgcgctctaccataccttgttcgtgcttttagcaggggtgattacatgggccgcattcaggaagtgggctgggtgactgcaggactggtgatctgggctggcacctgctactacatttacaaatttaccaagggaagagcccagagtgtgaggactcttgccagaaatggatccacagttaagatggagactgtggttggggtacagagccagaccttggccataaatgaagcagagattaagactaaaccccaagtcgagattggagcagaaactggagcaagaagtgggcctagggctgaagtagagaccaaggccactgctatagccatacacagagccaactctcaggccaaggcaatggttggggcagagccagagactcaatctgagtccaaagtggtggctggaacactggtcatgacagaggcagtgactctgactgaggtcaaggccaaagccagggaagtggccatgaaagaagcagtgacccaaactgatgctgaggctggcaaaatagttaagaaagaagcagtgacacagaccaaggctaaagcttgggcgctggttgccaagacagaggccaagagagaagcaatgacccagaccaaagctgaaactcatatattggctgaaaaagagacagagattaacagagtaatggttacacagagtgagaccttggcagtacccagggaagtggccaagatgggggccacgaacaagactggaattgtggatgaaaccaagacaagagctctggaagagactgtgagtgtggctaagactcagtctgaggccaggcctggtgccacagttgatgctaggggaaatcccaatggcatgtccagggaggtggctggagtggacatgaagtcctgtgcacagtctcaggctgtgaccaagatccagggtgatgacatgcctggtactggggttgaggacatggggaattgtaaaaccatgtctagggcagagtctggggcagacacgagggcttctgctcagcctcaaatttttgccaaaacccagactgaggccattcctggggcaaagattgatgccgggggtaacaccaatgccatgtgtaaggtgggggcaggggcagatgtgagagcttgtatacaacctcagactgtggccaagaaacaggctgaggtgacgtctggtgccagggttgatggtaggggaaataccaatgtcatatctaaggcaataactggagctgacatgagagctgctgctcagcctcaagctgttgccagtactcacgctgaggccatgtctgatgctaaggttaagaacagaggcaatcccaatgccatgactaaagcaggggccaaggcaaacttgagggccaattcccaggttgaggccttgcctgatgccagggataagagcagaggcaatcccaatgttatggctaaggtgggggatgggacagacatgttgtcctgtacacagcctcagcttgtggccagtgttcaggctgataccttgtctgatggcaaaattaaggtcaggggcaatgtcaataccatgcctaaggaaggagctggggtggatatgaaggctcaaggtatggcccagagccagggtgaagccttacctaatactagaggtaaggctaggggcaaagccaaagccaagtgtaagacagggcctgggatggacatgaaaacctgtacacaacctcaggctggggtcaagaccccagctgaggccttgcttgattccagggttgatggtaggggcaatcctaatgccacttctaaagccgggactaaggcagaccagagggtctgtggtcagcccctggttgtggccaatccccagggtgaggccttgcctggtgccaagaataaagtcaagggcaatccccatactgtgcttaaggtgggggctggagaaggtacaacagactctgcccagcctgaggcagtggtcagtttccagggtgaggccttgcttggcaccaagaataaagttaagggtaatcccaatgttgtgcttaaggcagaagttggggaaggtgcaatgggcactgcccagcttcagattatggccagttccaagggtgaggccttgcttgattctaagaataaggtcaagggtaattccaatgctgtgtctaaggcaggggctgggacagatacaacaggctctgtccagccccagattgtggccaattcccagggtgaggtcttgcctggtgccaagaat

SEQ ID NO: 138381 - DNA, 4843 bp, Homo sapiens
gctctgcccagcctcaggttgtggccaactcccagcgtgagaccttgcctggtgccaggaataaggtcaagggcaattccaatgctatttctaaggcagaggctggggcaggcataatgggctctgtccaggtccaggttgtggccagttttcagggtgaggtcttgcctggggccaaaaataaggtcaggggcaattccaatgctgtgcctaaggcagaggctggggcagatacagtgggctctgcccagccccaagctgtcgctaattcccagagtgagaccttgcttggtgccaggaataaggtcaagggcaataccattgctgtgcctaaagcagggactggggcaggcacaaggcactctgcccagcctcagattgtggccggttcccagggtgagaccttgcctggggcaagggacaagtctatgtccacttctgaggcagaagccacagcagaagatgaggcctatgcaaagcctgaggctgaggccatgcccacttctgagagtgagggtgggtcaggcactcaagcctgcagaaagactcagcctaacatccatgactactactggaatgggattggtgttgaagactggattgctgctgagcggtggatcaaatttaggtttcagaccatggatggagactgggaaaatagcgtgtcctgggctgatgatgagaatgaagccagtattgggtcctggagtggggctagtgataaggctgggattattcggtcttgggctgtggcttgtgatgagaccagtgttaagtcctgggctggggccagggctgagaatgtggttggtattgggacttgggctagagctggggagcaggccagtggagggctctgggctgggggtcagactagtgaggggacctgggctggggacaaggccagtggaggagcctggactggggctgagaaccaggccagtggggggtcttgggctctcgctgggaatcaggccattggagagctttgggctgcgggtcaggccagtgatgggtcctggcctgggggacaggccagtggggtgtcctgggttggggaagaggccattggagggtcctggactggggctgagaaccaagccagtgaagggtcttgggctggagctggggctgggaatatgagtagtgtttcatactgggctggggttgtggatcaggccggtggagggtcctgggctgggactagtgatcaatctggtggtgggtccaagcctagatttgaggatcaagccagtggagaagggtcctgggctggggctggtggccaggctagtggagggtcaatgttggggcctgaggaccagtccagtggaaggtcttgggctgacactgcagaccaagccagtggagggtctaggctgggccacgtagatcagtccagtggtggggcctgggctgggacacttgatcagtctggtggtgggtccaagcctagatttgaaaatcagaccacagaagaagggtcttgggctggggctggtggccaggctggtggagggtccaaggtggggcctgaagaccagtccagtggaaggtcatgggctaactctggggaccaaatcagtggaggattcttagttgggattgtggaccaggccaatggagggtcctggactggggctgggcatccagctagtgttgggccaaagcctatatttgaggatcaggtcagtggcagagggtcctgggctgatgccagggagcaggttgttggagattctaggctggggcttagggaccagtctagtggagattcctgggctgacactggggaccaggccagtggatggttctgtgtttgccctgggagtcagacgaatggagggtcttggggtggggctagtggccaggatgttggagggtctaggccagggcccacgaaccagtccagtgctgggtcctgggatagccctgggagtcaggtcagtggaagctgctggactggggctggggctgtggatcaggctggtggttgttccaaacctggatttgaggatcaggccattggaggggggttctggcctggtgctggggaccagactggtggaggctccaggccagggtctgaggatcagtccagtggaataggttcctggggtgtggctggtggccaggtccttgggggagctaggccggggcctgcagaccagtccagtggtgggtcctgggctggcactgggaatcagtccagtggaaggtcctggattgggcctggggatcaggctgttgactgttccaagcctgaatttgaggatcaggcttgtggaggaggctcctgggctggtgctgggagccaagccagtggagaatcctgggctggatctaggcctgggaatgaggccattggaggatctaggatgggatctgaggaccaggccactggaggatcctgggctagatctgaggaccaggccagtggaaggttccaggtcagttttgaggtggaggccaatgaaggattctggtttgggcctggagctgaggccgttatagggtcttggtgctggacagaggaaaaagctgatattgtgtccaggcctgatgataaagatgaggccactactgcatccagatcaggggctggggaagaggccatgatttgttctaggattgaggctgagaacaaggctagtagtggctcctggattagatctgaggaggtggcttatatgggctcctgtgtaggggctgaggctggggctggggctgaggctggggctggggctgaggctggggctggggctggggctgaggctggggctgaggctggggctggggctggggctgggcctgggactgagtctggggctgggatttggtcctgggatggagatgcaaccactgtagagtctaggcttggggctggggaagaggctggtgtagagtcctggaccttggctaggaatgtgggagaggatgagctaagtagagagtccagccctgatattgaggagatcagtttaaggtctttgttttgggctgagagtgagaacagtaatacgttcagatctaagagtgggaaagatgccagttttgagtctggagctggggataacaccagcatcaaggataagtttgaggctgctggtggagttgatatagggtcttggttctgtgctggtaatgaaaacacaagtgaggacaaatctgcacctaaggctaaagccaaaaagtcatctgagtcaagaggcatatatccgtacatggtccctggggcaggaatggggtcatgggatggagccatgatctggtcggaaactaagtttgcacaccaaagtgaggccagcttcccagttgaagatgagtccagaaaacaaaccaggactggggaaaaaactcggccctggtcttgccgctgtaaacacgaagctaatatggatccacgagatcttgaaaaactcatttgcatgattgagatgactgaagatccttctgttcatgaaatagccaataatgctttatataacagtgctgattattcttattctcatgaagttgttcgtaatgtaggtggaatttcagttattgaaagcttgctcaataatccctaccccagtgttaggcagaaggctttaaatgcactgaataatatctcagtggctgctgaaaaccataggaaggttaaaacttacttaaaccaagtatgtgaagacactgtcacctatcccttgaattcaaatgtgcagttggctggactaaggttgataaggcatctgactattaccagtgaatatcagcatatggttacaaattatatttcagaatttcttcgtttgttaacggtgggaagtggagaaactaaagaccatgttttgggaatgcttttgaatttctctaaaaatccatctatgacaaaagacttgctcattgccaatgcaccaacatcactgattaacatttttagcaagaaagagacaaaggagaatattcttaatgctctttcactatttgaaaatataaattaccattttaaaagaagagcaaaagcatttacccaggacaaattcagtaaaaattccctttatttcctattccaacgacctaaagcatgtgccaagaaacttcgagccttagcagcagaatgcaatgaccctgaggtgaaagagagagttgagctattaataagtaaactctgattggctgtatgttcccaaacaaatttgagtaatattttggttttgcactctggaagtaatgcacattgtaaattgcattataactttgaaactgatgttacctatgatggtctatagctggaccattttatgaacaccaaatgaattcaagcttgtactaaaaatacatgtgttgatttttatcttgtctggattgagatatttttagtatgcttcatgagcagaaactgaatggattcttcataagtaaggtaatctttggtcctttgtgtggacttatgtttatacatttaagactatttttatgtcatcaataaagttgtgtgttttaagcagcagaaaaaagtcattgtccttgtccttgagtttatgatctgtttggaaaggcaagatatatggaaacaaaaagatagcaataaaactgggagcttccaatcatggccagatgcctcctatcagtgtttagaggcggcagaaactgctgcaggcaacagtgctcaaggaaagttttacaaaggagggggacccttaggtaagctgggcttcaaggatacaaaaggatcagaagggcactcaagatggaaggagtgatgggaaaaaaggcatggagatgggaatccttctccagagagaaatgctggcctgcttgaagtgcaaagtgtagggagggtagtgacgagagagag

SEQ ID NO: 138382 - DNA, 1064 bp, Homo sapiens
attgggactccccgaagtgcttttctgtccgctgagccttcagtttctgccttgttgcctgtgtctgcagatcttggggccggaggccagtccaacccttggagcaggaagaaacgcaaagttgtcaagaaccaagtaggtcataataagggtgatggcattatttgggggtggagcatggtggcgactgcaactcgaatgggcccgtggaccccttccatatccccctccttccctcttatctacaccatttcggagcttgcaaaagaaattgttctgcaagtacaagacagggaagaaaatagctgagaaggggtgggcgtcaagagagtccaggggttgggaggacgttactccaaattactgtttggggtacagggtccttggtgttggtccgtcgaccaagcactcacttctgaagtttgtcagtcttgaaggtttagtggaagcggaaaccgaggtgagggaggtaagaaattgctccggagcagaggtagttggtataatgacacggggtggggggggggggcggcggtgtcctggtacatttgagatggaggagttggcggaggcaagggcggagttggagacctttaggcatttcacgccagtacggcttttagatattctcacttcattttgttacaaggaaaatgttaacgatgaaaatgtgtggcgacatcttcggaggatgccaatgatgggagtaggggtggaggtggaatggagggttagaggaatcatcgaaggaggaagagggagggagataatgaattccaaagccgcagctctgtgaggagaggagggtaaccgaaggcgggaaacattgggcaaggcagttgtaaagggctaggaattcagaagagggatgtgtgccccgtcccgggtgagatctatatgtacccagagctctcagtacccctctccccgcgcccttggtctgcaggtttgcacgaagcagtgcacttggaagcaagaaagagaaggaaaaaaaactgcctggacctctgtgggtgcatgtgagggcgccactgttcacaggacatctggaagggcaggggtgg

SEQ ID NO: 138383 - DNA, 1936 bp, Homo sapiens
gaaaatttccaaacttagcttccgggtggaagaaaggaatcagtgatctagatatcaagccccgagtctctgccagtatctctgtatttttgtacgtttgtttgttttgttgttgtttcagtctgtttgcgttcaaagacacaaaaaggagcctgaaatctgaaatgcatcctttattcctaggtcgagctgcctcagagccggcccgcagtagctgcagactccgcccgcgacgtgtgcgcgcttctctgggccagagcgagcctgttttgtgctcgggttaagagatttgtcccagctataccatgggccgcactcgggaagctggctgcgtggccgctggtgtggttatcggggctggtgcctgctactgtgtatacagactggcttggggaagagacgagaacgagaaaatctgggacgaagacgaggagtctacggacacctcagagattggggttgagactgtgaaaggagctaaaactaacgctggggcagggtctggggccaaacttcagggtgattcagaggtcaagcctgaggtgagtttgggactcgaggattgtccgggtgtaaaagagaaggcccattcaggatcccacagcggaggtggcctagaggccaaggccaaggcccttttcaacacgctgaaggaacaggcaagtgcaaaggcaggcaaaggggctagggtgggtaccatctctgggaacaggacccttgcaccgagtttaccctgcccaggaggcaggggtggaggctgccaccccaccaggagtggatctagggccgggggcagggcaagtggaaaatccaagggaaaggcccgaagtaagagcaccagggctccagctacaacatggcctgtccggagaggcaagttcaactttccttataaaattgatgatattctgagtgctcccgacctccaaaaggtcctcaacatcctggagcgaacaaatgatccttttattcaagaagtagccttggtcactctgggtaacaatgcagcatattcatttaaccagaatgccatacgtgaattgggtggtgtcccaattattgcaaaactgataaaaacaaaagaccccataattagggaaaagacttacaatgcccttaataacttgagtgtgaacgcagaaaatcagggcaagattaagacgtacatcagtcaagtgtgtgatgacaccatggtctgtcgcttggactcagctgtgcagatggctgggctaagactgttaaccaacatgactgtgactaatcattaccaacatttgctttcctattcttttccagacttttttgctttgttattcctgggaaatcacttcaccaagatacagattatgaaactaattataaactttactgaaaatccagccatgacaagagagctggtcagttgtaaagtaccatcagaattgatttccctctttaataaagaatgggatagagagattcttcttaatatccttaccctatttgagaatataaatgacaacataaaaaatgaagggctcgcatcatccaggaaagaattcagcagaagttcactttttttcttattcaaagagtctggagtttgtgttaagaaaatcaaagcactagcaaatcacaatgatctggtggtgaaagtaaaagtcctgaaagtattaaccaaactctaatttggagtctgtcccaaacaatattgagatatttgcagttggtacgatgtgatttgtaaattctttgtttttcattgtgcgtatatggtaaagagatcttttcagctgctattttggaataatgactatcatatatcataacagtgactgatgttggttgtaatggttgggtttaggatgaaccattttaaggatgccaaatgaaatattagtatttgtacacagaaagaatttattgatttgatcttattacctagattgagattttt

SEQ ID NO: 138384 - DNA, 1083 bp, Homo sapiens
aggacggaacaaaaataacaaagtattaagaaagtaaaaaccacactctcattccagattttcttttctgatcgcttgttcctttcagatctgggactagatttcagaggaaatggtagactttcatagctcgggggaggggaggtggagggagaggctgctgtcccaggagcctagggaaggaagaggcaatttttcataaaagtacaagtggcccatagccccaggggaagatgccgtccctttctggtaatcggtggaagggaaacacaactacaaggtgatgagattatcgaagaagaaagagtaataaggcctggtgtgggggagggaaaggaggggggcgggccctcttctgccgcactgctggtgggaggggaaattggggacccgagttggtggatgacgtagccctcacgtgaccaagagctgacgtgtgcagaagtccttcttgtcctggtcgttgttcccgtctgagtaccagctccccactgccctgagggcgggccggcctgcggcggagggaaaaaggaagaggagaaggaaattgtcccgaatccctgcaggtcagtacctggaagattccataaagtcggggtgcttgagggcgtagggccgagaccgtcgcgggtactgaggcgcctccgtcgtctctcccactcgccgcccgctttccaagacatatgtcccgcttgcagcccatttcgatgctgcgaaacggtgagctgcggggtgtttggggaagagctcagagactgggaaatgggaatctgctgggagcctagggccgcaatccggaaagggagctgtggcctgggtgttggcccctagtccaccaggacagtgccggaggggaatggctggatatgggggcgggggtggtgagatgcaacgcgatatgtcagcagaaccccaagagaggtaataggggtgggaaacctctgacaaccaggcctccgaattagaaaagagttttgtgttctggggactagtccgtccaccaagcgctcagtggcggcagtttcccgtctttctgcctgtggctgtgtcttactgaccatggctctgtgtctagtgggtcca

SEQ ID NO: 138385 - DNA, 2237 bp, Homo sapiens
cagcggtgcctcctgggacagtggtgcctaccgaagcggcagcacccactgaggtgaccgagggtcctggggtagcagcacctaccaaggtagctgaagctcccggggtggcatcgcctaccgaggcagctgaggctcctgtgcccgcaacgcctactggggctgcagcacctactggggctgcagagtctcctggaacttctggttcccctagaacagcggtggttcctggaacatcagctgccaagaaagcaacccctggggctcacactggggctataccgaaagccacatcagcgactggagcggtacccaaaggtggaggcaagggtgtaaccaggtcccggaatgggggcaagggcaagggcaagaaaagcaaagttgaagtagacgaactggggatgggcttccgtcctggagatggggctgcagcagctgctgcagcctctgctaatggcggacaggctttcctggcagaggtccctgattctgaggaaggggagtccgggtggactgacacagagtcagattcagactctgagcccgagacccagcgcagagggaggggaagaagacccgttgccatgcagaagcgcccctttccttatgaaattgatgagattctgggtgtccgcgatctcaggaaggtccttgccttgcttcagaaatctgatgatcctttcatccaacaggtagctttgctcactctgagcaacaatgccaattattcatgcaatcaagagacaatccgcaaattgggaggcctcccaattattgcaaacatgatcaacaaaactgatccacacattaaggaaaaagccttaatggccatgaataacctgagtgagaattatgaaaatcagggccggcttcaggtgtacatgaataaagtgatggatgatatcatggcctctaacctgaactcagcagttcaagtagttggactaaaatttctaacaaacatgactattactaatgactaccagcacctgcttgtcaattccattgcaaactttttccgtttgctatctcagggaggtggaaaaatcaaggttgagattttgaaaatcctttcgaattttgctgaaaatccagatatgttgaagaaacttctcagtacccaagtgccagcatcatttagttccctctataattcttacgtggaatcagaaatccttattaatgcccttactctatttgagattatctatgacaatctcagagcagaagtgtttaactatagagaattcaataaaggttcccttttttacttatgcactacatctggagtgtgtgttaagaaaattagagccttagcaaatcaccatgacctcttagtgaaagtgaaagttataaaactagtgaacaaattctgattggttatgtaccgtcaaaagacttgaagaaatttcatgattttgcagtgtggaagcgttgaaaattgaaagttactgcttttccacttgctcatatagtaaagggatcctttcagctgccagtgttgaataatgtatcatccagagtgatgttatctgtgacagtcaccagctttaagctgaaccattttatgaataccaaataaatagacctcttgtactgaaaacatatttgtgactttaatcgtgctgcttggatagaaatatttttactggttcttctgaattgacagtaaacctgtccattatgaatggcctactgttctattatttgttttgacttgaatttatccaccaaagacttcatttgtgtatcatcaataaagttgtatgtttcaactgacaaaaagtcgttctaatgcttgaatttaaaacccagatggagagataaggtacataaatacaaaagtatatatacaaagatctatgaaaaataataataataaataaatacaaaaggattactaacagtacctgggcatatgctctttgtcaaatatacactatctgtttaaatgaagcagaggttgctgagaaagcttcaaggaggaagggcgcatttaagctgaaccctgaaggacaacatagaagggcattccaggagggggaaatgctttggagaaaggcatgcaagtgagaaatctgtgcctgtgataggaaggtagccaatttgcttggaatggaagccatgggaagaggaatgatgagagataaatgtgaaaattcagagtgaggaaagtttgaggaagatcctgaaccccaagccaaaatattgaaataatatcttgtcatattatgcaa

SEQ ID NO: 138386 - DNA, 1249 bp, Homo sapiens
tgtgggaagtgggaggtagagcccatagcagagaaatcgtggaaaatctcgaccctgaacccgaaaaggcagacgttgaggcccctcttctgcaggctaacgctaggcctaggggctggggagcgaaagatgggtgatcctgggaggggaacactgaattgtttggcaggagtcccccataccgcgtcccatccagcttttgctgcaccctcgccccgctcccctcccgcttcgttgcaggagaaggggtgtggcggtgtgtcctggagaaatggcggacgggggcggggcaaagcggaaggagggattgagtgcctggggagcctgcgcaggaggaggattgaggtgggaggggtggggtgagaagagttgaaggaattgagaggtagaatcatttgacattctgatgtgcaaacacgaaaaggcagttactgagacccttgtcctggatgctgatccatccaccaggctttcattgtctaacgtcgacagtctatatttctgctcttcagtctgtccttaggatgaagctctaactgaactgaagtaaggagaaacagccttgaatctttggagggtcagtgctggggttggaattgtctggggccccctggtgtgggtgtggcagagacaagagtagagtatgggaccagaggctcctcctgcatcttctctcttttaatttcaaagacacccttgccccaggccctttctttttggtgcagagaaaggggcgtggcatctgccttagttaatatttgggggaggagaggctgaagaggaaaagaggatccctgaggggggaaaacctttgacccacaggggcccaaatcaggaaaagaaccagaattcgtccaccaatggctcaaaaacgccctttctgatctgtcctcaggtctgtcttccttttgggctctgtgcaactgcagctacagtggaaaaaagcaaactgctcttgatcccaggttggtatgtgcatgagcaccatgtaggggccttgggggtagggggtggggcatcatagcagaatctgagatctctactgtttttccagctctctaccagctttacccatgtctgtactgcctctcgtccttccatttagatgctggaagttgtaggcattggcagagcaggctaaggttgaagatgtagaaaacgttaaactaggtctgtgaatcagcaaacacaggccttgacacctgtgtctgggtgctagcccgccaacgaagcattgtgtccctaaact

SEQ ID NO: 138387 - DNA, 1051 bp, Homo sapiens
ggctgggccacaggtgagtccagcgtcgccgcatccccggaatgcggccgtgagaagcaacgcggggccaggtgatagaagcccctagaagactagcattctcgtgattatggaggcccttctgtccttctgtgacggaagcaatgcggacctcggtttcctggacccattctgactcaggagccttcatgtatatgggtcccgccatgcctcccagtaagatgccagaaagctcaggagttagtgtctccagtggactgagtcagtgttactggggcagtggtttctccaagccctttaggaagatgatgacctcgacttttctctgcctgacatcctattgaaagaggagaccatggaagatgaagagctgaccaacctgagctggctgcatgagagcaagaacttgctgaagagctttggggagtcgatcctcgagtgtcagcccggtccagggcctggacgatgacagccaccgtccccacccactctgatatgccctaggatgccaggcagaaccccaactgcaatccccccttactcctttagctgcctcatatttatggccatcgaggactctccaaccaagcgcctgcctgtgaaagatatttacaactggatcttgaaacattttccatattttgcaaatgcacctactgggtggaaatactcagtgagacacaatttgtcattgaataaggattttaagaaagtggacgaagagaggagtcagagtattgggaaagggtcgttgtggtgcatagacccagagtatagacaaaatctaactcaggctttgaaaaagacactttatctcccacacccacatccacacgtgttcaatacacctcccacctgtcctcaggcatatcaaagcacatcaggtctacccgtctggccgggcagtaccttcttcaagagaaatggagcccttctccaagatcctgacattgatgctaccagggccatgggactccccctgaaatacaagcaggttttcctccaggagtgatacaaaacggagcgcgggtcctgagctgagaggactgtt

SEQ ID NO: 138388 - DNA, 2044 bp, Homo sapiens
catgtcctcccttacccgcattatgttgcagaaaatgataggctttgggagagaggaaggaaacataggaacccagatgaaatatggaaataaatacttttcattttttccccagcctccgtggtttgtctaggcatttcgtccctactaacaccactactactaccttgtagggatgtttgagttgtctctgtataggaattgtcagactttgagaatagagcagaggggcttggagatttaggagtgggagaaaaaggggagatagaaaatgtttgccaaacaggtacttatatccagaaagaaactgtgccctaggtgctggtctctaccaaaaacagcctcaactgtctcctgtgtcttcatttattggtctctgtttttgtgaatccctgtaggtagatctgtccccaggtctgtggaactgtcagttgtgaagttttgtaaaatggtcacccaacttaaaactaggaaattacgaagaagagaaaattgccctgtatctgttaaggttggtgtaaaggtacagggacaggggggcaacttcgactagagaattccatctcttctgttttgtcattttaccaattattcccatctgccccaccccctgctgctgctgatttagttgggagtcttggtaagttgtgggggtacagaatgctaagctgcctttcccactctccactgcttgtcctgctctcacgcttgaacctagtctaatctgaacgagggacattctagggcaatcactgaagaggaagatggtgggcaataggaaggaggaggaggagtagccctgaaacaaagcagtgggggagaggggataggaggagggaaacactagacaaaatctggaaaggcaagaataagggcaagggaccaaggtctgtcaccaggagatcagtttccacattctcctgtttgtttatttgtccataggtctgcctgtagatctgctgtagggcttgtcaccattggaagcaaggtaaggaggagaaagttactccagatcagtgcaggttggtatgagtgtggggattgcctgggtagacctgtaggatggagtagtggagagctgcttggctccagcaggggtcaagaaccactaaagggattcctcagcttctcatccagttttcctactccttatgctcctgtttggtgactggaaagaaggctgatggcacttggaagtgtagggagtgggtgaaatgaagggagagagagtttgctaattatctacctctctcacctagcactgaatcaccatattctcctgtctccctgtgctgatcagcatgaggagaaaaaagttggaagagactcaaagccccatttccttcctccacccctaggtcctacttcagtggcagatctggtggccttggagtggctgaagaccaccaccctccacagggctgggcccatgcacagccatccttccctaccttgagtgagcttcctctgcatgttttctatatcactggcagagcctgtagttggaaaggggacagagtgactactggactttgtgtgaaaacaccaaccgggacaaaacttcagtcaaggctgagacgggtgggggtatataacttgtccttacgttaaacttggaacatggttgactctgggacagaagcaagggctagaggaaaggctgaggctggcctgcaagatggaatcagtggtcctgccactgctagagtgaatggtaaaacccaggccgaggcagtggctgaggcagaactgaaaacagaatcagtgacccaggccaaagctggtgatggagcaatgaccaggacacatacagtgacctacagggaggctatggctgtgacaagggaagtgatcaaggtggaagatacaactaagactagagtcatggttgagactaagacaaaacccctggcagaacgcagtatagtgccacaaaccaagtcaaaggccatgcctatgtctagggtcagtactgtaaccaagtctgaagtcaaggttgttgctgtcattgaggcaaatattaggtcctatgccaagtcacatg

SEQ ID NO: 138389 - DNA, 1075 bp, Homo sapiens
ttttcaggctacactgaaaatagacatctgttgggccaatttcaccatatagttcaccagaccaacctcagcctagttattcctgactacaggggactttaatttctgtgtacaacctttgaaactttgagatagaagaaggggatacattataagaaaacacagggtttggctcagcctcgaccaaaagagaagtctcagaaggaagctttgcttgaggcccataaaggacagtatagaggcaagtaaaactaaataggcaaaaacaagtccatgaccatggtgattgagacagacaagaggagaacaggcaagtgataggctggtgtgcaagttcatgagcatgcttgggggtggtgggtgggatttggaagaaaacagtgagtatgatgagtgagcacagttgcatctgtatcatggacttaatgcttatggattatttggctctgacatttagatttcagtggtaagtcagggttacacaggtgctagtgtaggcactgaggagtagaaagatgactgttgcaatttattgaactagaatcaattataggaggaaataaatagtgcttagcagtcagagtatcttatttcaatcttttatttgctcaaaggttttaaaaataataatctatttgatacatacccatacaaagctaacatatgaaaagcttaaagtagggcctttatcacttcaatacatactaaccaatacaagaccatgttttctaagagtactgacaacaaattgtccaacacacattttaaagtctcacacagtaaaatttgtcagcttttggtagaaccattcctctgtcagtaaatatcttggaataaagatcctagcacctgcagaattaccacagaagcttgtgcaaatgtgattttggacataattataaaacagtaaaggggattggtggctgtattggtgagatgagccctaaaatatttctcagagactgaagcacaggtaaagaaaggcaatgggaatagaattcatcaggatggtgagtgtattctgttcctactcctgctattgttaccaaccaacacagtgggtgggttcagtcgt

SEQ ID NO: 138390 - DNA, 1067 bp, Homo sapiens
cgtgggaggtgggtcgcgttcgctgctccgggccctgattccggaaaggggcctgtggggccccgtgtcctgggtgctgtcccttcccacagactccaggttgatgtcaaagtctgtctgcgcggtaggtctggcgtattctgacaggacacagtgagcatctgtagaggagaggcttgaaataaaggaggagcacgaatattccctggatttctggaggtgtgtggggatgtggggtgggtgccaaacactggagaaccgaatcggggtgggggactgcgaccagagcaggtcaggcatccaggagcacctcttaatcttcccctctctaatggtgttccaggcgcttcccccaccttccatccccatctgcctcccccaccgtcctaaactgggggcttgaaagggtgagctttggaggtaggggtgatgagggagacatactgacaagtaccaattcacgacctgttttctagaatatgtggcgcccttcccccattttctgctgcgcagagcaaggggatgtggcgcacctagtggtgaatcctcagaattggagaagggagtaatgagaagagtatgacgtcaagagaaggagttgttatctctagaaccttgaagcagggcctaaacaaaacgagaatattccaccagcaaaaccccgaatgttgaaagacagatatcaataatatggggattcttatccttagcgttggtctctctaccaagggctttactgccacccctcatttcctgtcttactttttcatctgtttgtccataggcctgctttaaggctggccagttctgcaagaaaggcaaggaggaggagactggctcacacctctggaggttggtgagaagggggagggggcaattcaggggacagttggagaaagagagcatggcaggtggctttgagaccagtgggtgcagacccacttctactctgctggatttgcacagtgccagcatcctttttatttcttgcaggggacatgagataggtgtaggttgtgttgtgactcagaaagacctgagagcagggaccaggacacaggaaacca

SEQ ID NO: 138391 - DNA, 1426 bp, Homo sapiens
gaggcagccggtccagagagactttctcaaagcccagctgtcccacctagcattcaacatcagtctcactgcatatgtctctgcatgggatgacataattggaagagactcaaagccccatttcattctctctccctagatccacctccagtggctgctctgctggtggtggggttgctgctgacaaccaccctcaacgggtctgcacccatccaggaaatctctgtcttcctcaagcttggttgtgcctgttctacactctatctgtattattgaattactgactgagactgtgtttgggaaggaggctgagtgactactggactggatattgactctaactcttgtttccaagcttatatcctcaatcacctaaagatcagagtgtgaagaaacaaacctgtgacagatctgtggttgaggtttagactgggggaggagtatagtactggactttctttgtaacttgtaccatgactggggcagagattgagtctggtgcccaggtcaagcctgaaaagaagcctggggaagaggttgtaggtggggctgagatagagaatgatgtccctctggtggtcagacccaaggttaggacccaggcccagataatgcctggggcaaggcccaagaataagtccaaggttatgcctggagcaagcaccaaagttgagacaagtgcagtgggtggggcacgccctaagagtaaggccaaggcaatacctgtttcacgatttaaggaagaagcccagatgtgggctcagcccaggtttggtgctgaaagattgtctaagacagagagaaactcccagaccaatatcatagcctctccacttgtcagtactgattctgtcttggttgctaaaacaaagtacctgtctgaggatagagaactggttaatacagacactgagagctttcctagaaggaaggcccattaccaagcaggattccagccttcttttaggtcaaaggaggagaccaatatggggtcctggtgctgtcctaggcctacatccaaacaagaagcctctcctaattctgatttcaaatgggtagacaaatctgtgagttccttgttctggagtggagatgaggtcactgcaaaatttcatcctgggaatagggtaaaagacagtaacagatccatgcacatggccaatcaagaggctaataccatgtctaggtcccaaactaaccaggagctctatattgcatctagttctggttctgaggatgagtctgttaagacaccctggttctgggccagagataaaaccaatacctggtctgggcccagggaagatcccaatagcaggtccaggtttaggtctaagaaagaagtctatgttgaatcaagttctggatctgagcatgaagaccatttggagtcctggtttggggctggaaaggaggccaaattcag

SEQ ID NO: 138392 - DNA, 2319 bp, Homo sapiens
agaggccaaaaccaaggcccgagccagggccaagcaagaagccaggtcagaggaggaagccctcattgggacctggttctgggctacagacgagtccagcatggcagatgaagccagcatagagtccagtctacaagtggaggatgagtccataattgggagttggttctggactgaagaagaggccagtatggggactggggctagcagtaaatccagaccaaggactgatggggagcgtattggtgattccttatttggggctagggaaaagaccagtatgaaaactggggctgaggccacctctgaatctatactagcagctgatgatgaacaggtcattattggttcctggttctgggctggtgaagaggtcaaccaagaggctgaggaagagaccatttttgggtcgtggttctgggtcattgatgcggccagtgtggaatctggtgttggggtcagctgtgagtccaggacaaggtctgaggaagaagaggtcattggtccctggttttggtctggagaacaagttgatatagaggctggaatcggagaagaggccaggccaggagctgaagaagagacaatattcgggtcctggttttgggctgaaaaccagacctatatggattgtagggctgaaactagctgtgacaccatgcaaggggctgaggaggaggagcccattattgggtcctggttttggaccagagtagaagcttgtgtggagggtgatgtcaacagcaagtctagcctggaggacaaggaagaggccatgataccatgttttggagccaaagaagaggtcagtatgaagcatgggactggtgtcagatgcagatttatggcaggggctgaggagaccaataataagtcttgcttctgggcagaaaaagaaccctgtatgtatcctgccggtggaggaagttggaagtctaggccagaggaggaagaggacattgtcaattcgtggttctggtccagaaaatacacaaagccagaggccattatagggtcctggttatgggctacagaagagagtaatatagatgggactggagaaaaggccaagttactgactgaagaggagaccataatcaattcctggttctggaaagaagatgaagccatttcagaggctactgacagagaagagtccaggccagaagctgaggagggggacattattggttcttggttctgggctggagaagaggacagactagagccagctgctgagactagagaagaagacaggctagcagctgagaaagaaggtattgttgggtcctggtttggggccagagaagagaccattagaagagaggctgggtcttgcagcaaatccagtcctaaagctgaagaggaagaagtcattattgggtcctggttctgggaagaagaggccagtccggaggcagtggcaggagtcggctttgagtcaaagcctgggactgaggaggaagaaatcactgttgggtcctggttctggcctgaagaagaagccagtatacaggctggatctcaggcagtagaggaaatggagtcagagactgaagaggaaaccatttttgggtcctggttctgggatggaaaagaagtcagtgaagaagcaggaccatgctgtgtatccaagccagaggatgatgaagagatgattgttgagtcctggttctggtctagagacaaagccattaaggaaactggaactgtggccacctgtgagtccaagccagaaaatgaggaaggggccattgttgggtcttggtttgaggctgaagatgaggtagataacaggactgacaatggaagcaactgtgggtccaggacattagctgatgaagatgaggccatagtggggtcctggttctgggcaggagatgaggcccattttgaatcaaatcctagccccgtgttcagggccatttgcaggtccacgtgttcagttgaacaggagcctgatccttcacgcaggcctcagagttgggaggaggtcactgttcagttcaagcctggtccatggggtagggtcggcttcccatctataagcccctttagatttccgaaagaggcagcatctttattctgtgaaatgtttgggggcaaacccaggaacatggtacttagcccagaaggggaagatcaggaatctttgcttcagcctgatcagcctagtcctgagttcccatttcagtatgatccttcctacaggtcagtccaggaaattcgagagcatcttagggccaaggagagtacagagcctgagagttcatcctgtaactgcatacaatgtgagctgaaaattggttctgaagagtt

SEQ ID NO: 138393 - DNA, 1021 bp, Homo sapiens
ccgagacccctggcgatggggaggcggtgaccggagcgggcctggccaagggctgaggggctggctcgggaggcaccgccagatcgtttggaggagaaccgcgctgaccgcttcccagccagctttgcaggcgcccgcgccccgccctcgacggtgtctgtgcccggagagggctgtgggggaggctcctgcgggagaaatggcggagcgggagccgctgtgggggcgcccgggaaggccgttggggggcgcccggcgaggccggcgggggtcggcgtcccggctctgtacccagtccgccggaggtgagccgcgtttgctactccgggtcccgattcccgaaaggggcctgtggggccccatgtcctcggtgccttcccttcccacaggctccaggttgatgtcaaagtcttgtgtctgtgcggtaggtctggcgtattctgacaggacacagtgagcgtctgtagaggagaggcttgaaataaaggagcacgaatattgcctggatttctggaggtgtgtggggatgggggttgggcgctaaacactgattggggacccgaatcggggtaggggactgtgaccagagcaagtcaggcatccaggagcacctcctaatcttcacctctctaatggcgctccccccaccttccatccccacctgtctcccccaccgtcctaaactgggggcatgaaagggtgggctttggaggtgggggtgatgagggagacatactgacaagtactaattcacaacctgttttctagaatatgcggcgcccttcccccattttatgctgcgcagagcaaggggatgtggcgcacctagtggtgaatcctcagaattggagaagggagtaatgggaagaatatgacgtcaagagaaggagttgttatctctggaaccttgaagcagggcccaaataaaacgagaatattccaccagcaaaaccccgaatgttgaaagacagataccaataatatggggactcttatccttggcgttggcctgtctaccaag

SEQ ID NO: 138394 - DNA, 1006 bp, Homo sapiens
ccacagccaatgcgagaacgaagtttcacgttctgaaaatgctattgaatttgtctgaaaatcctgctgtggcaaaaaaactattcagtgccaaagctctttcaatatttgtgggtctctttaacatagaagagacaaatgataatattcaaattgttattaaaatgtttcagaatatcagtaacattataaaaagtggaaagatgtccttaattgatgatgatttcagtcttgagccgcttatttctgcatttcgtgaatttgaggagttagctaagcaactacaagcccaaatagacaaccaaaatgatcctgaggtgggacaacaaagttaatatgattaaccacctgccgctgatcagccttatgttcccaaagagccctgagtagtgctttggtgttcacagtctgtttttttgttgtaacttatattttttaatgctgatgttaactttgtcaaactcttgttttgagctggatcattttgtggatgccaaatgaatatcaaaactgaaaacacatttgttgatatttgtcttgctgtccagattgcggtatttttcagtattaagttttcaatgaactgtgtcacctaagtaagctaccctgctattcgttgtttaaatatatggttctctatttgagtctgtgttttcaataaagttctatgttaaaattggcataagtgacccttcttcagtttaagaaccatgtacagataaatcgtgtgcacttacaaacataggtaattattagtatgacaaacatgcgcttattagaaaattctgttcttgagttaagaagggagagattattgtgggccctgatacttgaggaatgtttccgagaagagggacccacttaaattggtcaggatagaacaaattggtcaggataggagagcaagacaacttgcccgcctgcttgcccaattatgagccttcccaacaagcaacctaaaattaatacttcttataggacccatttaaattaccatcttagccct

SEQ ID NO: 138395 - DNA, 1035 bp, Homo sapiens
ggttcctctacccacaatacttctggcacagaatgtgtggatttttcacaccaagcaattctcttattctttgaggacatcagctaggtattctacaatttaattcaattctgatactacccagagttagtgcagacctctctggttaagggctcattcccataagactgccctccctcacttcagacaacagtcacaagtaatggatctccatgtcacccacacttctgtctgacttagctactagttggaagttcccacaaccccctcctcaggttcaataatttgctataagggcccacagaactcagggaaacactacttcctattactggttcattataaaggatataaatcaaaagccagatgaagaggtacatatggcaaggtccagaagggtcccaaatgcagaagctgccatccatgtggatttggggtacaccaccttcccagaatatgaatgagttcaccaacctggaacctctcagacatttgggatttttatagaggtttcattacataggcgtgattgatgaaatcattgaccattggtgattagctcaatcttcagcccctctcttctccttggaggtcaaggggtgaggctgaaagttccaaccctctaatcatgccttggtctttctggtgaccatccatatcttgaagctatctagtgcacccaccagtcatctcggaacataaaaaaagacacctatcactccagagattccaagggtcttagtgtcaagaacttgagactaaagccacatgtaacaaaagatgcttccgttatccctatcaggaaatagcaagggttctaggagctctatgccaggaatatgggacaaagaattatggttaccaaaggctggaaagggtattggggatggggtataaaaaggagttggttaatgggtacaacaatacagttagaaggaatatgatctagtgttcagtagcacaatagggtgcctatagttaacaatagttattatatatttcagtataattagaagaatagatttggaatgtcct

SEQ ID NO: 138396 - DNA, 2862 bp, Homo sapiens
gggtccaaagagactgggcactcctttagcctttctcactctcagcaagcttacctgccatctttgttcctgtttgatgcagagtaaaagaatgacagtgcttgggcaggacattgttgagcattagtggcagtgtgcaaggtataaaattaagtagcagagttttttattaatccacttctacacaattcatttctactctcctatgtccttctgtgtggctgtttgcatagagaagcacagttagacaagactcaaagccagtttctttcttcaacctcaggtccatctccactggtggctgtggtggctttggattgttggaagaccatcaccttcagcaggtctgcacttgggaacaatcattctcccccagcccgagcgtgcctctgccctctgtatcattgacagaggctgtatgtttggaaagagaactttgtgactgcagaactgacagttgactctaattcttgctaccaagtttttccccgacccagtgaaagagtgttaagacttcgacctaggacacattgagaaccaaggccaagactggacagggccatataactgggcttcaaccatggctgggactaagaataagacaagagcccaggccaaaactgaaaaaaaggctgctatacaagctaaagctggagcagagagggaggctactggtgttgttaggcctgtagccaagaccagggccaaagcaaaagccaagacagggtctaagacagatgcagtagcagagatgaaggcagtgtctaagaacaaggttgttgctgagacgaaggaaggagctctgtcagagcctaagactctgggcaaagccatgggagatttcactcccaaggctgggaatgagtccaccagctccacatgtaaaaatgaggctggtactgatgcctggttctgggctggggaagaggccactatcaattcctggttctggaatggagaagaggctggtaatagtttcagcactaagaatgataaacctgaaattggtgcccaggtctgtgctgaggagttggaacctgcggctggggccgattgcaaacctaggtcaggggctgaggaggaggaggaagagaatgttattgggaactggttttgggaaggagatgatactagttttgaccctaatcctaaacctgtgagcaggatagttaagcctcagcctgtgtatgaaattaatgaaaaaaataggcccaaggactggtctgaggtaactatctggcccaatgcccctgctgtaactccagctgtgttaggatttagatcccaggcaccatctgaggcaagccctccttcatatattgttctggcctccgctgaagaaaatgcctgttctttgcctgtggcaacagcttgccgcccttctaggaacactcgctcatgctcacagcctatccctgagtgtcgttttgattctgacccctgcatccagaccatagatgagattagacgtcaaatcaggatcagggaggtaaatgggattaagccatttgcttgtccttgcaaaatggaatgctatatggattctgaggaatttgaaaaacttgttagcttacttaagtcaactactgatcctcttattcataaaatagcacggattgcaatgggtgtccataatgttcacccatttgcccaagagtttattaacgaagtaggtgtagtgacacttattgaaagcttgctcagttttccttcccctgaaatgagaaaaaagactgtaattactctgaatcctccttctggggatgaaagacaacgcaaaattgaattacatgttaagcatatgtgtaaagaaaccatgtcatttcctttgaactcaccgggacagcaatctggattaaagatactaggacaactgactactgattttgtccatcactacattgttgccaattacttttcagagcttttccatttgctgtcctcaggaaattgcaaaaccagaaatcttgttttgaaactacttttaaatatgtctgaaaatccaactgcagccagagacatgatcaatatgaaggcattggcagcattaaaactcatctttaaccagaaagaggcaaaagccaatcttgttagtggtgtggccatatttattaacataaaggagcatatcagaaaaggctcaattgtagttgttgatcacttgagttataatacactcatggccattttcagggaagttaaagagattattgaaacaatgtaaaatgagccagagatagaacattttaagccatcttcaaactctagcaggctgtacattacagtgtacacattatacactgcatctttaacacagagtcacctgtgacaggctctaggtttgagctagactattttgggggtatcaaatgaatattataccttgggctgaaaatgtttgatttttatcttgtctagattggcatatttttaacattttacttaagatagcaaaccagttcgttttaagtaagctaacttgttcattagtatctgtggcttaaaatggcaaaaaagaaaatatccttgagtttgtaatctagttacagaagtaaggcatacacacacacaaagataacagtacctagagagagagtgtgtgtgagtgtgcgtgtctctgtgtgtgcacgtgcacgctcatggccaaatgtgcgcactctacataaaggaggcaggagttcctataggctatttaatgtaagagaaactatttttctcctgttccagctgtatcagatactcgttccgcaacacagaaatgactcagaatctcagacaaaatgtattatttgttcaattttaattttgctactacattcataactcttaaattgttaggctgtttcatttacatcaaagtta

SEQ ID NO: 138397 - DNA, 1051 bp, Homo sapiens
tgagcagctgggactacaggtgcatgccaccacatccgactaatttttttttttattttttgtatttttagtagagacagggtttcaccatgttggccaggctggtcttgaactcctggtctcaagtgatctacccatcttggtctccctgagtgccaggattacaggcgtgagccaccatgcccagcctcccccaaagcttcttaatgcccttttgtaatccctccctcccctctctccctgtgcccctaacccaggcaaccatgggacattttctgacaaaatagaattgttttcatttcctgtaattgtgtataaatggactcatatagcatgtactctttggtcgggaggggatctggcttatttcacttagtgtaattatttgagattcatccatatcatgtgtctcactatttcattgctttttattgccaagtagtattccaccatatggctttaccacagtttatttatccattcacttattgatggacatttgggctgttcagagtttggccattataagtaaagcagctatgagcatttgtgtacaagtgtttttatggacataggctttcatatctttggaatgacatctaacaatattgaatcttcgacccatgaataaaatctctctccacttatttaagtctcctttatttctctaagcagcattgtgtagttttcctgcaacatgcttttttagcagctgcatatattctgttatgtggtggtattacatgttatttaatctgttccctgatgatgaacacttacaggatttggtaagcatgaataattctatgatttggtatttaaatcttattctataggtgaggaagaccaaagttgtgatgggtaaagaagcagcagtcactaatattagccagaatgggggggggggtatttcatcatttttataattgggacaatgattttctgtgttaatacatgattacagagtagtcttgcttttgtcttgatacatgacattcatggagtagcctggtctgatgttaatgttctgtgaaattgtttcaattcaatg

SEQ ID NO: 138398 - DNA, 1002 bp, Homo sapiens
tttgaagaaagtcctatgatgcctacaacaaaaatagtaacaaaatatagtatatgtcataattctcacatggaatctaatcatgaccaatcacgtgaaaaatcatcattgcacgtcaactgtcagagctctgataaccaacatttaaaaatctcacttcctaataaaaattcttatttattgatctacctgcaccataaaacaactcaacatgaagaaatttcggtttcttcagactgagtttgcctagctttacaaatcattacagggcttttcctagctatacactgtacctcagacacagtaactgtgttttcctctatcacacacatctgctgaaatgtaagctatggctgaatcatttaatatctgcctgctaatggatatctatattctttatctgtttattcatgtaggctgaggtctgtacctttctagaaacctgaaacattggaattattcttttattcacagtaatagctatagcattcataggctatgtcttaccatgaagagaaacaacaatcacaaatttactatcaactattccatacgttggcaccaacctgttagaatgaatctgaggtggattttctcttgacaaggcaacttcacacaattcttcacctctcattttattctgccattcattgtttcagctctaattattgtgcaccttttattcccacatgaaacaggatcaaataacccaaggaatctcaaccaactcaaataaaatcccattccactcctatcacaaaattaaaggcattttaggatttatttttctactatcacttctactcaaacttgttttattctcccctgactttttaggaaacccagattatattccagcaaatcccctcaatataccacctcatattaaaccagagtgatatcttctatttgcctgtgtaatttaggatctactcccaataaactaggaggtgtcatagcccttgtgctcttaatcataattttagcaatcatcccaatcct

SEQ ID NO: 138399 - DNA, 1404 bp, Homo sapiens
tacttggaaatgtaacatcaagcaggaataagcccacatttccattatgtgtgagcttcagtgtcactgctgtgtgtgggaggggttctgggatggagttgaggaagaggaaaaacatcactgctcagcttccagttaactgagtggggataggccagacatcatcaccccatcccctgcatttcatgtgctttcttatcctcttactttcttctctattccatgtgctttcttatccccttactctctcttctagtttaacatcagagactctgaaagcctcttaggttactggagcaagaggaaagagacccaagtcacatcatggggacactttaggcagggcatacctttctgccagttttgtctatccaatgggataataatacccacgcctctagaccacccaggaatactctggaatttaagtgtgatcccatgtggcaatctgcggtcttatgtggtggggaagaaccagtgaactttcagctaagtatattaacagagcaaatgcagatatcccagaactttgtatggtgggcattaaatttatggtacccaactctgagctgtttaggtcaggatttttacaagtgtgatctatggaccacttcatcagatttgtccacagttgcttgctaaaattgcacatacttgaggccatcctagatctgcagaatcaaaaccagggaggtgaagtgagaggtgtctagattttgagtaatttcttttgttgtttctgttactcatccacaattgaaaagcaatgctatggatggcaacaaggtctataaaaagtttaaatcctttgatgtctaatttcattgttagttgctcctgctactcagctttaaatttctgtgtcttctcttgtgtgtccagtaggtaacaattttttcaatacaataattcttattcagtgatttatgtatgagacactgaagaaacatcatagagaataaaagaagaatccctggagctattgttctagtttggggaaactggcaataagcaggtaaacaaatcaatgagtgaggcaatttcatatggggatttgtgttttgaagaaaatgaacaggtagagtagaaaatgactgagacagggattattatagatggggttgtcagtgaagctctttctcaggaagtgatgcttgagctgagtcctgaacaacagaaagaagccaggcatggaaaggccattttgtcagtgtccctgtgctgtgtgtgggcaccattgatctaggagcagaggacaagttgaagtggctgaagcctggcacgtaagtgcagacaggtgggagatgaggttgaaagggcagacaagagccacatggtttggatcctttaaggagtttgggttttattctgagtgtggaaggctagagtacaggagtgacgtga

SEQ ID NO: 138400 - DNA, 1047 bp, Homo sapiens
ctcatcagtaaagtttaggttggggtgttcacagtgtagaggagtccctcccagagagcagagtggttatccttcattaccccaacctgtacaggcttttcagaccttcgcctacccctcttagtctccaggatactgtgaacatagcagcccagaccccattccgctgcccctctcctctgtcagtcacctcctgctggccctgccccacgttatgccttccagccagtgactatcaaggggcagtagagctacctggtgttccatcatatggatgccccagagtatgttgttgttgttgttgttgttttacagtcctcttgcacttttaagtttttttcaggcagaatttgaatcattcgaatggttccataaaggttaataagctaggtttttaggaaggtattgtattttttggtttttgtatacacttctttgcaaaaaagtttgatagtggaggtgcattggtgccaccttgtaacagaagcctgaactgcagcctgaactgcagcctgaactagtgtaagctggaaggtgaaagggagggactgtggtccaaacttacaagatagaactttctggaagtctgggcgtaaaaggtggcatacacaggcaaaaaaagatactgaaggcctctaagcaggaagtacaggtttttagtatgttaaagagaaagaggtatgtgagaggaactaaaagatcattttaatgtttatgtgttgagacttgtggttaaatagctagaagcctatataagcaaaaatgggatcagaccatttatgatttttgtaatccactttcactgttattgtgattacctttctgtgtaaatatatttttatgataacatttgaaataactacaacaaaattttagtgtcatttttttagtggcctgggtatcatctcatcatgtggatgccctaaaatttatttaattggtatcctaattacaaaaatttagttcccttactatttttttctattacaaacaatagtatacttaacactatgctcatatagatgcaaatgtctttgtgagcattta

SEQ ID NO: 138401 - DNA, 1093 bp, Homo sapiens
ctaccagcacacttccttttgcttcaggggatgtcagtctttttttttctatgcagacttccagttgattagatgaggcctacccacagtatagatggtaatctgctttacacaatatccagaaatttaaattttaatctcattcaaaaacaccaaagaaacatccagaataatgtttgatgagctatctgtgtactttagcccagccaagttgacatataaatataaccatcacacactaaaatattattcattatttatctggaattaaatttaactgagtgtcttctattttatctggctaccctacccatggaggactctgtgtcaaaccaaagtgttccaggcaaaaccccagctttgctggagataccagtaccagtcatcatccatgtgagtgagcctcttggatgtcccagatgtgtggagcatccatatgactgcatccccaggtgacagataccccatgaagcagaaaacgcccagctcagcccagtcaacacacagaatcctgagcgataatagatggctattttgggggacaatggttaaggagaaatatatatgcaaaacattagggttttggtgagctttccctctttttctgtgatctgttactgaataagaaagagattctcttatccttgaaggcttggtggaacttagttataattttgactataatctgagtgttggtttatatgtggatagagatttgtggacatatcattgattcctacttgaagagatttccaatggaaattttcacaatgtataaattttccactactattggaatttggagcctaataccgtaagatgagcctctactacagtcacgtaaattaaggtgttgagagtgtgttgctacaaaccacttcatactatgcagccataaaaaatgagttcatgtcctttgtagggacatggatgaagctggaaaccatcattctcagcaaactatcgcaaggacaaaaaaccaaacaccgcatgttctcacttatacgtgggaattgaacaatgaaaacacatggacacaggaaggggaacatcacacaccggggactgttgtggggtggggggaggggggagg

SEQ ID NO: 138402 - DNA, 1523 bp, Homo sapiens
gttccgctgcagcagccccccctccccacaccccagcccttctgcaggtctgcggggccaagtgtcccggcggcgcacctcgtggcgagaatcgggagaaggaggagactacaaggataggcccaggtcagtgcgagggacggtggtgggggcgggtgcagagtccagtctgaggtcccctcccaactcccccatctcccgtcctccattttggtgcctgccgagatctagggatggatctgtagggaaaatggtgggtttgggggcaggtaggggaagacacgagaggtgggggggggggcgggctcgaatgggggccccctagtgggcgcacgaaacctctctggtgggaaacgtgaaattaaacaaaacaaaacatgttgatagccatgacgcggaatcctgaaaaatgagtagccgtgcctctgtcctcggtactgaagcgttcaccagctgttcagccccttctctctccttttgtctcctaggagtaatggagtccaaagagaaacgagcagtaaacagtctcagcatggaaaatgccaaccaagaaaatgaagaaaaggagcaagttgctaataaaggggagcccttggccctccctttggatgctggtgaatactgtgtgcctagaggaaatcgtaggcggttccgcgttaggcagcccatcctgcagtatagatgggatatgatgcataggcttggagaaccacaggcaaggatgagagaagagaatatggaaaggattggggaggaggtgagacagctgatggaaaagctgagggaaaagcagttgagtcatagtctgcgggcagtcagcactgacccccctcaccatgaccatcatgatgagttttgccttatgccctgaatcctgatggtttccctaaagttattacggaaacagacccctgctttcgaatttacatgttcatgatgtgcccttgttgtaaacctttacctgtcacttgtttacgtgggtctcctattaccagcttctaattgaatattgtgtttttgaaccagtctgtaagatttttgttagcagaagaattttacctattgcatggaaagatgctcattatagtgaagttaataaagcacctttaaaaagcaatctctatattctttttttgttaaaaatttatattgattgtacttaatacatgaaaagaaaagtactgaaattaaatataccaaaggattaatatagggactcattctatgagatgggttaatgtattttttatattttctgtaatttaagaaaaattggaaacatttttaaataacctttgaaggcagtagagtcacttaataaatacttgctgatcagcactactcacaaaagcaaagacatggaatcaacataaatgtccatcagtgagagactggataaagtaaatatacatatacatcatggaatattatgcagccataaaaataaagaaatcatgtctgttgtgggaatatggatagagctggaggctattatccttagcaaactaatgcaggaacagaaa

SEQ ID NO: 138403 - DNA, 1418 bp, Homo sapiens
agtctgcaggtctgcggggctaagtgtcgcggcggcgcacctcgcgtcaagaatccggaggaggagactgcaaggataggcccaggtcggtgcgagggtcggtggtgaggcgggggccggaacgtgaggaaagcccagtctgagaccctaatccatgccttcaccctcgcccccctctaccccatgcaaccctccccttcccacacgccatcctcgtcctccattttgctgcctgcggaagcctggagatggatctacagggaaaatggtgggctttgcggaagggaggggctcggattgagggcaccccacagggcatactggcttctcaggtggaaaaaaatgaaatgttagagtataaagtcaagtccagggctctgaattttaaaaggtgcctagtagggcctctgtcctcagtgcttatcagtccaccaagaattcagcccattttctctctcttgtctcctaggagtaatggagtccaaagaggaactagcggcaaacaatctcaacggggaaaatgcccaacaagaaaacgaaggaggggagcaggcccccacgcagaatgaagaagaatcccgccatttgggagggggtgaaggccagaagcctggaggaaatatcaggcgggggcgagttaggcgacttgtccctaattttcgatgggccatacctaataggcatattgagcacaatgaagcgagagatgatgtagaaaggtttgtagggcagatgatggaaatcaagagaaagactagggaacagcagatgaggcactatatgcgcttccaaactcctgaacctgacaaccattatgacttttgcctcataccttgaatcctaaaagttttcgctgaggttaatgtgaacactgctttacaagcttgtatttttgtgatttactttttctgtaagccttttggggtttacacttaccagtttctaatggaaattagaattctaattgaatattgttttgtctcagcctaaaagttacggtcagcatggcaattcacctattttaggaaaaatactcttttcataatatgaaatgcataaagcagttcaaaaagcagtctgtattccatcatcttcctttttcattccagtccttatttttgtaagtattacttttcctcctccggctacctggactcaaaatctcagttgtctttgacagtttttttcttgtccctgaccaaaaaagaatgatcatacccagaattcaatgtttgatattttaagaatgtatgttctagtgtttttcagagtgagtctaccatctgtataaaaacaccttgggggcaggcaggggcatttaaaaatgtaggacctatcgtccagactcacagagtggggctccagaatctccatttttaacaaactctcttaagtaattctgatgtgtaccaaaatca

SEQ ID NO: 138404 - DNA, 2672 bp, Homo sapiens
atctaccacctttgcccatttcaatgctggataggattccaggggaaatggtggactgtaggggtcttggaggaggggaggtgggagtattgggagcagaagaaagagatgattcctcaaagaaggagaaatggtcgattacccctaaaaggctgatcctcctggtaatctgagaaaggcgaataaatactccagggcgaagataacagtttattgtctccgattggcaaatacgaaaaaagattgacagtatcaagtggagggaacgcagcgggcgggctgcagtgttaatgggaggggtaactggggactcgagctcagtgatgacgcgactctcacgtgaccaggagtcgacgtgtgcagaagtccttatagtccagggcctgtttccctgtagcagctccttattgctggagaaggagaaaagtgcccaagatcctttcaggttagtataaacgtgggcgctgacttggagaccctggggtcgaggaggccgagagcagaaagcaagcggggccggcactgctttccccacttctgttccgccaaactcccattttgtgcaggaaatttggggctgtttggtgggggatggcgggtggagagagagaagggtagctaattaagggtcctgagagagagacatagaaactgtttggaagaaacttgcttttcctactccctgcttgcagaaaaacggtgggcacggaggagggcggggttgccataaaaggagggcgaggatgaggacatgggaaactttacaccaacatggcctagaatcatgaaagggacccgtgatccaggtactagtctgctcaccaaacactcccatctgtctgcaggatatttggttttttgggcgcgacacaaatcgaggtgagggaagagagaggaaaatcccctgaatccctgcaggtcagtttttgtaaaggtgcaattgcttcaggtctcttcgggtgggggtggaagtgtgagtgacaccaaagcacatcctggggtcgcagcagcccctccccatccggattaagtgccagaggccggtgccgagcctgcagcggaaatgaggcgggggaggaggaggcttaagagacgctgaagggggaggggaggccagagactggaccagccgtctcaggtgagaggctggaggttgagagggcctgggaaagtctgaagggcgggagtgttggagaccagaggcgggagaagggttaattgcttccgtactgctcccatttcagtattaggagaggcttgtagcagggcctgctgggaagatggtgggcaggagcaggaggagaaagatggagctggaacgaaagggggcgcgaagggaggtggagtcaggggagttctgagcctgaggatccagctttctctagttggaaaacttttgacaattagggtactgagtcaaaaaaggccagtcgctatgggaccccatactctgactgctggtctgtttgcctggaatctagtagttttgtttccttgttttctaggattaatttattcaaaaaggaaataaaaaatactcaatatgcaaaagtcttgtgaagaaaatgagggaaaaccacagaacatgccaaaggccgaggaagatcgccctttggaggatgtaccacaggaggcagaaggaaatcctcaaccttccgaagaaggcgtaagccaggaagcagaaggaaaccccagaggagggccgaatcagcctggccagggatttaaagaggacacacccgttaggcatttggaccctgaagaaatgataagaggagtagatgagcttgaaaggcttagggaagagataagaagagtaagaaacaagtttgtgatgatgcattggaagcaaagacattcacgcagccgtccttatcctgtgtgctttaggccttgaattcatttttgcctaatattaaaatctggccccagctttctttctgttagcattttctgatgtatctttgacctccattttacttttaatcatctgatgaaattttgttttaggtaatttccttggtaccagcatctcattggattttggattttgacccattttccaggtctatttttcaattggaaactttcacacatttgcatgggaatatgttcattccatgttgtaaagtaaaacataacaggttatggcaaagcagcatatttaatatcagctcacatatgtaggataaaattccaaactttgtgtgtgtgcgtgtgtgtatacatacatccatataacatatatcacaaacttaaccaagcttatttctgtgtggtgtgaaattttatttgttttcttctttttgttctttttgcttatatgtactttttaatgaacacgtgtctcacacacaaaaagaattaaggattttttttacaagtaagagtcaaataatttgcaaccagcttatgagggcaatgggggcacctaaactcttgatgaaagaactttaaaaagaaatgtaaacctcaaattacctctggatctcttagccagaggaataaactggcaattattacagatacacacgtttaagactcagtcttttcatggggaaaatatttgcttcacagggctgcagtggggaagaaatgaggcagtaacagctgtgctcagtgagatcttgttcccacctgtgcatacggaatcccaacccactatagaagca

SEQ ID NO: 138405 - DNA, 1044 bp, Homo sapiens
gtccaggactggattctctccactcctttcccgatgctcactcatttggtgcaagaaatggagggcttggtgcggggcggggaggggggaggggggcggaactcgagagaggtcaagggttgagaattgggtaccagttgggaactcctaggaagccggcgaccgggtgatgtctgatggaggaggaggaggaccagggaagagaacagcgacgaaacggcgagaaaacggcctgatccctgcaaggcagcgggaggcgggcacagtcagtgaccccaggctgctgagggcggaccctgcaacgggtccaggcctgagttccctgtgtcttttctccaacctccctccattttggagccggaaacggtgggctaagggggtcaggggaaggaggtgctgtagaaaaagggagacagaggtttgatctggggatcagctccctatccaggaggagtggcttctgaagtaggaggattgagatgaggtagcagcaagaccaaaaatgttaccgggtttggaaataatttgtctcttgcattgcagaaaaatgtgggctttctgtgtatgtggggagggaggaggtggcaggagtgttttggacatttctgccctgccccctatctctgtcatcaccattttcagagaagtggtgggctctgctatttggctaccctagggtgagggatttggaatgtagagatctgagtgcatcagaacactctgtcttcagaacatccttgtctctaaccctactcattttcgtgccagaaaagtgagataaaaatttgggaggaagattcagaaacatagaaacgctttggaaataatctttctcgcctatttcccacaagtagaacaatggaggctcttaagaaagagctgcgcgcggagggggaatcagagaatgcaagggaaaaggcgaggaggtgataggagctcggaaagttttgacaaatacggtcccaaagaaccagtgtccaagttaccagtcattcactttctcaatttctcattcacccacctgtttcttgtctttctgcaggt

SEQ ID NO: 138406 - DNA, 1608 bp, Homo sapiens
tccgctgcagcagcccccactcttcccaccccggccgtctgcaggtttgcggggccaagtgttgcggcgacgcacctcacgtcgagaatcgggaggaggagactgcaaggataggcccaggtcagtgcgagggacggtggtggggagggggtcagaacatgaggaaagcccagtctgagaccccaatccgtgccttcacccccacacttagcaatcccccacccccaccccttcttcgtcctccattttggtgcctgcagaggcctggagatggatctgcagagaagatggtgggctttgcgggagagaagggcacagactggctcccctcgcccccccgagggtacatggggcctctctggtggaaaaaaaatgaaatttaaaaaaggcctttgaaatccagggctctgaattttgaaaggtgggtagtcgggcctctgtcctcggtgctgatcagttcaccaagaattgagtccattttctctctgtctcctaggagtaatggagtccaaagaggaacgagcgttaaacaatctcatcgtggaaaatgtcaaccaggaaaatgatgaaaaagatgaaaaggagcaagttgctaataaaggggagcccttggccctacctttgaatgttagtgaatactgtgtgcctagaggaaaccgtaggcggttccgcgttaggcagcccatcctgcagtatagatgggacataatgcataggcttggagagccacaggcaaggatgagagaggagaatatggaaaggattggggaggaggtgagacagctgatggaaaagctgagggaaaagcagttgagtcatagtttgcgggcagtcagcactgatccccctcaccatgaccatcacgatgagttttgccttatgccctgaatcctgatggtttccctgaagttaatagggagacccctgcttcctaaacttacacatttgtggtgtacctttgtcgtaaacgttttgatgttacctatttcttgtgggtctcctattaccagcttctaaatgaatgttgtttttgacccagtttgtaagtttctgtcagcaggagagttttacctattgcatggaaagatgctcattatatattgtgaagttaataaaacagttttaaaaagcattctctgcattcttttttactttaaatcttaaacatgcacctaaacagtcatatatatatatatatatatatatatatatatatatatatatacacacacacacatatatatagtaaatagtgtttatctctgtggtagaattaagagggagtttattcttgcttacccataatttcttatttttcaaaatggaacacgtattactgataaaaagcaatgtgaccaccttataaaagcgatgtgagcacttactaaacacttgtgacagaatctcaattttagcttgcctctgggttctctttttagaaatgtaagagacacatctctttgaagataataatatttatcagtaagatgaagacaatcacctcccaggcttgttgtatggaccagataaggtaatgaggttgtgagctttctcccaagttcttgttcttactgacatgcatgacccaacactttagatattcccttc

SEQ ID NO: 138407 - DNA, 2359 bp, Homo sapiens
actgacagggccaaatgtataagtggggggcggggagggagagagggtgggcccacttctgccgcgcttttggtgggagtggaaattagggacccgagctcactggtgacgtagatctcatgtgaccaggagtcgacgtgtgcagaagtcctggtaatctggtccttgttcccgtctggataccagcttccttcagcagcgcaggcggtggtccctgaggcccgtggaaggagtcaaacttgcgggaattttgcaggttggtgtcactgtaggtgttgactggggatttctagtgtgggggggtttaaggcagagacttgtgggagtgccggtcaggtccgtccctccaccctccacctccaggtctacgggaactgatgacccttgggaaagggactaggggtcctaggagaagaacagggagacctgtggtagtttaaaaataatcatcctctgctatctaagactgctttccggacccccaccctcctcccgaaccccgcctcagtcttaaagatagtttggaaataatctgctttctcactctttgtctgatgggaaaaacgaactgacttgcatgcactgtggagagggggtgaactaggggaaacaaaaggtgggaaactttccatatccgaaaccctaaaggaggaaagctacgtgtgtcagtctctggcgctggtcggcccaccaagcgctcgccccacccccaccgtcccctcccgtttccagtttatctgcagggctgttgtttccagcaagacccaaagctagaaaaggaggaggaagaaactgacccgatcagtgccaggtaggtgagaggaatattataaagtctcctggggtggagacaaaggttgtaagcgccaccgttcctgccggctcccttccaccccacccctttcccctcttcttttctctcccccttctcctttcccctcttcctctgcctgccagccacctttctcttttctggcctggtccctgtgttaggccctatgggggaaaaaggtctggggagggctggacggcggaaaggagggccttggaaaaggttagagggaaggacaagagagaagtgaggaggtggaaagtggaggtaaaaggagtggggatagtgaagctctgattgctgactgggcttcttaggtggaagatattttataacagctctgaataaaaaaaattaaatgctaaggcctctgtccacagcacctgtccactcaccaagtctttaacttactgtcttctttttgctttctagaagtcattgtattcaaagaagaataagcaagaaagaaaagaaggaaggaagagaggtagacagatacaagatgaaatcctgtcaaaaaatggaaggaaaaccagaaaatgagagtgaaccaaagcatgaggaagagccaaagcctgaggaaaagccagaagaggaggagaagctagaggaggaggccaaagcaaaaggaacttttagagaaaggctgattcaatctctccaggagtttaaagaagatatacacaacaggcatttaagcaatgaagatatgtttagagaagtggatgaaatagatgagataaggagagtcagaaacaaacttatagtgatgcgttggaaggttaatcgaaaccatccttacccctatttaatgtagtttaccttgatttttatctgatattaacaataccatatagcttgctttttattagcatttcctgatattcctttgtccatatttctacttataacctgttgctattaatggttttagatgtatctcttgttatctgcatctcattgtttattgtattttgaaccaatctacaagtctctgtcttttaataaaagaactttacacatttgtaaaaaagaggttcttggtaagatataaaatggaaaaaggctaagtaatatgtgaatatcatatttttgaaaggtaaaaagtacatttgtatattacatatatggacataacttgtgaaggatgaaagaaagtacagcctctcggtggtgggattatgaatgatttttctccttttgcttgtttgtattttctatattcctaaaattaacacacattattattgctagaataataaaagttttataaaaaagaagcaacaagcagcacgtattagtttatttctaaaagtattggggcatttaatatttgttgacagaattttagaagaaatgtgaacttgaaagtaactccagaccacttagctagaataataaattttacatattttctcatctttaaaataaagaaaataatctcacaaggatctggtgagggccaaatagagtaatgactgtgagctatgtttgacagagttttgttcccatcccaactccgtaaga

SEQ ID NO: 138408 - DNA, 1822 bp, Homo sapiens
gtgcagtcgtcactcgcgtctggctaccagctccccgctgccctgagctcggcgggctggcattcggcccggggaaaagcggagcaggtaagggctccggggcccgtgagccccggccatgccagcagcggctgaccgacctcggcgacaggcgcagaacagcgcagggggtccccgccagctttctccacaccccaacatgcttgggaacacagaggcccccagggatggggaagcaggggcggctgggtttccaggggcggcagagccaccaagagcgatggaaacccacccccgagtccctgcaggaaaacagcgaacaccgcggggggctgggcgttcgagggtggggtgggggtggggggcgggagacgcggggcgctggcagcgaggggagcccgggctcggagcacggaaagggccgggcggcggcgggtcttcgctagcgttccgctgcagcagcccccaccccccacaacccccaccccggctcgactgcaggtctgcgaggctaagtgtctccgcggcgcacctcgcggcgagaatccggaggagaaggagactgcaaggataggcccaggtcggtgcgagggacggtggtggggcgggggtcggaacgtaaggaaagcccagtctgagaccccaaccccctccaccccatcccccactcctataccggtcctccattttggtgcctgcaaagctctgggaaagaatcccgggaaacgaaaaatggtgggtttgggggaagggaggtaaggggagaaagctggagggaggggctttaattggaggccccgtagaggacgcgcggaacttctaaggtgggaaaaaacgaaattaaaaaatcctttgatatcagggctctgaatcctgctggtcagagcaccaagcattcagtctctctccttgcctttgtcttacttgtgttcaaagaaaaacaaccagaaaaaaaaaatctcatcatggcaaatattcaccaggaaaacgaagagatggagcagcctatgcagaatggagaggaagaccgccctttgggaggaggtgaaggccaccagcctgcaggaaatcgacggggacaggctcgccgacttgcccctaattttcgatgggccatacccaataggcagatcaatgatgggatgggtggagatggagatgatatggaaatattcatggaggagatgagagaaatcagaagaaaacttagggagctgcagttgaggaattgtctgcgtatccttatgggggagctctctaatcaccatgaccatcatgatgaattttgccttatgccttgactcctgccatttatcatgagattaatactgtgattcccgctgttttctttttccttgcattttcctaatatgcctttactgatccgtttgctgtgaaccctatgttatttccatgtgtcaagtgggtcttgtgttgccagcttctatttgaagattgcctttgcactcagtgtaagtttctgtcagcagtagtttcacccatttgcatggaaaaatttaaagctaataaagcaatttaaaaagcaatctatacatttattgtctcattaaaaatgtatacttacatataacagatgaactaaaaaaaaatctgagattaaatacactagagtgttaattggtgaacatttctgtgtgttaactaatcccagcactttgggaggctaaggtaggcagatcacgaggtcaggagatcgagaccatcctggctaacacggtgaaaccctgtctctactgaaaaaaaaatacaaaaaattagccggtcgtgatggcacacgcctgtaatcccagctactcgggag

SEQ ID NO: 138409 - DNA, 1063 bp, Homo sapiens
tagaaaaatagccctttctggttttctttcataactccttcaaataactcagacaagagtgcactgcggcctaactgagaaaatgcatctgagtgtgccctgaattgcattactgcaaacctccacaatacaaacaggctgaaggctttatttgtgcctgtgtttctatccttgatacggattttctcaaaggagactcttggcaggcctgcccacccagtttaacagacttacctagacatgtaaattacattgggagaacaaattttctttaaagcggaaacacactcccttcttgtccatacctgaaccatgaaactactctgtaagttcttaaaaactatattaagtatttggcattgttatttctttgtgagtgtgtgcccttttctccagacagtttctggtatagtgcccgacatagtagatattaaattattaattattttgattgattaattaactaagagttagaaatccagctcaaaactgtccctaactcactatccttaactaaggggccaaaggcaagtaactagttatgtggaaagcattatattatttccaaaggaacatagcaaggaaagtttctaactcaaattctgtaaacttttttttaaaccttgtatatgttagtgtttagggaaacatagacgccttacgtgcatcataattacctagggaaagtgttaaaaatgttgacagttgggtgctcgtcccacccccaaccagccactgtgaccacctgaatcaccagaatcaggaattactattttgacagtttcccaagtgattctcatgcatctgagttttgacaacataggcatagagaaacactgacagtaattacaccattttacaaatttcgtgatccaaattaccttacttacttgattccacaatgcatatacgtttccaaagtacagcattccaaaattagacattaggccatcaatgtatgtttatacttaaaccagtactgttttatcttcttttcaaatatcctattaaactaatgctttatcatgaatttattattaataataaatgtaataattatgaa

SEQ ID NO: 138410 - DNA, 1040 bp, Homo sapiens
tgtttttagcaatatgggaacagactaatagagtctaggtcttttacatgtccatatgaatgttagaatcagcctgtcggtttctttaaaaattttttaataggatttccatttgaattgctctgaatctatagatcagttttggaagaattgacatcttaacaatactgaatcttctcagtattgtttgtgacccatgagcatggtaagtcctccacttatttaggtctttaattctctcagcaatgatgtgtggtgttcagtgtacaggcactgcacatctgtggacagattgttcataaatatttcatactcttgatgatgctatacatggctttgtttgttaaacacaattgctaattactatattttcacagtactatcagcaaccaagtgtttaacatcagtgaggcatttttttggttgaaagcacagcttactctaggatggaaaaggtatttgatccttaacctgtgtttacctgtatttccgtatctgcttttacaagtcattggcgatatattgaaactatggaggaaaatgttccagagacaattctacaggtcatcttcagaaatcacaccaaaagaacatagtttagtagctttcaactttatatgtgtggtcagaaatgattttgttgcaatgtgtggctcaggctggagtgcaatggtgcaatcatagctcactgcagccttgaactcccaggctcaagcaatcctctcacctcagcctcctgaataactgactacaggtgtgtgcccccatgctcagctaaacttaaaaacatttttcagagacagagttttgctatgttgtttagacttctctcacactcctaacctcaagcaatcctcctacctcagccatctgagtagctgggattatagccacgagccaccatgcctggcgagatttacttctttacccaccagtaaatcaacctcaataaattcttggaatttggagtggtgagagggtgagcaagcatatatgtatgtgagtatgtatacatttgtatgtcactgaagctgtcagga

SEQ ID NO: 138411 - DNA, 4419 bp, Homo sapiens
ggctgatatttatctgtctagatatttccatgcatatttatagacatctgtttaaaacacacacacaaatgacagcacactcttcctaaaaactatttcacactaatgcttatttctctacctgtactatctttttttttttggagatggagtctctgtcgcccaggctagagtgcagtggtacgatctcaatctcagctcactgcaacctctgcctctcgggttcaagcgattctcctgcctcagtctcctgagtagctgagactacaggcgtgcaccaccatgccctgctacttttttttttttttttttttgtatttttagtagagacagggtttcactacgttggccaggctggtctcaaactcctgatctcgtgatctgcctgccttggcctcccgaagtgctgggatcacaggtgtgacccactgcgcccggccttatctgtctctttaagatcctattgcatttgggatcctgtagtattatgccactgcctatttacctaataatatatattgaacatctttccatgtcagtacacagatctctgcttaattcatttgaatgttcttctgtagtattcatacataatttatgttatcattttcctgttgaagaataggtaggtgttttccagttcttcagtattgcaaacaccactacattgaacatctttgtatccatgtgcaaatattcccgcaacatactgtgctagctgttcagccacatcacctttatgaaattctcacaggaacctgtgaaggctataggtaatttgccacattccacagatgagaaaaaggctaagagagcttacatgtcttgcctgaggtctcacaactcataaatgacggagcctaattgaagtaaagatctgtctgacagcagaactcaagtattttctctgataccacgatttacaattgtggtatatgattcatatatgtgtttaaatgtaaacatataaaccacatgtttataaattactcattttttttctttttcttagatgatttcacaaaagttcatcttcattgcagatacctgcctttctttctaggttgtatctcccacttcacccttctagaccatcccagaagatctataagatttcatctgggaaatcactaggagttcttggaagggaaagaaggaagattgtgtaagtcaaaggaattgtttcctctgtcacaccataagaataatggaagactattttttgcatccttatcttactagcactccctgctgcactttacactgtagattatacctttttcttcttggaacgctcatcatctttggcatccaaaataacattcttctaattctgttatggctactcttaacatttttgtttcatttgtggtctctgtgcatcccttaaatgcctttcgtccttaggttttccagaattccatacttgaagttcttcctctcttctccctgatttcattggccctcgtagtgtccactaccagctatgtgatgttactctcagatctccatttctggcttttacttctcacccgagctttatttttttttttttgttttgggttgtggggtgggtacccagttagctggacaaaactgagctttacaattttatgtttaactgtacatctcacacacaataggcccaacacaacttttcctccaatccattttctccacctgtaaatggaggagtattatcatttggtgataatactaataacctaatcacccatacctgggagtcatcactgactcctccctcaccaatcttttttttaccttcttaaacaatcactgacagtggtgtcatgtaccatttcttgtgtctgctcccaaactattttgtgcctataactgtcattatactaaccttatcgttttataattgtcactttagatatttggatctctagcaactaccatagtacttgtcccaaagcagatatgcagtaatgtataatgacaaactgaatagattaatgaatggatgaattacctatgttctgtcattttatttctgattccaaactaaaccctaaattcagtgctttcattaagttcattaattacccaggcttgaaattgcagattcctccctcctttggttactatattcttcatgatttctgtattcttcagtttctcttgactctgtcatcatcctaattcaggcctttctggactaatacaagaacctttactgttactcattttgcccttagtcaattaaatataaccttccctattccatattgtcatttctcctgttcaaaagtcttaaatttcaactccactgtcttttatagtttttcatttaattccttctttcttgaaaattgctttcctatcttgtgagtggcatcaacagagtaatttatgggtagttgtgatgagtatttgggtgagatgagagtagtggctggtagtgaggatcagagagagggaaaggaggtaaaaaaataaaaaatcacttataaagggtcctgaaataggatttgaaatccagattttaagggagttagaatgtgttattctctgatgggcctttatgaaacatagttaaaggttgccatagaaaacaaccaagtaaaatattttatatattacagtggttggaataaaaacagggttgaatgagttccagaaagcagggttctcaacctcgtggacagcaatctgcagaagaagagaacttcaaaaaaccaactagaagcaacatgcagagaagtaaaatgagaggggcctcctcaggaaagaagacagctggtccacagcagaaaaatcttgaaccagctctcccaggaagatggggtggtcgctctgcagagaaccccccttcaggatccgtgaggaagaccagaaagaacaagcagaagactcctggaaacggagatggtggcagtaccagcgaagcacctcagccccctcggaagaaaagggcccgggcagaccccactgttgaaagtgaggaggcgtttaagaatagaatggaggttaaagtgaagattcctgaagaattaaaaccatggcttgttgaggactgggacttagttaccaggcagaagcagctgtttcaactccctgccaagaaaaatgtagatgcaattctggaggagtatgcaaattgcaagaaatcgcagggaaatgttgataataaggaatatgcggttaatgaagttgtggcaggaataaaagaatatttcaatgtgatgttgggcactcagctgctctacaaatttgagaggccccagtatgctgaaatcctcttggctcaccctgatgctccaatgtcccaggtttatggagcaccacacctactgagattatttgtaagaattggagcaatgttggcctatacgccccttgatgagaaaagccttgcattattgttgggctatttgcatgatttcctaaaatatctggcaaagaattctgcatctctctttactgccagtgattacaaagtggcttctgctgagtaccaccgcaaagccctgtgagcgtctacagacagctcaccatttttgtcctgtatctgtaaacactttttgttcttagtctttttcttgtaaaattgatgttctttaaaatcgttaatgtataacagggcttatgtttcagtttgttttccgttctgttttaaacagaaaataaaaggagtgtaagctccttttctcatttcaaagttgctaccagtgtatgcagtaattagaacaaagaagaaacattcagtagaacattttattgcctagttgacaacattgcttgaatgctggtggttcctatccctttgacactacacaattttctaatatgtgttaatgctatgtgacaaaacgccctgattcctagtgccaaaggttcaacttaatgtatatacctgaaaacccatgcatttgtgctctttttttttttttatggtgcttgaagtaaaacagcccatcctctgcaagtccatctatgttgttcttaggcattctatctttgctcaaattgttgaaggatggtgatttgtttcatggtttttgtatttgagtctaatgcacgttctaacatgatagaggcaatgcattattgtgtagccacggttttctggaaaagttgatattttaggaattgtatttcagatcttaaataaaatttgtttctaaatttcaaagcaagtaatttgtagtgtgcctttcatgttactggttggtattctggttattgtagaaataaggttggtattctgtggttattgtagaaattttagaaaacatagtaagaacaaatgcaaataagaatcatgtaattctactggatccttcaaggtcccagcaaataaatgggactcaaaaatgggtgatttgaggagagttaaagaattttttccctgagttgccaccagaggggtagggttgtagtgtatattag

SEQ ID NO: 138412 - DNA, 1050 bp, Homo sapiens
tttacaagtgttattttcaagagcaaaatttatgcctttaaactgtgataattaaattaatactggtgagaactatcagatataccactgtgacagaacagatggcctagagacagtgatacctttaaaagttaaataattgctgagcgcggtggcttacgcctgtaatcccagcactttgggaggccgcggtgtgtggatcacggggtcaggagttcaagaccagcctggccaagatggtgaaaccccatctctactaaaaatacaggtgggcgcctataatcccagctactcaggaggctgaggcagagaattgcttgaacccaggaggcggaggttgcagtgagccaagatcgcgccactgcactccagcctaggtgacagcgagactccgtctcaaaaaaagaaaaaaaaaaaaagttaaataatcaaaaatcattcagaagagagtaccttaaaagacccatatacctctgagaatttagaatgttacaaaaccgtatttcataccaatggggaaaggataaactcttcagtgacgaatattagaaaaagttagttatacatttgaggaaaactataaaagtaccaataatgagtaggaaatcacttctgcagtatttttggagcattttccttaagcatgacataaaagccaaaggtcacaagggaaaaaactgatagatttgtctgtgatattgagagatgtatgcacatatacatacaacagtcatagtaagacaccgttagacaaaagaaagtgatggtttggaaaaaaatttccaacataaaataaaactaatatttaattattagaaaataatagcaaacaacctggtagaagagagaacaaaaatattcatatacgataacgtgaccattgaatgtgtgaaggatgatatcacacaaattcaaatgaaattatcttactacatgttagattggcccaagaaaagtcgctctcctttttttttcaaaaagatgtttttccagtgttcttgaagtcatgaaaaaatgaacttttatatttttgttaggagtacaaattaa

SEQ ID NO: 138413 - DNA, 3223 bp, Homo sapiens
tagacacttcctctcccagtggggggggaaaaaaaccacaaacccataatgcctccctgcaggaaaaaaaaaaaaaaggaaaaggaaaaaaaaaaaccctctggtcagaggaactctgggtcgtgaaataggccacgtgaacattctgccctgtagacttatgacccaacggctgtcacgcttttggagggcgggctaaaaaaaaaaacctaagagggcgaacgtcattggccggaactcgtactaacggaggaagaggattggtttgctgtagaccttaacagtgaagaagcaggttgctagcacccgcctttactgcggcgaagtgtcattgctgacgtgggggtggttgtccaatcatttgattatggaacattctaaaacttagacaagacgattgtgattggctgaagggcatacgccctcctccagggtgacgtgtctgcctatggatatcagttgccagagaaacctggctttactatggcggttggaggaacggcagtgatcacacgtcggctgctgggaagatctggattctcgtttcaggtttcggggtgggggtggggagaaagggtcgatgatttccttttttcgtcgggtatagacgggattacctagtgccttcacaatcggtcagagctggattcagattcctgctcgccaacgcccagcttgggcaaggctcctgttctttctgtgtctcggtttccatgtttgtaaaatggtgataataatagtatctacctcagagacgtgtactgtataatagtgcgtataaggcacgtaatgtgaagcctggcccctgaagatattagctattgttatggagataaataatacgcgtaatagaatgagaaaaattataaattatataaattcgctaattgtagtgccctttctgccatcaacttctttcctagaataaattaaagataaaatagatataccaatttttaccaatgaaataatttgttatttgggaattgcctcaaaatagcagagattgtaattttcctatattgaaaagttaaataaaaggtggggggggggggagtgcaagaaagaaagagatggagaacgagagcgagctggagatgaaccacatgcgatgagtaggccttgtttggatcctgaatcgaacacaccaactgtaaaaatatgtttaagacgcatcgggaaaattgggacacggattcgatatttgatgttttttagggaattgatgtcagtttttttaggcgtcacagtagtattgtgattatgttttcaaattgtccttttttgtagagacatacgaaaatatttacggattaaataatgtctgggattggcttctaaatacattaatgactaggatttgcttcaaaataatctcagcggtagggggaaatggggaggggtatagatgaaacaaaattggccctaaattaataatatttttttgctgagtgataggcagtgggttgcgtatattaatctgctttccttggtatacgtttaaatttttctataataaaatacagaagtcagatattccggtgagcttgaaaaagtcgggggtgggggggagcagtgggtggggttatagatgaaacaagatggccttcagttggtaattgttgaaagctggatgatggattcgtgtaggtttataatactatttcttttttatttcatccatttgaaattatatttaaggaaagttaaaaaacaaatttgtcagaaattatacaaatgtacaataaattaaatttgaaaatgtggccacaagaaaggaaaaagaaacacttgtacattatttatcagctttggtgtcctttgtgtgtgatgaaattgcattggctgatgtagaagaaagccatatctcatatctttttattttatgttctttcttgtccttttgtttgaccttctaggtcaccatcagaaaagctaagtttgctgtatagtgaggatcaggagatctgatcctgattgcagaaccttccctgattacagaatcttgggtaagtgcctcccttctgtcctcagttctcaaacaggataataccacataaccttcctaactgtccaggaatattttgaaaattaataagctcctatctgggaaagtagtctaaattctgagaagggaagggtggagctaagtccattgatagttccagtatagaaagtgcataagcaacagagggctttgtaatcttacatcccttgataaaagatactacagtcaatctcctgtagtagttccacagttccatagattacatttttccttggagcatcctatatgcagcatagtttagtggttaagagcaaatacttcctgaatttaaatcctggctctgccacttaactatgtgatcttgggcaagatatttactcactttatacctaagttcctcgtatatgaaacagaggtgataataatagttcctacttcataggattgttgagaggattacatgtaaagtaccaggacagtgcatggcacatgtaagtatttgctttaataataattatggttctgttagtcctgataatctcatgttttatctacacatttacacctacttctaaaagcagtggatatatttctttttggaattgtgtaaaaaaaaaataataattaataccgttggtttctctcctcattttccagaagcagcagttaccactagaactgaattccgaaattatgacttctggcttgtcttaacaatctagaaaggtttcaaatatattgatcatatttatttatgagggaatttccaggagctataattttagctagcagttcaaaccaaatttataaataagcaaatcttttcactgaatattcagtctgctaacagcttttgtatcattcctcctttgtctcagacttaaaaaaaaaaaatctattacatgtaatggaaatgtttcaagatccagaagagaaaattgatatgaatgtaactgatatggtatatgtgcatttaaaggtttattccaacaaaatgttactcacactcttttctgacacatgcatacacaaaagatgttagcatttgcagtctgattcccaaatggcccattgcttgtgtggagagatgaagtaggatttgaaggtttttcagccttttgacagctacatatggagtcactgtaatttccttttttttctctcttctgaaaagtaggtttcggaggagggcactgccctcctggaagagatgca

SEQ ID NO: 138414 - DNA, 1006 bp, Homo sapiens
ggataggcggaaatgagctaaggttcccgcgagtggggaagcgcgaggtcaaatctggggccacgcccccagtcctgtggcgcaactccccgaacacggaaaaaaaaggcgcagtgggggttctgctgtgtttgcaagtgagggtcgtgagtgcaacgggcgcaaggcattaaggccagtgtgttagtgcgcgggcaggctcgcgtggtgctggggttgctgtgtgagcggccctcgtggctcgggaggtgctgtgtttgcgcaggcgtgcgcccctggcgtcgggactggtgagagccacggcgggcgcgcgcgcgtgcgtgatggtgggggcggtgcagggaggggtttgctactgcgcgcaggttgttatctatttctgtgttatatttgaaaatgttctaatgaaaaggaaaataaataattaaggaaaggcgacaataacagataaaggggcactgtcagaaatattttggctttccgtactgatttaattactttaaaaatacacttcctacgttttcctccgtgccaaaatcctatcgtaaaccacagccctccaatgattcagagccaaacccttccatcgccgcattagcaactccaaagggaggcttctttcaagttctctagtatcgtcctccctcccctcctccacacctaccccctcccttcaaggttgcgtgcagttctcttggcacaaatacaattttcctgtgagaatatctatctacgacagccttcccctccgttagggactccggatttctgtggcgactgaggcgctcttacctttgcgtcctgatctccaagcaagcacactgaccttcttcaggcaaatacgcactgttaattttccagaaagttctgtgagtaaggtttatacctctcgagtctgccactagatgccgccaaatcccagcaaaggattggctgtttggtccctgggattctgggattttgtttccctcccccctcccctttctgatttgctgaacggtaatat

SEQ ID NO: 138415 - DNA, 1986 bp, Homo sapiens
atcagggtggtgaggaaacagttattgaaaacctgttatgggccacacactctatacacccattaatctcaacaataggcctgcaaattgggtgatatcatcattattttatagataatgaaagtgaattctgcagtgtgtaattacttatctttggtcatataacttgtaaatagtggaacctggataattcctggcatatctgcccatattattttactaagctttctactttttggctttgaagctggtttagttatttacttgttaagtgactttaagttatttaacttttctaagcctcagtgtcacatattaaatgggaacaaatatttctatttcataatcttagagccacactatccaatactgtagccattagtcatatgtgactatttaaatttaaatgcagtaaaatttaaaaatttagatcctcagttgcactagtctcattccaggagctcgatagctacttacagttagtggctaccatattagacagtgcagatacagaacatttccaccaccacagaaagttctactggacagtgctgatttagaggatataaggtatataaaagggcctaacacggtgcatatctcatggcagatgcccgagaaaagtgatctcgtctgcttttttctttcagcatcagagctaggggtgttctcctgttttattgatggagttgggagagggaagtaacttacccaaggtagtgtgataggggatatatctggcaccgggacccacatctcctaactcttgctctaacattctgtctagtatacccatcattatgctttactctactgagtgaggtttcaaggccaagcatgtgaacagtgtgaattaactttggaatcagggtggtagcagaaaaaggcataggaactgaatgtctcctgtgtgccacatagcactgtgcccagctttttacatctggtatcttagcaaatcctcagtgaagcccagagaataaataccccaagttgctcagcaagtaaatggcagaccaagcccaggctttttcccattatgtcatgctactccctcaaatgtgaatactcccctgccacctccacttactagtgggtcctcagaaaatgggaattactcctcttttgaatgtatagctgaaccgctgtcttcacagtctgtttcaactggaatggaaaaatagcttaggtcaatgtttgtttggctccaaggccagacagagaatatttatggtcccagccttcaaaggacaggcaatgctctgagaaccctgtgttaattttcaaggccaccattagctcataccttgcttttgtgctaattagaaaagcatgtcacctggggggcagagaaattgtagagaagggcccattccagtggaacaatgagaaaaataacttttctttctgtaggctgttgcaacctcaccagaacagctgaagaatgaatttcagcctggactctaccttattagttgggcacccttggggagggtgcaacctgcccaacattttctgctggccctgtcttacctcatgactaagagagccttcctaggtctggaaggtagcagtcagtctgttctggagggtggagagagacaccagtgttttcccatggtttctgggtagtagataaaattggtctattctaaggttaatttgatattttaaaattttgattctgactagcttattggatttttttgaataatgtttgattaatgtaaaggttaaaaataaaacctaatatttcagctaagcaaatggtatttctttaataaggacgtatttctatctatttatacctgcctcattccataggaattttataaagccagtccaggaatgtagtctgaatcaatctagtttgctagcctgtgagaccagggcaaagatgaaaatagtcatgggaaagttttatccttttaggggtatctgtcttcttctagttcctctctcctcctttgacaaatccccaccccg

SEQ ID NO: 138416 - DNA, 1034 bp, Homo sapiens
tttagcatacaatttaccaaaatttgtagtttcctgagccacagacttcacttggaatgatcatataaagtcatccatgctacataccaacccacagaaatgaggaccgctttcctccagtgtatgctgagtcctacaatctgagcactgcttcaagaggatgccttgagtcatttttccagagttaaatttgcttatgcttctaacctccacctacagtccccgttacactgggaatgataaaaactatgccttttgaaaatataagctgtcatgttattaaagatgacaaaccagtagtagttaaagtgctgcatctaaattgttgaagcttgttacgtgggagttcattagactgtttttcctacttttgtgtatttttgaagttttccataataaaacatttaaaaagacaaaaaatgttttaaagtgcttcatcagtcctgaggaagagaacgcacatgggtttctctttagaagagtacttattaaccaaggggttaggtagaatgtacaccctttagtagagacataccctgtaaaaatctggggaggggggcgttttagattgaaaaagcctctttgccaaaaattctggttaggtcttctagaagggaaatatccttctgcctgcaatccccctccaccaaaccccacaagtaagtcttgctgtaatgaaccactattggtgaaagaagtatatcatatcccttgggcgattgagagtggagggagcttgaaaaccatggaaacagacctcagctaattggcaaaaactgttagccagcaggaagagaagcacaggcaaagggagtattggggcaggagatggaacttggagtgtaatggggcttcattctcaccccaggtgagtgctggagaggacaaagctgctaatgacagaggacaccagggagcagaatatgtggcaaagaggtccttactgaggacctcagggtattcttggaaggctctgggccccatctgacttgcaggtttttgttttgtttctttgtttttcgtttttgagacag

SEQ ID NO: 138417 - DNA, 1841 bp, Homo sapiens
ggcactgtttagggcatggggaaatcagagcacatgttctctcaaggtcctgaggttgagataaaatggtttgaaactggggacagagaagggagcaagggcagttcctaaaaggtacaaagccgagattcaccccgctgcttccaggccagagttctgggtaggacgtcaatgagacccaggccggtacagccagctttcaatagagctggtctgtgaaacttggccgagaggacagaggaagattgatgtttgctccagagtggggctgtcagctgtgctcaccacctcaccatgctcccagctgtaaacaaaagtcctggcccttcatggcactgcagagcagtccaggctggcgtaagtctctgaggacagctagaccattttctcatcctggctgagaaccagaagacagaagaaacaatagaaggtggtgggtaggggtgggcaggattgcaagggggtgagaatcagtgaccagagggaaggagctgtcaatttcagatcttaggtttgtgcatccaagtacttagtacaaatcttatagggaaagcagacccctttccttgtcagcttcacagataatagtgaactaccaaaggaggcttgcagggactctagtgcctcattcattcattcattctttcagtgaatacctcatgtgcctgtcactgggctagatactctgggtgatgccaaagtaatacaagacagctcgtaaattcaaggaacttacaagaagtttgtaaacgtgtaaccttaagtcacaataccaatagtaagactttaaatcctaagtgacagacatagaataagagtttagaaacgagagtagtcatatctggtcatcatcagagaaaatggagtttgagagggctatagaaagatagacacaatttggccaagggaaaaaagataccaggcattccaggctaggaccaaattgttagtaacaatgaggcctgccttcgcgaaggcagaaagttagtatgacacagactctcttcagtcttcaccccgtcatgttcctcaccacagctaacccagtcttcaaaactcacttaaatgtcacttcctcagggaggccttccctgatctccagggccagattaagtactcttgctttatgttcccatagcacccattactttcccctttctaagacaccactattttcacctgatgacctactcatgtctccctacaatttgttctccactctgcagccggagtttttttgcaaatgcaaatctgttacatcacttccctcttggaaactctcctacctctaacatcttccttctcctttgccttcctggtccttcttgcctctttccatcttacttttccttctggtcacttcttaaatgtctctatctaagtttgtctcccctgccagaatgtcagccctctgagggcaggagttatgtttcttcctcaccatgtatctgtgtatttagcacagtgcctggcatattgtgttaggcactccacaaaaatttgtgaataaatccaagggagataaggcaatattagtagccaactgaaggattaatcttacacttctgtgcaaagggaaatctttaaaagtttttaaataggggtataaaaaaaatcatgagagaaccctgccttctgacaaaacaaacagaacaaagcaaaaaatgatcaaacaaaacccagagaactccaacctcagcttaccctaaacccggcctcccaatgatcttgtagactcatgttctcttcctttctgtttcccccaccactgcctcctccaaaaacacaagaaaacttactcattgatccttccaaccagagaaatttggcagtatggccaa

SEQ ID NO: 138418 - DNA, 1024 bp, Homo sapiens
acagagcgagactccttctcaaaaaaacaaaacaaaacaaaacaaacaaacaaaaaagcactttacctgcattatctcttgctttctctctttttttttttttttttttttttttgagtcagggtcttgctctgtcactcaggctagagtacagtggtgcaatcacagctcactgtaacctcaaactcctgggctcaagcaatcctcccacctcagcctcccaagtagctaggactacagatgtgcaccaccatgcccagctaatttttacattttttttgtagagacaggatctctctatgttccccaggctggtattgaactcctagcctcaagcaattctcctgcatcagtctctcaaagtgctgggattacaggcgtgagccactgtgcccagactgcattatctcatttaattcccacaacaaccctatgaggtaggtattgttattgctttcatttaacagatgcaaaagctgaagcacagaaaaatttgatgatttactcaaggccacatagttactgcatgctggatatttcagagccttcaaatgtccctttagaggaggaaactgagactgagggaggtgaagtcatttgtccaagaacccatatctagtaagtgctggaattgtaattcaaacccaggctctgtctggtaccaaagccaccagtaatcactacactgtcatgaatagaagctattaaaataaagaatatgtgtgcatttttctcgatccagctctgtaaggctaaatgttccttgaatttagatgatggtaagaattttccctattccataaaattgatagtgagagcatgtacttccttggtaatgccccatacggtatagtgcaaccaggatatttgtagaaagcctcatggtgaaagcagagactgagaaaaacagagctacacaggcagagtgacaatagctgagttctcatgtgacttcttcaggtggctccctgacataagatttacttcatcatccttccatgaagagaatgctttgtgagggaga

SEQ ID NO: 138419 - DNA, 1077 bp, Homo sapiens
accctgatcccctgagccctaccctggctagaggatgtaagcaaaggatgttggcaaaaaagctctgagggggaaagttggatccaactgctatttctgtttctatagatctaattattttcccttttctccaatcataataaatctaaagggagttatttggacacatttcccaggctggaaaaagccatttcacacaggagagaaaatatggccaacagagtaagctggtcttggctttttgtgactttaacatactgcacctgttgtagctggaggagcaaagatgaatggcttgaaatccaggggtggggcatcctgcatttgggtattctctatttaggccaaattctgaggggtgtttgtgtgtggggtgtgtgtgtgtgtgtgtgtgtgctggaaaggaacattggagccttaaataccactttgtggcttacatgcctattaaaatagaactttttttcccctggctatctataggggagaaggactgagaagctagagagggaagatatctcaaaaccacgctaaggagggaatgcacagtgtaggaggtaaagtgtggagatgggaaagagtgatttgtattgaagtgagaggggctagaaaaaaagggattagagaatggggaatgaagagggtgctggaggatgaagagaggtgggcagggttctgggaccaagcccttgagaggactgggcagtattttgaaatttcttccagttatcaagttattctattgatcatggcaaagcttttgctctgtccagtttgaaagacagtcctctccaatcagcctgtaaaagttggtgagctgggttacatgactgctgtgtccagagcctggtgctaaggcctgctgaggagatgaaaaagagcttccctttcctggggaagcttatggactagccgggaagacagtgtaggattgcatgggtaaaaagtaaaccactttaggcagtgacatgaaagggggccaccatgctatggagttgttggttgaggagagagttgagaagaaaagatgtgaatggctggctggttcctagaacactcctaactgactcttggcta

SEQ ID NO: 138420 - DNA, 1051 bp, Homo sapiens
cgacacagctaaagagggggtggggacagttagcttagaaaatggagtgtcctggccgggcgcgggggctcacgcctgtaatctcagcactttgcgaggccgaggcgggcggatcacgaggtcaggatatcgagaccatcctggctaacacggtgaaaccctgtctctactaaaaatacagaaaattagccgggcgtggtggcgggcgcctgtagtcccagctactcaggaggctgacgcaggagaatggcgtgaacccgggaggcggagcttgcagtgagcccagatcacgccactgcactacagcctgggcgacagagcgagactccgtctcaaaaaaaaaaaaaaaaagaaaaaagaaaatggagtgtccttttttcttgcccttctgctaggtgtatacacatatttttctaacccttggtatgggttaggaaatgcttttaggtttcttgaagaatgagtcctactcgaggacatgtagttgtggattagtccactagagggcgtactgcccagggaccaactaaaggactaaagggtagggactgataaattcaaaccactagatgagacaggagccctgccctcagcagaaaggaaccttagcaagggacatgaaaccaaggaggtagtttgtgagatatttttagtgcggacatacggtaggggtgcccctggagcagctgaggtgggaggtggtgtgttgaggagagaacattccttgtgctagtgtggcccagacaagctagagtcaggattttaagagtgggttcacagcattgtttcccatcccccagaggtcattatgctcttgcctctctggctttagagcctccagattagacagaaaacatggagtcagagctgaagacagaccagaactctgtgtctctaatggttaagcaaccagtatgtagctcagttaagcctttcagctttgctcataattggacacttgcttctgtgaggctggcccaggcacctctgttgtcatgacaacttacctagcacctattgtctgggcaattgggggtaaactgcctctgtt

SEQ ID NO: 138421 - DNA, 1100 bp, Homo sapiens
aggctgaggtgggagaattgcttgaacccgggaggcagaggttgcaatgagctgagatcgtgtcactgcactccagcctgggtgacagagcaagactctgtctaaaaaacaaaaccaaacaaacaaacaaaaaaacaaaaacaaaaactcaggaatctgtccactcgctatcctagcacatctgaagggttgcaagttttctgaatggtctccttgcatctactcttgccacctccaatctgttctccaaacagtagccagagttgttttcaaaatgtaaatctgattatatcactcccctttatgatccttcagtggttctccattacccttacgatacagtctttgctccccttatcatgatatctagcctttgcctacctgttcagtttcatcacaccccttgtaatctgctgtggtgaactatttcagtagtttcccaaagagccaatctcctctaacctttctctcatttacctggataacttttactcatccttcagctctcattttagataccacatcccctgggaagccttccctaatcatcccagtctgtgtcggttgtcctgctgtatgtgctcaggttacctacaacttcttagcatccatcacatacctggccattccctccactagactgtgagctcttcgatggcatggactgtttctatctcgatcactgttctgcttccaatgcctagctgagtttctggactatagtaaatatttttttgaatgaatgaacagatagatggtttagcaacatgtgatgtgtatatctgctggcttctgcttgctctctaccctccttaccactacctgccccaatagctgtaggccatttagatgataggatctagatagaagtggctccttccctgctgcaactttaggtctaatctcctagcctctggaataaatttccatttagtccttccattctgctttgagctccctgcagttgaggggatcaaagtcctggcaaagagatggtaatcagtgcctttggtggcaccataaaggcaaagtaacagttgtttcttgggaacatgaggaatggccactccaatctagttcccttacaaagtaagccccta

SEQ ID NO: 138422 - DNA, 1038 bp, Homo sapiens
tcatcaggatattctcggtaggacaggcgtgggtcattccactgttgccgcaagaagacattcacccggtagtcctgggagggtgcagatatgggcccttcagaaacattgccattcccaggggcccagcaagcctgtaggggcaggagggccatgaggaggaatgttgggaacacatctcaggggcagtaggcatttttcactggagaaggaaccttccttgggctgatatggcaaaagatgccagcttgttatctggtgggctcctcccactcacactaggctggaagtggggagcagggagatcccttaccattgtggtcttggtgatggagctgaaactgttgatgaagatgttgcaggtcacgttcacgggtgggcctgagggtagcaaagcacaggccattggcagggcattccaggaggctgggagcagcttccagaactccttccctgagctgcaggccagggcactgctgggagaaatcagtgccagatacacaggcccatggacaatggggtgaggaggctccttctgagctgttagaaccagccccagccctggacctccagcctcctttccttagggaaggcaataggggctggctggctagtgtgctgccaaaggtggtggggagggaggagtttttataggatgaagatttcttacctttaaaattgggccgaatcctggcatcatatccagatgttcgccccataagtttgtctaggaaatcagagggggacatgggctgggaccccttggttccagatttgacttcctcttttgccaaggccaccctggacaggagaggtaaaaaagtctgaggccagttatgtgctgcacttatcacagactctcagtttccatacccctcaggcaggaggatagaagacaatgggtctctgggtgccatttgcaaaatgagaacaaaaacgccataagtcaacacggcagcctgccagttagtactagtaaagtgttttcacagacagtaggtcttcttaccctcccaattctcagtgagatgggagtga

SEQ ID NO: 138423 - DNA, 1040 bp, Homo sapiens
aggtcagtggcagccccaccttgaccgtctagagtcctgcctccttgaatcttctaaggaagaggaagcccttaccctggggacagaggcaggctctgaaaatccaaggaggctggtggtggtgctggagcaagcagaagtctgtgacttcaccacaggatgtccacgctagccaggtgctgctgctgcttctggccacctgccacctgcctgctgggaggccacatggtcctgcacgtggagaaactggaccctccccgccgtcctcagccccactctcaggtcacctctcctgctaagcctagacctagtatcctgggacaggctatgggcttagcagtcttggtccccagcccctgttgcagtaccctcttctggggctaacttgtctgaggacctgagagcagagtcaccgtgtgcagccactccttcctctctttcattcctggaaagtcctaaacaccttcaggacctaggaggatccagagctgacagtctttctcatgtaaagtcttggggtggcgcagggagagaagtctaactctggtgctaggtagctgagccaccctgggcaggtcattccccatctctaggcctcagtttccgtatgtacaacgaaggacttggactccagactctctaagggcccgttttgctctaactgcctctgctttccaagccccagtgggaatgctgctactggagcttgagctttgaggcagcctcccctcctggagggcctgcaaggcccagtgtggtgcccccttctgcctgcatcctcctgtcaactccagctgtgctgccattctactttgagctgcttttcactctttagaagtttattgccctgctctgcatccctgcctgcctgccagccaatgtgtctgcaaacagtggggcaggaggctttgcagacgcaagcagccctgcgatgtttcttggattaacaggaggaggaggaggagtatgccgcagtggtactgaccccctccaccttgggaggcactcctcttacgatcaggtcagcccaggctacagcc

SEQ ID NO: 138424 - DNA, 1082 bp, Homo sapiens
tgtgcagccattcccgtgcctgctttcctccctcaggtcgtctcttggggtcctctatagctctcagaattcctcctcccagacactccttccccagcctggctcatgggaagggacagagatgcagagcaaggctgggacacagtaggctttgcaggcttcagaggaatggcagcgggtcaagagcagtgacctagtggccctcagccctggatggaggacagaggcagaggggtgggctggcctcttcccttgcctcctgcacatttgcttacagcaacaaggtgctttggcagctccattttctcctgcctgactcttcctcaaaggttccagtgtgttatctaaacacctctgagacttctcccctcccccatttcctcttgctctctcttctttttttcactctactcctctcttcctcccccctccctgaaattttccttcacggaccctctgtccatctccatctccaatcttcctcgcagtttcttctctgcgtctcactttctgtgcctgtctgccttgcttctttcttcctcacttcctctccattcccggttttctctttccacctcccctgtatcttcactctctcacactctcctccaaaacgacaacagtgagaagccaagcgttttcatttctccctcagggggaactctcccgccagctctgcggagttctgattgcatgctgtggggaggggtctgtgccaccttctgaggttcaatcctggagctgactgtggcctcctcaaccttgccagagagggtttgaggggattggaagctcctccacatggcctattggctatatggaaggattaataatgaggtagccgtgagtggaacctgtgctgcagctcccttttggctgtgttattattaaggaagagaaattttcaaaccataaatgaaagggtaagaagagaattttaaatgcacactaaaatatagacaggggtgctgggcttttggagttgggactgagaacattacaagtctcaaataatgcctatatggtcagtaaatgtaaaataacctaaaacatctttagctgccctttcatctgctcaccct

SEQ ID NO: 138425 - DNA, 1987 bp, Homo sapiens
cagtgactggttcaagtctgatgcttcaaagatttggcttcattcttttgtttaatagaatatttcaggtatgagttttgcagacaaaaacgtgaagtatgtgaacttggggaggccagtggagaggttaaccgaattcctctcagtctccaaagacaaaccagatgtgagcaccaggatggcaccagtgaacaatggccctgcctctgttgctgggctctctgttaagaatccagggaacaacagagtggtgaagctccagctagggaaggtgtagtgactagcatccagatatgcatcatttctctccttctgaatggaccttcagaatcgttactcatcacatcagccacttgagagcaattcactagctgtgcagaagagtttcattaaggtttccacagagtttgcattgactttccttgtctcttggctcttgtaactctgcaacattcttgttaggggatgataggaccatgtcatgcctctcctcaaaggtaaattggtttttgcttgtgatcatgttcatgaatatcttattttactcatttggggattgtgataatgcatgctatgtaaggcatgaagcccttacataacataaaagcaacagaacttggaaaaatgaatatttactgtgtggaatggatcacactcccgctaattcatgcatgcattcaacaaatatttattgagtgcaaatcatatgccagatgccagatattctaggctctggagatacaacagtgaaaaaagcagatggagtccatgccctcatgtagcttagattctagtgggtcactaatgtaattccttcccaaagaaggcttctgcctgagtcatcagcaatgccccagggcctgagtgcctctcacagcatatgagtagggcatttattatatggcctagaaaatagactatttttttcagcaggcagtaatgagcttcatttttatctatcccagaatctttctgctagtcacatcacacaggtcatcacctgctagacaccctttcaagaagcttatccttcaataatccaaccctacagaacacgcatgcccaagaaccctgaaaagataatctcatgattatctcatgatgcatacatatttgtctgcaactgttaataagcaccttcctcactagaagagttaggcgagattaacagcatccttagctgtggtgcttctctgagtggtttccaattatttaggatccttccttccttccttcttcccccttcaatcttttcactttatctttccttcagtctatctttctgtctgttctcctgtcttttcttctgtttttcttttttggttttactatgaataaatttaatgtttgttgtaataggacactggacactaaagtaaagaacagtttggttgattactacatagaattgtgcacaaatctgaatttgcattactaacaccaatcacatagttatagttggcaaatgttatatgccaaaattataaatttaacattacaaatgatgtactagcctaaatttgcacttctgtagtgttcattatctgagtatacacgtgtgcatgcagacacacacacacacacagaactctccttgataatctgaagatgatatccctgttgctaacaattattatccaagagtgtgtggccaaagaaattggagtgtgatgactagtccattttatcctgagtacaggtagatcttgtctttgttttgtggctgaggtctctacatttactgtgctaatgaagtgcttctagccagtcacttgcccagaataattggaatccctaggtaagatgccaaattgagccacttctctttgtacaaggtaggggaggtattcattttgcagagttatgtcgcatatggccccaaatcacagattctaatcaatgacaggcactcctaaagagtcatctcagatactaatcagacaataggcaactccaaaccacatagcaggtcacacacatgagcttt

SEQ ID NO: 138426 - DNA, 1316 bp, Homo sapiens
agactacaggcacttgccaccacacccggctaattaaattttttgttttgttttcttttagggctggggtgtcactatgttgcccaggctgctctagaactcctgggctcaagtgatcctcctgcctctgccttccaaagtgttgggattacaggcatgaaccaccatggctagtttaaatggtttttcagggtcacatatctcggaagatatgtgggatgtaaacccagcagcctggccccagagcccatggtcttcatggcagcagcatgtgtgccgcctctcatgtgtacaagtgaatgaagaatgaaaggtaagcagcgcaccgtggtcatccccgcagccaggagcctccagaggtgccattcagtctctcaagtccctgggttttggggactccctgtcacaacccctttggggtagcctcccacccctgccactgcatctcttcctccccttgtcttctctctgtctaattgtgagtgctgcgctaagtaggtcactcccactgagggctttttttttttttttttttgagacagagtcttgctctgttgctcaggctggagtgcagtggcctgaactcactgcaacctccgcctcccggagtcaagtgattatcctgcctcagcctttcgagtagctgggactacaggcgcctgccatcacctcctgctaatttttgtatttttagtagagacggggtttcaccatattggccaggctggtctcaaactcctgaccttgtgatccgcctgccttgggctcccaaagtgctgggattacaggcatgagccaccgcgcccggcctcacccagggcttttaatgagaagttttgccataccaaggcagcaaagatgaataattcagtgaagaaggaatgttattcttttttttttttttttttttttgagacagagttttactcttgctgcccaggctggagtgtaatggcgcaatcttggctcgccgcagtctctgctcccaggttcaagtgattctcttgcctcagcctcccgagtagctgggattacaggcatgagcctccatgcccggctaattttgtatctttagtagaggctgggtttctccaagttggtcaggctgttctcgaactcctgacctcaggtggtccgcctgcctcggcctcccaaactggtgggattacaggcatgagccaccacgccctgccttttttttttttttttttttttgagatggagtctcgctctgtcacccaggctggagtgcagtggcacgatctcagctcactgcaacctccacctcacggattcaagtgattctcctgcctcag

SEQ ID NO: 138427 - DNA, 1033 bp, Homo sapiens
aagttgccctgaacctttcctgaggaatgtgtcttctgtttctttagagagttgcactctcaccaatgaccagctgccttctgggtgaagtgaaagtaagtaccctgctgactttgactttctgtctcctcttcttgcctttggttcaagacggagcaaatcactttgtgctgcaaagagctgactgacacccccacacactgcatcatcttgcctttggggaatggggaagagagtgggcagggttggccttcatcaagaccgttgagggttaacacaagttggcattggaggcccttaccaccttcccaagagagatcctgagacatgctgcctaatggaaacttgccattcctcacttcagcattccctttcctctctctaccgctttcctccttcaacttccacagctccccaggaccagtttaatttgtccagtattgaaatcatcccaggcaaagcagccagcctcctctctttactaacaactggagtgaggactgaggaggcctggaggcttactggttgccatggtaagaagtaggccctgagaggattaatgagcagagagctggagtttttttgtttgttagttttgatgagttttgtttgcttttcttcctccacccacctgcccccctgttcccctcccacctacccctccagagtctcaaaccactaaagcagaaggagattactaggagcaaaatcagctcctgacgtgggctacactaaatccaggctgccctgctgagggtaattggtgtacactttgtaatgtagactctgggagagccaagtttggaaggcaagatgtaccacctttgtggcatggcacagcatcctgaggcagagggggcctgctaggggaggagggggcgttgaagctctctgaagcctccacactttttcctttctggccaaataggaaagtcacaggcaaactaaaagccagtttaggctgagaaaggcagctaagtcctgaccttctgtcttgtgtctgccacaccccaagatccctttctaccagagt

SEQ ID NO: 138428 - DNA, 1404 bp, Homo sapiens
tccacaaaatctccttcaatcagcttcctctcttcccactggtgagcaaggtagatcatattcatagagaagatatgagctcctgaaagggtgtgaggttattatgttacaattattcctgttgttattagtgtttttgtgttattattattattttaaattagttcccttcaatttaatccatggctctgagaatggagacagctgattcagggagattttttggactgggtacctgaactgcactaaaaaatgaccttgcttccttattaattagtaatctggggctgaggagcaataagaaaggagaagggcatgggaaggaaactctgagcggaccagcaaggccagataatggccaatggtgaagtctcagtgtctcctatctcctctttcattctgtggcaactgcataaagctaccttgattcgaggatcatctcacagtgaaaatatccaatggtgtccctgtacttctagttcaatccttttatccatcccagcctaggaatgggtaccctgctccctttttgaccctccaaacatgtattctcagtttccaaggtttctatttatcctcacttaggtattgctttatgtatactctcaaaaccttttcttctctccatgggtttattttcccagcaagatggcatatttcctgaaggcaggttctgtgtcataaactccactagaatcccgcttcttcagggctctgaatacgatgggaacttggtgaatgtatcttgatttactgctcatgaagcaagagccacaggaaaggtccatgctatgaataacaggcataaaataggagaaattggcttataacatagaaaaacaagattaaatgcttatgtcatgccacgtacgtaataaacattagaggtactgcacacttaaacatgaaaggcaaaactatacaactatagaaatattggagaggccgggcgcggtggctcacgcctgtaatcccagcactttgggacgccgaggcacgcggatcagtacgtcaagagtcctacacgagcctggccaacgtggagaaaccccgtctctactaaatttttggtagagacagggtttctccatgttggtcaggctggtttcgaactcctgacctcgtgatccgccgctcggctcccaaagtgctgggattacaggcgtgagccaccatgcctggccaacatttctatatccccctagaactactctcacaggtacacaaagtagcttgcatgaaatgtttgttgcaatattgtaatacagagaaattgaaaacaacctaaatgtccatcaacagaggaatggataaataaaatgcaaaatatgcaaatcatggaatattatatagtggttaaaatgaacatattactttcacagttatcaacagaattagctctca

SEQ ID NO: 138429 - DNA, 1027 bp, Homo sapiens
ggctctagtaacatttgtcactgccttaaaaatgtttcaatttgatgtcaattaatacttttttttttttttttttgagacaaggtctgtctctgttgcccaggctggagtgcagtggcatgatctcagctcactgcaacctacacctcctgggcgcaagccatcctcccccttagcctcccgagtagctgggactacaggtacgcaccatcatacctggcaaatttttgtattttttgtagagacagggttttgccatgttgcccaggctggtcttgaacttgtgagctcaagcaatccacccaccttggcctcccaaagtgctgggattacaggcatgaaccactgggcctggcaatactttctttcctattcattagctcctatttggagaagaagttgagggaggttctctttaaaaatagagactgtatcatcagggctgctggggaaagggaaagagacattgtatctttgttggaatttgggctttctaagaggaggagtagaaactatgctggtggttatggtggttgtgggatgaacaacaggatggatgtccagatggaccaagtcagccctctattgtaattcctggatgaaagcttgaaggacctaatctcaagaacaccaatgatcctactgtcctcctatatatatgaacagagatgggaggatgttctctggttatttaataaaggccagccacaaacaaggcaccatactaggtttcatgcgcgtccatgtgaaatcaccaaacaggctttgtgtgagcaataaagctttttaatcacctgggtgcaggcaggctgaatccgaaaagagtcagataagggagataggggtggggctgttttataggattttggtaggtagtggaaaattacagtcaaagggggttgttctctggctggctggggtgggggtcacaaggtgctcagtgggggagcttttgagtcaggatgagccaggagaaggaatttcacaaggtaatgtcaccagttaaggcaggaactggccattttca

SEQ ID NO: 138430 - DNA, 1030 bp, Homo sapiens
tctactcagagtaatgtgtgcagagcacaagggtctttgtccctattggactccacagagtcctgtagacattgctaacatttggcaaaacaaagatagcagcttaaacacatcctaaatgaaatgagactcagttgccccatgtattccctatcaaatgtagcatccagtagacaacatccacagagatcaatttgcaattatactgagctggttcagcctttaggttgtttcatcatgaaacacagagagaacactttgaagcatgtgttcaggtaaaacaggagggagagcactggacagggagtcggaaaaatcagattcaaatcccagatctgctacttatgaactatgtgaccttggacaggtcactgaatcaccacttcctcatctggaaaatggggacagcaataactactttgtctactttcagggttgtgagaatcaagtaacaataatgtcaaagtcctttgaaaatgggcaagatctataacaactgtaaatcatgataatacctactattagacaataatgtgtatacaggcgaactcttcctctttccagggtggttgggttttctttgcgtgcttgggtcagaatcatttgaccaattatgtgtgaccagatgagaggtgaatgttggaggaactcaattcctgccctgggtaacatcaggaatcctatctaatgtcagccgagctgactggataggttgtgcattaaaaacagagagggagtaaagaaggatgttgaatattacttcctcaggggatgaaatccctgaggaaaggcaggaacaaataaagtgaccacagggacaattgcctgttatggaggctgggtggtttcctccagaggaagagtgccacagataagggcacgattgaggatgcacattgggtcccaggtcctaagggtggacgatacttgggccaggtacatatgatggagcagccactgagttttcatttattcaataacagagtatctaaagtactttgaattatagatcatctctaacaaggtactg

SEQ ID NO: 138431 - DNA, 1642 bp, Homo sapiens
ctaaagaagaccaagtgaggacagtgacatgatcaggaagggtcacagcagccatggtaggtgaatggagcagcttttccttcctttcctgctttcagagcctactcagtgccaaacttacatcaaaagctcagcaagtactgattgattaatccctcttgcctacggcaaaatggccctgagggctatctctcagctctgcactggcctctgagctgtctgccaggcagggctctagaaaagagtcccaaggaagagaataaggttccccaaatcagcttcacactgcaacaaggagagaggaggaaatggtgggagactgacctgaggaacaaggtatggctactattgtctctagtaccagttacttccctttcatcttcccattcgtgggcaaggtggagacaatgtgccaaggataagttttaacaatcaaagtcctacctcagcttcccaatgcttgcacataaattggaatgtgtacatcattcattctgtctctctctgtgtgtgtgtgtgtgtgtgtgtgtgtgtgcgcgtctgaagaggagtggggagtataggaaacaagatagtccagatgctgttgccgtggtaatactaaatcgtgtccaaagaggaggctgagattcctttttagttaaccttgtccacatgatttgactatccagcaggcttggattcccaggccccagagacttcgggactgttttccagcacttgaatgtggtatataagtgctgatatcaaaagggatatgtaggaaagacaagattataggcagggcattgtctgaccaggacgaggcccgaagcaaaagtctttgtttgtctctggcacctcttgataattgttgttttactcctagaacccacccactgatccccatccatccctagtaccagtcacggctgctctagcatttcggccttgtcaactactgcaggccctgatcaaggaggcctctgttcatggggtaaggttaaggggtgggttctgggaggagggtaagactgtagtgcagattcgagacctagggaggtggggccagtttctcactcaatgagcctgcctgttgtttagctctattgtatagggttcttctatctctccctttgtcagctggattcaagggacaggctgggaattgtgcagggtacaattggtctctttctaccattcctttcgatgaaagcccttcctctccttcctttgatgagttcccagattcacactgaatttccatcatggagctggtccttgaggcgggcccagggcatgggaaaggagggagggagggttgggagctcttggtgcctgcttaaagagacagcatcaggatcaacacagtcccttgatgaacctggatctgtgtaagtcacattggttctgttgatctctgtcagaccgctgtgaagagcgctggtgagaagggcttaaagttggagtatcaactatcacagattgattagacttgttttgggagtttgtatacaaatgtagccaaccatgacatgatcttttccctttgcttacattttgcccacacaacttcgttatatccattttaacacttgcttataggtagctttagattttgattcacagacatatgtttgttcaccccaacaggatttcaagt

SEQ ID NO: 138432 - DNA, 1062 bp, Homo sapiens
catgcatgtgcgtgtgcacacacacagacacacccatgggccagctctgaaaagacactcttcccaagcacgtttgcaaagttcatgctgagtaaactcagcctccactcacagcagcacagctacagattgcttcttatagaggccaagtttcctggcagcaatgctttagttcttggaaaaggaagttctgctccaaatgttagctgcttactttgtttggcttgggcttctgaggctcatctttggtgtgacactctttgaaggccaagaaagggctgtcatttcaggggatggtgggtaataggactcactccttttgtgtctctgagaacagaggcaaatgcctctacctcgattttcccatgacagagataatttgatctttccaaatctgttcacactgatgcaattcagccatgtaaatcactaggtattcatgctctctgggctaaaaacaaactgtaactaatgttaacagaatcaggaaaaggagtcccctttccctggtaccctatagaaaagtgagtgtggcttggagaaatgcttgaatacaaaaatccaagcctaagtaattaatacaatttatttttattgtacaagctgtcacaacctgcttattcaaaaatagcagcttcccagtacatttgctgagtatttgtgtgtgtgcatgtgtatactgtgtttatagatatataaaatcagtgggtatatatacatatatttatatatatacatacatatgaattaagacattttttctgaagagcttaacattctcatttcttctacattttagggatctggccgagaggccagaggaagccattcttttcctcatctagtcagtcatctacttggcatttgctaaggttcactccatatgacatcttagagcatgggactagtacttggaacacagctgctttcagagcctgtgacttcttgtgtgcctctcctgtttctcagcaacactggcatagggcctgggataccaggtctggggatctcagggactcttagcactttaagacacatgtgttcccaggccctggtgtgttc

SEQ ID NO: 138433 - DNA, 1018 bp, Homo sapiens
agagtcaagtaatttctcaccttgtaaaacgaattgattcattaaccaggggagagctctactgcatgatgtggctgtgtgtctacagcaagcaccctatgactctaagtcactcggacatattgatgtggcaaagccaaatattgttcacttccctgaggaaaactcagtgctagatcaaacagaggtgtggaataaatctttatgatttgattctctgggcctgggccatgagacccatgatgcctcagagacatcggacttccagtcaagtgtatatggagaaagccaagcctgggatgtactgctttttgcagagcatgggtttttcccttatttagttatgattttatttctacccttcctcattcccaaagggatttgaggagggagtgctttcttttctactctcattcacattctctcttctgttccctacagctcaccttcatgattgctgccacttacaactttgccgtccttaaactcatgggccgaggcaccaagttctgatcccccgtagaaatccccctttctctaatagcgaggctctaaccacacagcctacaatgctgcgtctcccatcttaactctttgcctttgccaccaactggccctcttcttacttgatgagtgtaacaagaaaggagagtcttgcagtgattaaggtctctctttggactctcccctcttatgtacctcttttagtcattttgcttcatagctggttcctgctagaaatgggaaatgcctaagaagatgacttcccaactgcaagtcacaaaggaatggaggctctaattgaattttcaagcatctcctgaggatcagaaagtaatttcttctcaaagggtacttccactgatggaaacaaagtggaaggaaagatgctcaggtacagagaaggaatgtctttggtcctcttgccatctataggggccaaatatattctctttggtgtacaaaatggaattcattctggtctctctattaccactgaagatagaagaaaaaagaa

SEQ ID NO: 138434 - DNA, 1016 bp, Homo sapiens
cagaaagagagcactgaccccgatggcgatggactactgaagccctaactcagccaaccttacttacagcataagggagcgtagaatctgtgtagacgaagggggcatctggccttacacctcgttagggaagagaaacagggtgttgtcagcatcttctcactcccttctccttgataacagctaccatgacaaccctgtggtttccaaggagctgagaatagaaggaaactagcttacatgagaacagactggcctgaggagcagcagttgctggtggctaatggtgtaacctgagatggccctctggtagacacaggatagataactctttggatagcatgtctttttttctgttaattagttgtgtactctggcctctgtcatatcttcacaatggtgctcatttcatgggggtattatccattcagtcatcgtaggtgatttgaaggtcttgatttgttttagaatgatgcacatttcatgtattccagtttgtttattacttatttggggttgcatcagaaatgtctggagaataattctttgattatgactgttttttaaactaggaaaattggacattaagcatcacaaatgatattaaaaattggctagttgaatctattgggattttctacaagtattctgcctttgcagaaacagatttggtgaatttgaatctcaatttgagtaatctgatcgttctttctagctaatggaaaatgattttacttagcaatgttatcttggtgtgttaagagttaggtttaacataaaggttattttctcctgatatagatcacataacagaatgcaccagtcatcagctattcagttggtaagcttccaggaaaaaggacaggcagaaagagtttgagacctgaatagctcccagatttcagtcttttcctgtttttgttaactttgggttaaaaaaaaaaaaagtctgattggttttaattgaaggaaagatttgtactacagttcttttgttgtaaagagttgtgttgttc

SEQ ID NO: 138435 - DNA, 1008 bp, Homo sapiens
ggatagtactggatggaaggtttagtacttaaaggacagagcaggtatggaaagggcaacgtaaatgtaaacaggctgtggcagggcagtactaaaataaattagtgacacctaccaccctggatggccagcctactagcccaccggggacatagcattaaagccctttcacaaccctaggttagaatttggcacccttggacagcactctgatgaccagcttaaagaaagctgtcttaaaatcatttcattgccccatagttgcagctggcaaatgactggagagaaaggaatctttagctggagggatgacaagtcagtcatcagttaaggagctccattcaaaagcagtttcaatttaatttcctgatttctgcttaaccacaattaatattctgcaagcgagtctggttgaacgactttaagacataaagaataaaaatatgacagggacttattttaagacactgcaaacaaggacacagcaccatattttggagaattgattcagggttctacagagtgattgtatttttgcctcagaggaaccgaaagccagttcccaagaaagctatgttttccatctgcccttatttggctctgcctctgggatgaatctatagatggagtttctaggctctcagaagctgagagcatctccagtctatcaattgaacccattgttcttagctctcccacacaccataaacctccttttttctaactgaaagagctctctttgtgctgagatcagccgaagatcaagatgcagcagtataaacaagaaacattttcttacagcaccagttgtattgcttttcctatcttcagggtcagtactgagtgcagttatgcaggacgtggaagctgcagctttgtccagagcaacatttgttcattccttaattcgttctgtgaacattcattgagaaactactaagtattgtgttaaaccccaggaagttcaagtttgggggcagtgtgggtagaaaggtgatcaagaccaga

SEQ ID NO: 138436 - DNA, 1014 bp, Homo sapiens
ctagaactcattatcaaaattattggtgtatagtctgttctagcatagattagctttctcaacctgctatataaaattaccagcaagaaaaaaaggtgcaagaataagatttatggctgaagtggcttggtgtcttgattctctattctagcattctcagaaggatcccatccgttagacacgcagaaactgcagggacatttgaatggtcttgattccttcttaactcccttaggctcctcgtttgttggtcttctttcatgcatacgaactctgccgagtaacatgtatctcgatcttgccatcttttctctctgcacagacagcaatgttcttactcctctcctgctgtaaagccactcatcttcgatttccctgaggacttctgctcctacagactctcgacggagtaaagcttccgatagaggggaaacagattcgctactagtgttgatagtcaagttactaaggttctttatcaacgtctcggagcagatttgagaggcccctgaatcgtcccgggaattttcttcggtgagcatttgtggagactctgggatgtaggttggattaaacttctgtgatgggtccatcggcgtcttgacacaacactaagcttctcctggatctttgaaacgtagcagaaactgatgacggagcctcaaattgctacaaggtagcccggaaagagcaagagtgagtgtacttcggatgaagggaatgtggaccctcaggactaaagcagtgggagaggcctgggaggtggggcctggggagggcgaggtctgctctgaagtcaccaagctcctgatcttagaagagatggtgggcgcaggctctggaggctcaagcggaggaggggaaggaggcgagtccggaaaccctcggccaatcagagagggctggggcggcgcctgctagaaggcttagcactgcagggctctgggcgggaaggctaacctggtgcggagccagcctgggtctcagccccgcgtacggcctttcacgagtctt

SEQ ID NO: 138437 - DNA, 1050 bp, Homo sapiens
ataacttttctaatatctgttgctgtttttctgttgaaaatgagcaggtagaatatacattgataggaaatgtgaaaatttttgcttgtgatcccttagtccgaagatagttctgccaggtaagttttcttaaaaatgtttttttctgtcctggcgcggtggctcacgcctgcaatcccagcactttgggaggccgaggcgggcagatcacttgaggccaggagttccagaccagcctggccaacatggtaagacccccgtctctactgaaaatacaaaaattagccgggcatagtggcgtgtgcctgtaatcccagtttcttgagatgctgaggcagaggaattgcttgaacccaggaggcggaggttgcagtgagccgggatcgcgccactgcactccagcctgggcgacagagcaagacgctgtttcaaaaaaagaaaaaagttttttcttttcaggctttcttctagtcaagatgagtgataaaccagacttgtcggaagtggagaagtttgacaggtcaaaactgaagaaaactaatactgaagaaaaaaatactcttccctcaaaggaaagtaagtcatgtggggttctactggaaacaaacaatagaggaagttaataggttcagtaaataaacctatcttctagtaattttttttacacaaagtaagcaataattagagtaccatggtatttaatgcaacagttaaaactatcaaatagttttcttctggttctcacatgatgggcccagtagtgatgggggaataaaaaactagttttttgttggaaaattattaaaaaccacattaaaaccaatcttggaatattggatgtagcactaaaaaacacttagtttttgtctacttttgggtatttggcatttttctacatttaaaaatttgagtccataatattatccctaacgaaccctgtagactctgcagttttgaccttctatatctgatgaaaagataaagtgagaacaaatttagatcttagtatgcttaaagctctcagattcaagggattgattggttctgccc

SEQ ID NO: 138438 - DNA, 1024 bp, Homo sapiens
gaacaatttaattgttatcttgcctttattcctattatctcatttttaaaaaatgaaactgctaatataacttatgaagcaacttatataccaggtgctgtgctaagcactttccatactttgtctcatgcatccttcatgacaatcattttacatataaggatactgaggatcagcgagatgatgaaacttggccaaggttataaagctaggaagtgacagagtgaaattcaaacccagggctgcctgtatccagagcccatctctgtgccctacaacacaatgcagcggagaagacaaatgtggtcctcatcttaaatgggcttctctctgtcaaccacagctctatttccttctcaccacatggggtaggccagccccatgcacaactcacactcttaagcctatgtgccttaggccacttcctcagcctagaatgcttgccctcactcccctacctaacaacagcctattctactctactcaattaaggattgagtcatatgccccttctcaggtggaataaattgctgttgtctttttgcttccaccttcattactgtaccctttattttgtctttctgtagagtttagcacactgttgacctgtctcccaagctagttgactagatttctaagcacttgagggcaggcaccaagttctattcactctagctctatggtggtttacccacaatgatttagtggatgatcaatacatgtttgtgagcagaccaaaggactggctgagagatgccctgaatgaacagacaaatgcattcatttgtggctggatcctggggcagtcacacagtctacccatgtggactagactggctgggagagtctggaatcctctgggctcattttactaggctgtaaacataggaggcaggtcatagggtacaggtgatatctgcttaaggccaactctaggtccattctgtggtctatactttgaattcatgtgaaggggccaggctctcctagattgcttatgttgcaccttcctatttgtggaagt

SEQ ID NO: 138439 - DNA, 1490 bp, Homo sapiens
cccgccggcccgccggccagccggcccgctcccccttcttgctagcagtagcttcggggccggaggctgtgcggcgaggccgccccctcgccccgctgattggccgcgtcgcccggcccgtcacgctcttttgtctcagtcgccagagactgaaagcaaccgcggctgcccggagggccgaactggagggtgggcgcagccttggctgccttgggaaccgtgctgcctcgactcggctacccctcgctgggcggtcgtgcgcactcgctaggtcgggcagccccgggtcgcttagcggccgaggaggcggcagagatcccgttcccctgcagagctacggggaccggaaggcgaaacagagctgtggacgcgggagcacatgctgcccaccagtggagcacaagtaaagaaagaacgcgcgattgcccggcgcggagaggggtgggggaagccccgccaggactgggcggcgcccggcttggagaatcagtaactgcgaggcaggggatggagcactcccttggcctggttgcgctgaggaaggagttgtggttcatctggatgctgccgactggataggatttaggatttgcctggattaaggtgggtgggggtgttgtcgtaggtcgggggtgttgttgggtgtcgggggcggggtgtgttcggggaggtggcaaggggcgggaggagacgatcgcaagctgtcttgaaccccttttgcatctcctcatctcttcctgggaaggaatatgagggtgggaggttatccaacttctagtctctttctccctggcaggtcatcaaagccgaatccgaacttgaattctgtgcggcggattgcagagctggtagggcgagggtctcccggaggaaatgtaagggggatgcgcgggagggcaggaggcactttggcttgcgttcagaagatgggagagggaattttccgcctggcgacagtggaggcggtggaggggaggtatcaggttttcagatgaagctgtttccaacccttcctttccctccttcgcggcacagtcttgaggccctgaggactgggatctgcgacacccagtggacaaaagtcggccgtaccccagaggctaattttctcacggcaggcacctgttgcagaggctgcacgtaaaataaaggcgaacgctagtttccgagctcatgtaagaatctgagaaataacgggggaaacgttgacaagggggtgtgattgagacctgaggccatgaggttaatggtttcttattatcataaatctgtgacacacaaccattgagttccgttttgagggcccagtatcagctcccaacactatgtcatctagaattagaagcaacagttgtcgcccctcctggagtacaggcaggaggggatggatgtggctctgaaaaactacctactagcccagggacacctgctagctctggaatgttgtaattgccagtctcctgcagggtattgttaaggcactgggcaga

SEQ ID NO: 138440 - DNA, 1063 bp, Homo sapiens
tactgggccctcaaaacggaactcaatggttgtgtgtcacagatttatgataataagaaaccattaacctcatggcctcaggtctcaatcacacccccttgtcaacgtttcccccgttatttctcagattcttacatgagctcggaaactagcgttcgcctttattttacgtgcagcctctgcaacaggtgcctgccgtgagaaaattagcctctggggtacggccgacttttgtccactgggtgtcgcagatcccagtcctcagggcctcaagactgtgccgcgaaggagggaaaggaagggttggaaacagcttcatctgaaaacctgatacctcccctccaccgcctccactgtcgccaggcggaaaattccctctcccatcttctgaacgcaagccaaagtgcctcctgccctcccgcgcatcccccttacatttcctccgggagaccctcgccctaccagctctgcaatccgccgcacagaattcaagttcggattcggctttgatgacctgccagggagaaagagactagaagttggataacctcccaccctcatattccttcccaggaagagatgaggagatgcaaaaggggttcaagacagcttgcgatcgtctcctcccgccccttgccacctccccgaacacaccccgcccccgacacccaacaacacccccgacctacgacaacacccccacccaccttaatccaggcaaatcctaaatcctatccagtcggcagcatccagatgaaccacaactccttcctcagcgcaaccaggccaagggagtgctccatcccctgcctcgcagttactgattctccaagccgggcgccgcccagtcctggcggggcttcccccacccctctccgcgccgggcaatcgcgcgttctttctttacttgtgctccactggtgggcagcatgtgctcccgcgtccacagctctgtttcgccttccggtccccgtagctctgcaggggaacgggatctctgccgcctcctcggccgctaagcgacccggggctgcccgacctagcgagtgcgcacgaccgccca

SEQ ID NO: 138441 - DNA, 1685 bp, Homo sapiens
gtactgctgacagtagtttattatgtcagtatacatacatgtgtagagatcataatttagttcccttcttaatgttacaatttcttagtttacttttcctaaagggccatagcataattcttgattcctggtggaaatcttttctgaggtgtgggggtgggcaaggtgtggattgctgtttacgatagtgccttcattagttttagttctgtctgttttcattcattattgactcaaaggtattagaacaggcccttatctttttcctattagatttatttttgttttttactttatgtaagttcagaatccttttttaagtgatgactactgatgaaataatgttactagtagctgaattttagacttgatgctatgttgattaatatttaaatggtgaaagtaattaggcaaaataagcaattctgcttttctgttgctttcagaatttttaggctgtaaaattgtctcaggcaggaagtcagtctatatctctctcaagttcttattgtaggtcatttttttttcagcacagctctaatttttaaatatttggtataacagcttctggcatgtgacctagttaatgttgaaaattaactgatgaaaacccttgtagatctgctaaacttctctataaattgctagaaatatacagagcaatgagatatagaaaacaccttagcttgttggttattaatagagctctaattttaactgtgaaatcatggagtttctttaaatgttttcctagagtgtttgttatcatgaacattagaaatagcattattccttttcttctaccacatgtcttgaacattcacatgggttaaagaagatggaaactgatactactgacaatcaagctgctttctgactttcataattttctttatattgtggatagcattttgaaggtgaccgtgattctgtaggaagagctgtaatcaatatttttcaaactctaagagtacagaggttagtaagatttcttttttttttactttttgttacgtcaagtagcttattaagaaaaagattcatgacttaaattcttaattctcagttgatacaaaggcttataatcatgtgttttaaaattttgatttcattttcgttccttgaaggttaaagaatggaaactggggataaaaattaatacactgcagctttgccaaggtctgtgatatggttgtaaccttttaaagactactaaagtcataatttgaaatttttactaaaataaaacatatgtgtctatggttttcaattggagtagtctttcttactttcccccttcccctctttggttctcctaaccagcttagaggacccaaagagagcttagggatagacaccagaatactctgtggaggtggaacaacttaacctcactgttttcccttccaagtataggaagagcaaatagagcatagtaactgtatctaaattctctacctgctcttagcaaaagcaaaatcccacagaatgattgcctgctgtctttacctattcttcaaggaaaacaggccacttttggagaccatagagcaccatttatctgtcaaatacttggaaactatttacttaacggtcatcagtaaaaaaccctaaacaaggtcatgatataatttaagaccaattcccctactctcccaataatcacatagtcttattactttcaa

SEQ ID NO: 138442 - DNA, 2582 bp, Homo sapiens
atcttatagtagtatctcagttcctactacagctttctaaaggatgagacttgcatttaacaaaatgacatatataatatttttctatagttttgcaactgaattaaaggaaggtgatgtattataatgtgtagtgaggtataaagggctagttcattctctcccaacaagaacttagaataaaataacacttttttttcatgagacttacctcatttttgttaggctatggcagttttgtccagttcctctgtcccttgagtgaattagatattggtgaattaatctcagaaactgacctataaaataatgactcattatagattgggtgaacttctcattttatttagcttttaaaagtgctaaatcctctcataaaggaaaaattataggaaactatagcggtatccagattctgatgagctttaaaaattataaaatatagcaaatgtcttcatattttagccagaaatattagtacacaaccaatatagaagtcttgtttgtttctgggttctccagcagagactttttgtttgtggcttactctgtatagcctcatgtgccttaaaggtggtgaactctagtttttgtcaatatcaggcttttcaaaactcaaaaacaatccaaatgttgtaatttgttttgcataatgcccatggaattggatatcagtaagcaaagccattaaatcgaaccaatcaatgctaatagagtataaaaacaaaaaccttcaaattttaagtttcatttgtgtaactttattttcggcctagctagatcattgaagagccttgaaagttatctaaagtatggcttaatgtatttttttccctctgaaaaagatcatatgccaggatacttcttcaaaccagatcacttttaatatctagaaagataattttcaaggtataggcaaaagcacttcaaggacagagattatgtagcaagttgattctctaggaattctttgaactcatttgtgtaatagctggaacacactcctcttctttcctttaacaaatgaacttttagcacttctgtcttcaaggaaaaacatttgtttggaattgaagggtactcgcagtccgtttatagtttgggacaattaataggaaaatccccagttgcattcaaataatagtgttgatgttgagggcactgactcattcagcatgtctgaactagaagtaaatttaattctgaaaggactgttagttaggaaataagtatttgtatacatatgtactgtggtaactttggattcattttaagtctgataaagtaagataaactttgtcttaaaaataaaattatgctaagtgaataaaaactgagatattttaagctaggcatctttgttagcatagtatccggaacataactacttataatgcttaggtcttatttctttggaaaataagttacttattccagaagccttagaaggaattctgaaaattcttctaactggccattaagagtaaggaagttgaatggtactgctgaagatctgagttgactcactgaaattttattttcttatttttttaacattaaaattatttctttttggctctccctctagttattttttaaattaaggtaattactgttttaacctagagcatataatggcaaattaaattttaatttgacactcataccgaactcagaaaagcttgtttgatcttctctaaattctgtatgtagtactttttttaattgtcacatttctttgttacatctttgtgtccaacaaaacctgtggaaatctgtgttcatttttgtggtgagggatgggggtgaaaaaggggagacttgctctaattatgcatatacatttgactatgtaaaggtagttgtagactatatgtataaataacaagttaacacttaatattctaaattgttctaaggaacagtggcctgaagccatgactagttttgtggagctgctggctcttttaacagtagctgacctattggatttaaactgagactgaaattgacatttgtggttaggttatctagctgaggcttttaacaatggagcagataatgtctgttcctgtagtggatccatttaatttcctatttgagtactctcacttaacaagtattatctattctgaacctttgtgttgggaatttaaggactattgtcaaaggctattaatggtaaacaagtatatgcaaaacaattcacatatgggtaaaaatttcaaattgtgggtttttgtttttgctttttagtttcaaagattagttatgtagcagcaatatcataaccaaagcaagtaggaagttgactggtttggagaatcttcaagtagttttaaatactgtaatgtatcagattgttaaccaggatttttttttcctgtattactgctaaatatattactatattaatgcacttttgtatatataactgtcttctgtacattctgtacttactacagtgtatataaagcctgttttccctgaagctgtgagggaataacaatagttgtatcataagtcgtttctattttgagttccttcttgtacttgaaagtagttcagtagtgaaatctaaa

SEQ ID NO: 138443 - DNA, 1048 bp, Homo sapiens
gctaacaaaccatcgggcgcttttacatatgtttcctttttctatcttatttaacagcgaagttgttaatgggaaaaacctccctaaagcgagtcccaaccgtattacagaaaactgcactgggaggtgggggagagaaataatgtacattcatatatatatatatatatgttttttttttgagactcactctgtcgcccaggctggagagcggtggcgcgatctcttctcgctgcagcctccacctcccgggttcaaacgattttcctgcctcagcctcccgagtagctgggattacaggcatgtgccaccatgcccggctaatttttgtatttttagtagagacagggtttcaccatgctggccaggcttgtctccaactcctgacctcagcaacctcttcggcctcccaaagtgctgagccgagccacgttcatattattgcattttatccacaactccaaatactgaatatttgtaattttctcccctaagagagagacttgcagcacgcctgaatttgactgaagacagagtgcaggtcagtaaatcttgaaaaagcaatttggcaggacagccattctaaagcatgctttaggttttgtcctggacattctcaagctggtgttttctgttgtcttttccatggttgacaaataagttttgaacagtaggggctttagtggtagaaaataggatgtgtaaacttcagattatggaaattgctcataaacagaggaaatatgatttcctaaaggaaaaaaagatgtgttttcatcttccttctatatctgtatctgtctttctctccatatagtgtatgcacatgtatatgtacatatacacatttacgtacacatatatgcacatgtatacacatacatacatacatatatcccaataaataagattaaccttcttctaacactggtatcctctagggagaatgttagttttccctaaaggattacttctatatggagtcatgttcggggctcagtctcacctcggaagtattcaaattaatgcacagaatagctcagtttta

SEQ ID NO: 138444 - DNA, 1025 bp, Homo sapiens
tcctattttaaagatttgctggtcaggtgtggtacaagctcatgcctgtaatcccagcagtatacgaggctgaggtgggtggatcacttgagttcaggagttcaagactacgctgggcaacatagggagatctcatcctacaaacaataataataaaaattagccgggcatggtagcatgcacctgtagtcccactacagccaaaaggaggctgaggtgggaggattgcttgagccccagaggttgaggctgtaagtgagctgtgatttcatcactgcactctggcctgggtgacagagcaggaccctgtctcaaaaaatagggcaaaaaagggcacattgtgccatgagagtgcatgagttggggacccatcctgatttagaccttaaggaaggttttctgggggatgtggaatttgagttgaaatgtgaaagagagaagatcccttcaagcagaggtgataacatgtgggaaagcaaaatgccagtgcctggaagtaatatgggatgttctaggacagaagtgggcacactaccagtgtgacctgctgtagcagttccagttttgtaaattaagttttatctgaagacagccatgcccattcatttacctattgtctgtggttgcatatgtgctacagaggcagagttgaatcgtggcacagttgaatctttgcagagttgaatagtttctgaagaccatgtggctcctttgcaaagcctaaggtatttgctatctatccctttacagaagaaaatttgcataaaaaaattagctaggcgcggtggtgggtgcctgtattcccagctactagggaggctgaggcaggagaatcacttgaacctgggaggcggaagttgcaatgagccaagattgcgccactgtactccagcctgggcaacagagcgagactctgtcgccaaaaaaaaaaaaaaaaaaagagaaagaagaaaatttgccgacctctgcggtgggatgtaaaagaaagctaagatgacaggaaaaaagcaatgcagggaatgatg

SEQ ID NO: 138445 - DNA, 1078 bp, Homo sapiens
ctggctgcaccttcagctaaatgcgcttcagacctaatatatctgagcataattatctggactgatataaatttgctgtacccagcacttttaagcattgatgctgtcagctttaaagcacctactcagagttctgagtggtttctgtttggactcaactttgagatccaatgagtgatttaggtgaaagagcaccactaggctgaaaaaaaagggaaataactttttttgaactcttatgagctaagtcctgtattttgggctgtatatgtgttattttctttagggccctgtcaacaattttgttatccctaacttacagatgacaaaactgaagatcagagaaatgaagaaacatgcaagggcacacagctcataagtagtaaatgaggtgttaaaatcctggtctattggtttcagagcctttgtgcactttacattagattagtaaggccaaaattcagtcatttgtaatttaggtactacctctaatatcctatgtgatttttttcttttaatcatctgttaaattaaaaactttagcctttccttaagcaaagatgtcttgaaaatcgggtttggggtgtgtgtgtacattattcatctgggtgtcgtttcagatcaactcatgtactactaatggaacacatgtcattctttggaaatgctgcagtttaccattagtggaagtggaagggaaaagggaaggcaggtaggtgcattctattagccttccacaaatcaaccacaattttttttttttgagacggagtctcactctatcgcccaggctggagtgcagtggcgtgatctccgctcactgcaacctctgcctcccaggttcaagcaattctctgcctcagcctcccgagtagctgggattacaggggcctgccaccacgcccagctaatttttgtatttttagtagagatggggtttcactgtcttggccgggctggtcttgaactcctgacctcgtcatccacccgccttggcctcccaaaatgctgggataccaagtctccacagctcacagcattgggaagctctgctataatctaccattggactggcttt

SEQ ID NO: 138446 - DNA, 1047 bp, Homo sapiens
gtaaactcattctttcatttgaaaaacaaactattccacaaaacagtaaggcttaatatcttaattagcagatgcagataaaattatagttatatgaaatatctggttgcaatgtattaaatatctgttgacagtgtatttctttctttttcaagctgttctttacctctaccctgcgcaatcaccacagccgggtttacttcatgacacttggaaaacttgaagagctccaaagcaattatgatgtctaaaagtttccagtgatttattaccacattataaacatcatgtataggcagtctgcatcttcagatttcagagattaaatgagtattcagttttatttttagtaaagattaaatccaaaactttacttttaatgtagcacagaatagttttaatgagaaatgcagctttatgtataaaattaactatagcaagctctaggtactccaatggtgtacaatgtcttttgcacaaactttgtaacttttgttactgtgaattcaaacattactctttggacagtttggacagtatctgtattcagattttacaacatggagtaaagaaacctgttatgaattagattacaagcagccttcaaaagaattggcactgggataagatttttcagaaaaagaaaaacatcggcaaactgtgtgtgatttttccaaagctatataaagaaccaaaggtttagtcaagaaacaaaaatcttaaagattattataacccagactaaggttgaacaacctgcatgcccagagaaaactatggcgacaaaggggaaaaggccaccactcgttttctcactgattcatgccaattaagcctacagttaaagaccagttttgttcttttcacccatttttaagctggttttctcctgataagaagaaaggaagaaagccccagacgcttggtttttctcagaacccccaaaagatgtgcaatagctgttgttacaaaccaccaaataatacagttgtgagcctgaatacaggactgaactcctatacacgtgtactgtagaatgagtatttt

SEQ ID NO: 138447 - DNA, 1026 bp, Homo sapiens
agctttcacttagtgtaagcattctctcctgggaagcaggatatctattctggcagaccctaaaatttaatgaatgataatgatgtgtgaaaggaggcaatccagttttcacctctttgttgccagattcacgcacactagatttgaggacatggcaccaaataccagttttgggttcagtgctggaggaaagtgtcacaactttgcagggtaaccagcctaaactggtaggttagctaaactgtttcacctggctgggggaattaagtcaaacgtgaagatgctaatgaccatacatagcctccctgttaaacctaaatgtattctatggtaagactaatttcattaaaacctactcaagggagtctaaataggtctattgatctatcttgttggccatagtagctaaaggtaatggataggttcctgaccattgtctctatggtgaagacgctgattttagggagttgtattcatgctgctgtatgaaatcagaagtcaatgtacctacttgggtaggacaattctctttacttagtggtccactaaggggtccaggggattgtgttgctatcgctcattaaaggtggtaataatataataaaatgtcatacacatccccaatgtaaagatgttctgtagccaactctacaacatataaaacataaaactcaaggtgacacaggaccctccagtttgagatttcatgttacacttgatttggatcagctttacagtgatttggttaagccacaaagccacaatggcagtgctactgagtagatacaacattgacagccattcatgaagtactccaaggctactaagacatcaagagatagacgtgaattcccttagcatgtagatggggattgcaaaaccagaaacaggtcaaataatcagctacttttgctacttgactaaagggttgttttgccatgctggtgtgctgaatccaaggaaaaaaaatgttgatttctcccaatccttgcacttctcaaagtcacaaaactcaaatctaggtgc

SEQ ID NO: 138448 - DNA, 1040 bp, Homo sapiens
ggaaagggctttattcagctgggagcatcggcagactcacgtctccaaaaaccgagctccccgagtgcgcaattcctgtcccttttaagggcttacaactctaaggggttctgcatgagagggtcgtgattgattgagcaagcactgggtacgtgactgggggccgcatgcaccggtaatcagaacggaacagaataggacagggattttcaacgcttttccatacaatgtctgaaatctatatataacacaagcagttaggtcaggggttgatttttaactatcaggcccagggtgccgtgctgggctatctgcctgtggattccatttctgccttttagtttttacttcttctttctttggaggcagaaattgggcataagacaatatgaggggtggtctcctcccttagaagcagagagccctcaccagaatccaaacctgtggtgcctagatcttgagtttctccatctccagaattgtaagaaataaatttttattgtttacaaattacccactctgtggaatcttgttacagcagcccaaactgacttggacaccttctctctggatgaaaagatttataatagagatttgaccttacccaactgtgggaatggttaaaacaatccagatttagctgcttgtttagaatctagtgctgaccctcaattcataagacatggggtcagaaaggaaaaatgaatattaacttggaaaatgtaaggaaaaacaacatgcaaacaagatggaaactatatctttctctcactggaacacatatcagacgttctccatcttcaagccagcaaatttactggcatgcatgacctgcaagagaaatggaactcttggcacaaagtcctcctgaacctggaccagaaattactgaagcttgaggaataggatcctggtagctacagctgtcgcctttgccaatgaggtgaaccagcagatgcacaaaatcgcttgtgagccacaagaggtttcttgacctatgccatctgtattagtccattttcatgctgccaataaagaca

SEQ ID NO: 138449 - DNA, 1042 bp, Homo sapiens
aaaggctatatactttatgattccatttgtatgacattctggaaaatgaaaaactatagggacagaaatcaaatcagtggttgtcaggaactgacagagatatggattgactacaatggggcaggagggaacattttggagtaaaggaaaggttatacagctttctgtattggtagttacatgatggtacatttttctcaaagctcttcaaactgtacatctaaaagagtgaatttaactctatgtaaactatacctctttaaacccgggtcttaaaaagtcattcaatcagaatacgaccaatataagacatttgtattttactgtgagagtaatccggatacatacatatagggattttgatttgtactttgaatcaatgattgccaaagaaggctgtgggttccacaagatatgtttaaaaataccctctgtagtgtagaaataatatgttaaaaatgtaaattattttgatctcttttattaatttttattaacttgtacttctgaattgctttaaaacatggggggggcacctacaacacgtgacttttgatgcagttatataactttgttaaaacacatgtcttcattaattatctctttcattgagagttagttagtacaggacatatgtcaagaaaccagatgacatcagcattgtacagtacatgaaatttatccccattggcagagtctctaaccacactgaagttctcacatgccactaaaccatatgagtggaaagagaggagggaaggaaggaaggaaatggggaggaagaaagaagtagaaaacaaaatgctacaatctggagataatgatatagttaagaatatgtacccagttaaaagcagaagctgagtaacgtatgacagggaaacagagtggtcatagaataaataaatgtcattattttagtgcataaggtccatataacaactataaatagtccagttagaacactcccaaagacaatgaggaggccacagacattggtaaagcaaggaatcttagacatttcatagatattcaaaatatt

SEQ ID NO: 138450 - DNA, 1045 bp, Homo sapiens
catttacagacaagatgatgtatgtagaaaatcccaatggagctaccaaaaaaaagctatgaagctatgagacctaataagtaagtttaataataatgccagacacaaagtcaatataaaataatttattttatttctacacaataaaatttggaatttcaagttttaaagagtaccatttgtaatatcatcaaaaactgggaaatactaagggaggataactatgtacaagatttgaatgctgaagacttcaacacactgatgagataaattaaataagacctaaataaatagagaaatataccatgttctttgactgaataactgaaatactaatttttaggatgttatatctccccaacatttctgtagaattattgcaatctcaatcaaaatcccagtaggtttttcatagaaattgagaagctaattccaaaatgtatgtggaaagagcaaaggaaccagaacagccagacaaattttgagaaaaaaatacaaaagttagaagattcatactacctgatttcaaggctatggtaattaagacagtttcttattgacataggattgacctatagatcaatagaatgcaaagagaccatcaaatatagccaacagattttggacaaaggtaattaaatgaagaaatggcggtcttttcaacaaatggtacggaacaactggacatcacacaccaaaatattcttcttgacccctcagctaagaagatatacaaaattactcaaaatgggttagcgacctaaatataaaaccaaaaattataacttgtaaaaaaaagtagaaaatctttaagattttggtctaggcaaagatttattaggatttaaaaagcatggaccataaaaaattaataaattggacttgaaaacaagttcttttcaaaaaataacatgaaaagaaaacccagattgggagacaatacttgcaaaacacctatgtgatgaaggacttttatccaaaatatataaagaactctcaaaattcaataataagattattattgaataaccaaataaaaatagtg

SEQ ID NO: 138451 - DNA, 1524 bp, Homo sapiens
gcaggtatcctcgctctcttctttcaaagctttgggcataatgagcatatctgatgacaaaggtgacaaaggtggagcaaacttttcatctttaacacatgcactttcctctttgactgcagaatgcacagacataactgctgagatatcaatcttattcttgttctctttttcatcattatcttccgaaagtgaagggaaagtctcgcaccagctagagttttgtaatgactttgtttccacttcacttggaatagtatcgaccattgtgggtgcttgtgatttatcatcatacagggaatcatcactctctgaagatgctaacaagcatgctgagttttccctttcctcaagacaccctggtaagtcaccttcatccttccggtattttttatgagggggtgaatcggactgtttttgtggtacattttgagacagcatagtgatctcctcttcatctgaagtgcttgcttgactcaaatttgttctctcattcagaatacccagtgccacttttagtgatcttccataggcagtttcctctgtaggtggagcactgtcctctgactgtagtcctaatgaggcagcaatggcttcaatttgagatttatttaggatctttgtttctgtgctgtccaatttaattttttcatctagtgagagtatttgaacttctagagaaaatgcctttttcctcttactgtttgatgaagtttcagatctggacaaaacttttgctggccacaactggtctttccagttgcataggacatactcagactccattatggtttatatttgtgtgccaagggttattaccaaaggttgaggtggctatctttgtcactgctaatgcaagttctacccaaaacaatactcttaacaaatcctctttcgtcttatgactacaaagggtttacagcttgtgtggcctgttctccacctcaattttccaaggatgcttgaacacgttgtttgaataggatgataccggaagatactgaaacagggaaaaggaaaagaagaaaagtatcagcaaatacgattatttcgccaaaacgggaggtgagcaattacaaatggagaagggataaaagaacaatgtgcagtggggcatgagacagaggaggcagcataatataagattgcgggggggaggggtggaaaaaaaccagaaaagttgttttataatacctcagattgaagaacttgccctcattattgaacatgcttactaaggagtgaatgtatgtacatggcagcagaggcgggagagcttgtgatgggatgtcaggaactctatgtaattacatactttggtacttttgtgtccctaatgtcatacttatagcagtgggtctccaaacttaacatgtgtcagaatcatctgaaggacttatatttctaggccccatcatgagagttttattcagaaggtttggcttgtgctcaaaagtttgtatttctaaaaagttctcaagtgcctctaatgctacatgtttaaaaagaactctttgaggagca

SEQ ID NO: 138452 - DNA, 1044 bp, Homo sapiens
ccctggctgttccctctgaatgctctgctttctcagagaatattgaggatcctggagagggtccctcaaatccatgcttagataccagccagaatcaaccttccatggaatcagagatgggggctgcagcatgccctgggagttgttcaagggaatgcgaggtttcatttagtgcctctaaccctgtctgggattattcacatcttatgagtagtgaaagaaattttcagagactggattttgaagaacttgaggaagaaggtcaagcctctgacaagtcattgcttccaagtcgcattaatctttctctattagatgatgatgaggaagacgaagaacttccacgcttcattttacattatgagacacatccgtttgaaacaggaatgatagtctggtttaaatatcagaaatatccattttggccagcagtgataaaaagtatcagacgaaaagagaggaaagcaagtgtgctttttgttgaggcaaacatgaattctgaaaagaagggcattagagtaaattttagaagattaaagaaatttgattgtaaagagaaacaaatgctagtggacaaagccagggaggattatagtgagagtattgactggtgcatctcactaatttgtgactacagagttagaataggttgtggttctttcacgggctctttgcttgagtattatgctgctgatattagttacccagttaggaaagaaacaaaacaggatactttcaggaacaaatttccaaagctgcataatgaagatgccagggaaccgatggctgtaacttcccagaccaagaaaatgtccttccaaaaaattctccctgaccggatgaaggctgctcgggaccgagccaacaagaacctggtggacttcattgtgaatgcaaagggaacagagaaccatcttctggccattgtaaatggcacaaaaggatccagatggctgaaatcatttttgaatgcaaataggttcacaccctgtattgaaacatactttgaggatgaagatcagttggatgaagtggtgaaatatt

SEQ ID NO: 138453 - DNA, 1034 bp, Homo sapiens
ctgaattgactttaaacttcatctagccacttctccacactctcagaagcaagatttcccacatctctagcagcagactctccatttacaagcatagtctttctgtctctgtagtttcagtctcttgctgtaagtttacgccctgttctacttcccatcctatgtccagctatgcttctcaatgtggtacattagaggttctaagattataagatcacatttagatagaccaataataaaatggcaacaatatggagatgctccaaatttgaaaaaaaagactatttttccttatgaatttccaataaataaattccaaaaattaataacattattctgcttttgtgtgaaattaaattaaaacccaaaaaaacttaaagtcttgcactgtatctttttttctatttatttttggccaaaagtgtccctgatgcttggatggtgctgagcttgcttcagcagctacattctgagatgtgtgctgttagaactggatagtgcttttaaggtctcagaaatcacaggaattttacttttttttcacatacaagacagagcaggacccaagagatttgatatctatactactcattctttcaattcatttaacaaatacttaccgggtacctcttatgtgccaggcactgttcaaggcactatagatggaacagaacaaaagaaaaaatttctatggtcctgaagctggtattctagaaagctcttcatgggtatgagtaaaaaagagaagcaacttccagagtttaagacaattatcctatgccaaattatgttcccagaacatagtacatggttgttgccaaagaccatagcagcaactgaatgttatatgatgaaaggggggtacacgggcaaaatattggctttattattgccaagttgttttgatgataaaacctaatcaattcagtgcgagattcaattctagagttccaaaaaaatgttgattctgacagtttttgctagcatctttattgcccctgtgggttgacagatccttggagttccctactcca

SEQ ID NO: 138454 - DNA, 1197 bp, Homo sapiens
acattttctgcccccagaaccaagactgggatatgactagaacctgaatgccagaaccctttcagaagtgaagggtccattagtgaggaaaattcagtactgaaatctacccatcataccttaccataaatggtcaaatttgaagccctccaattggagcctgccaagccaacatttctagtacatttccttgtcctccaaccccttaaaatttgccccagaccccaaactggggagacagatatgagctgtgcctcctgtctccttgctggttgacttctcagtgaagcctctttttttcttcaaaacccggtgccatagtattggcttctgtgtgtgtcaggtagtgatcccactgctcagagatagcctcttcttcttggtttcatttacagggagtattttttaattccacagagaaacctctcagtttagcattccctctaacagttctctctagaaaactcacaagtagtctgtagttcaacagaccaactttcttttaattattctctctcacttcttcctttccctataacctgaaagcctggagatttcataatgcacctgtaactgtaaatgactcaggcatgaagcttgaagcttagaaaccaatggtatttcctcctcctggaggaccatccttataatgagaaacttctaggtatgtgaactgagagtgtggttctttcagcatctgtcaatatctctctgctgtgctcaaaaatagcattgaccattgtcacaagattattcattgcattgcttttataacaaaacaatgaaaacaactcaaactagtgccattagaggggatagaataagtaatctaaggtctaggccaaagtggattatgctgtcaaccaaagaatgagatggatctaaatatattaacataaaaaaatcagatgcaaaaatcagatcagccaacaaggaaataaaatgatactgttaatttaaaaatcccatatggatggaaaacaatactttatattcttctcttacaacataaagaaatatacatatccatagaaaaagggttttttttttgtttgttttgtttttttgtttttgacagagtctcactctgtctcgcctgggctggagtgcagtggtgcaatcttggctcactgaagcctccgcctcctgggttcaagtgtttctcctgtctctacctcctgaatagctgagactaca

SEQ ID NO: 138455 - DNA, 2215 bp, Homo sapiens
gtagctggcagtttctctcaagttacagggggatcatacccagcttctccaagaaaataactcatggcctcaaccacacacaaacagaaacacactaaaaaacataggcatagtgatgctaaacacccaataggcttgttatatatgcatatatgccatttgttttgcctgtaaatatccttgcaaactgtttctatgtctggccattagagagcatataccagtagtcatagaaaccagaatatcaccataacattcagttttacattagttttccagagaaactgggaaatgtaattcatcctctcaatcaatgcaatgaatgaataaattaatgcaatattagaagacattatgctatccattcccccaaaattacctttggagtgaaataagaggattttgaaacaatggttaaaatgaaagaacaaagagttaattattatgagttttctgtcagacacaccaaatctggtctcagtctctgtccaggaccactttagaacctgaaataacagatgcttatgctgaaactatctataaatccatacagtttcaaacgtggcccaaacactcaatagttccagatgatgtggttcacaagattaacatgttctgtctattgcaccttaaattcatcctcagagtcagagctttgcatcacagctcagtggttcacatatgactcacagtagtaaaattaaatgagtgaataaggtagtataaaaaatgttagaatctggacattgagatgactctaatgaggaagtaaaatctaagtaatatgtaagaatgagatttttcctctaccaaagtcttcgttgataatagagatacccgatacctgactatagcagtccccaggaatataatgaggccatgtccaaggacctttggcaattttgggtcaacatgggaaggagaaaatttagtgaatatcaaccctccagatatagtactagggaaaccagccactgaggagttgaggtaaggacactggaaacatttttggacaacaaatatttatgaagatggtattatgaagaaaataattccagaaaagatacactgactttcagttccaggacaaagtggtatagagtgactttacttgcactttccctctaaatgccatgaaaataactcaacacagaatcataaaagggctctgaaggtgtaaggaagaagttgacaggccaaggaactcaagacatgaggaaagacaccactgagtcccttgacttctttttatctctcatatattcttgcctgggcacaagagagtcctataaccaggaagctccagcaggcatggaagaaaaacaacatgaacaaaaaagcctactttttctggtcaaaggcattgaaaaaaggcaacccagcaaagacctagcagggagatccatactgcccaacaactaaagctgtggtggttccgtgtatcacagtagtagcatcagcagggcccagccagggatgtatcccacagtccatgcatggagcagtcgtgaattagtccacaacaacattagcgatcaaggcccagtgtttcattaattccaacccaatgacattaggtgcataggtggcacttgcagagatcaagtgggagactagcagagccagaactaagtcaatcagaaaagcactgacccaggctctggataccaaatttccatttgaactaaaggttacaaaagttggccagtatacataagctagacctaaatatggtgactgcttgttgaagtttaatatttatatagaatcaagaatctcctaatataagtcaaaatgtccagaattggatcaaaaataagtcatcataccaagaaccatggaaaacaacttgaaagtcattacaccaagtaaaataaaccagacacaaataaaaatactgtatgatgtcacttacatgtggatctataatagttaaactcacagaagcagagaatagaatggtagttaccaggggctggggggtggtgagagatatagcgagatgttggtcaaagggtataacactttaaattataagatgaacagtttctgggaatctaatgtacagcatgaatggtgatggatgtgttgattaatttgattgtgataataattatatgaagcatacatatatcaaatcatcctcttgtacagcttaaagatatacaatctttacttgctaattaaatactttaaaataaaagaatagataaac

SEQ ID NO: 138456 - DNA, 1111 bp, Homo sapiens
aagcaaccctgttcttcctgggatacacagaagtaaggtcaggctgggacaagagtcatgcctgtatacaaggtaagggatagttttcagcagtttctctgcgaggagaaaagcaggacagatatcttgacgcacattcgggctgtcatagtttcgcacagatgtaaaatactgtggtcattttgtgggttagttttccagtgagagcatcattcagcaaggtagatgaggtttcagtgtagctctgctacggaaagtggtgtgtgacattaaaattatccttagctgctctgttttctggtctctctttctgaagaaataggcaaaatatccacatctcttcaataagagggttgatagaaggacaccaaagtgcacattgtttcatctggaatacaaaggataaatacgggtgacaaaggtaggtcctggtcatctgaggtaatttctggtaatatggagccacacaaggtccatgggaccattggatttcagtctagaaatgctgggttccaatgctcagaatttaaattcccaggaaataaatatttagatacttatcttcactttttcacacaccgcatggtgaagagaaatgagatttatcgtgcaccctcaattctacaataagaaagcaaaaaaagaaagaatggcctgtgaggatttgaagagataccttcatcagtaataaagaacatgaacgtggaaggccttctatattttaatgtattccaaacgccaaaacaaaagaatgcaaacacaggattggcctgtgtgtgaggacagcatcactgggagggaacttgttggtgtccaaggaaatataagggggaagtggaaaagtcagatcgccactggggtttgtcagctatcaaagcaggctatgtctcttccctgcattcatcagcctagcaatactcgctaaaattgttttaaaaactaactaaataaaactgggcaataatttttgttgtcagagtttggatctatagttccagaatttattctggttttctctcctcatttctacaactaacagaaaagcttttatttaaaaaaaatcacaccagatttcaacataatttattgtttgtatttgtatatgtcatag

SEQ ID NO: 138457 - DNA, 1040 bp, Homo sapiens
atagggtcagattcctcatcagattcactgtggggatttgtttggaaccgacctactgcatgcttggtcgtgaagggatgccaaattccacgaggccccccaccaaaccacctctaacactcagtgctcacagctgatccccaaactcaaggatggggcggaggcatcggaaatatgtgtcagaagccctttgctaagtgtctcaggacactttctgtgtgaagaaggctctgatgtgtgcctccgttggccagcaatgacccatacccaattccactaacattgtgtcaagacagctcctcatagctgatgcacagaaggtgcagtcaattgcccaaactgattaattaatcatccctactttcagccataagtcattgtagcaccagtcaacagagaaactgcatggcatttttgagtcgaagatgaataaatattttccatgacacattaaatttatcatcagaacatctgcatcgaacaggattgagaaggctcacttgagactcacattgttattaccaaacaaatgaagtggatgacaacatgttagaacctgaaattgtgatgacttattcagaacacagagtcaaggcaacacacgggaaaagattttttcctctggacaatacctaagttgcaatcacagataccgttttttataacactctccagggctgtcataagttggttggtgtggcggaaatgcctgcaaactctcagggccctttggtgaaacgtcatggcaggaggaagtagagatgtcaaactctccacgcacagaggaaggcaagccccacattgagttgctgcctgggccaaaacacactggtcaatatttgtaaaactatgtatgaagataataggagaggagaaagagtcctggcaagagattgaactcccacagagagccccgtgtttggcagtcacggacaaattaaggtggacctgtgacattttggaatttgcttccctcaggcaatgctgcaatctacatactgccaatgaataaagatgttcagttgcatggctcttacaga

SEQ ID NO: 138458 - DNA, 1113 bp, Homo sapiens
ttggggtgtgtacacaggcctaaggtgaagcatggcacagagattgggagtgctggaaggaattcccatccccagagtagggcaaaagaaaggaagatctgagggttgtgagaactcataatgaggtaggacggaaccaaattgctgggaaccagacgctgagcaaagagggcagcccagataagagtgcattttaaaggggcaaagaggaatgaccccaggaacctgggtacttacatctgagaaagggtagctgcccgataagtgctgagcattaggaccttagaggaggcttcctcagggctgggactcagactttgaacagagagaggccaccagcaggctactctgttgaatgacctgagtgggtttgatgcatagtgtccctaaagttagaagaaaatggcatctgttccttcataccctgaaaggaaactgcatggcactgctggatgaagagcatttgttggggtagcaatgctagaaagaggaggcagaaagggagttacaatatgcttccttctctcccaggtctcctgtttccaagtggccttatcaaagccgataatgcccgcaagtccaagggaccagacccaatagggagctgggtggtcaaggacaaagggtattgccagagatggggcaatggcattgatgcacactctaagaaatgttgaactgagagattcagatatccctgacctaccatttgccgcttcttaaggcatatttcatacaaggaagtcagcaataagttcccaagaaactgtgcatctgtttcaaaccattattgatagatagaatgagttaccagccccatcatcaacaatatctactagcaggcacccaaaaagacataaaacagcctttactaaggagcctgtgctttctgtcacaagtacagaaaagccatagagagacacaacttttcttttatggagccagtttgcaaaggaatgctcagctacaccagccatcaacaaatgatgatgtattgggacccagaaagataacatgagatttttccacacatttaaatcttcaatcttttatatcacgggtcagcacactacagcctgagggctgcatctggcctgatacatgctttttttc

SEQ ID NO: 138459 - DNA, 1230 bp, Homo sapiens
tgcaatgtcatgggtttgctcaaatgcgggtgctggtgcttggttaggctaataagtcctgagggagggggcacaacaaatatagagtataatatagcacagagtaaagccatgccaaactggaggccttccaaattttgagtctgaactacttaaagactgtctgaaataattttgtcaattgattttactactaactaggtggaccctgtattgatttcctgatcatcaccaaaattcttcctttccctcataaccacttgtagtgagttcgagcaatttaggggctgatcagggaaaaagatatgacccaaatgtggcattagcacacagcgagctttatttggatgacactttcacaggtttgcgtgagagagacaaccctcacaacaggagaccttccagaggcaccacccagaaaagggtatggaagagggcaagataatttccaggaaagagtggaatcagagaggggacctgtgtgtctaggtgatgtcactcagcagcatgatgacagagtctctgggtcagagagtgccaaagaacagcggtgacttggggggtctcttatagctataggctttatcttagctatggatagcagatgctgggtgctgttttgtggagtatgcaaaacaggcaggatctccaatggctacaattctgcttatttgggctatttttaaaataacagaatgtgtaaaatttgagttttgtgccagccggctttcaagctaatggatcctagcctgctttgaagaggtaaacaacaaagggccagtaatatagaggccttctttggctaatttatgtaacagtgcccatgttggagagtgaacatatgagtttgttcaagtatgagtgtgttaatttgagtacagttgtgcaattaagtgtttgtgcatgttcccatgtatgagtgaatgtgtgaccaaatgtggatattagcatgtacgtgtcagtgaatttgtaaatgttttatttgtgtgatatttttaatgtatgagtacatttgagagaatgtgtagcatatgtgcaagagtgtgagtgtgtgtgttgtgagtcaattcataatcatggacatggattttagcatattcatctgtgtgaatgaatgtgtaaatatgcttgtgtgagcttgctgaatatgaatatatcagtgtaagtgaatgtgtaagcatgggcatgtaagtacatgtgaatgaatgaatgtgtgtgtgagtgaatgtg

SEQ ID NO: 138460 - DNA, 2018 bp, Homo sapiens
tgtaccctggtcaggttcatacaggagctttattacttccttgagaagtagggtagggtggtgaggtgaggaggaggaggaagagggagggaaagctagcaaagcttcttctctgtgggcaagagaactgggttgccacagtgctgtgaaaaacagttccctgggggcttcacttagcacagtacctggcatgacataagcatcccaatattgtagggtgaaggaaagaatgaaacattttcctccattccttcattcacctgttttttgatcactgacactgtgatggatgctggggagggaagtagttaaccccaccacttttcttgcctttctgaactcatcaggaagcacagtgatacagggctaaggccatcactccaaagatggcatttaggcatcttatctggaggcttcttttttgattatgcttttagagatataggtataccttagctaagttctcatcctgatcacagctagcacgtaaagtggctcatctgggcagataaagtagaagtattctttcctctggtctgcatctctgtgccagagcacagggcttagtgaaggtaatgtggcctgtgtttctgctcccacttgctctttctgctgggaaccttcagatagggctctgtgctggccctttagggtaccaggattccactgaaagggaggagttgcttgagtggcactgaatggtctaggataagaagtctgatcctgggattggaggaggggagggggctgcctggcctcgctgggatttattaactgtataacacagcctctatcctctaaaggcatgtggggagcctgaaaggctataatcaagaactgtgtttctagaaacctgtcactgcatagcgctttgctaggggttgttcacaatagccctgaatgctggagtctgggctgcgccctaacacaggcacccatttacttgtcagttgtcattcagacacttattcccaatagcacttagctttttgaagcattggggttggagtacacatttctctctttgcagctcagcttctgggcagtaagcctgcaaagaagccagcaggctgaatgatgagggtcacacatattttcatagcaggagtgtgatgtaatacacagagaacaatggccttgctgtagagctggttataggcagctttgaacccatagggaataataaaaatttatttgtgcacaccaccttaacagtttacgatacactttaaaatccatggtcatatgtacattttgccagtggacagtgatagcacagaggcccaaagaaaaacctcaagatgaagaaacatactcagatacatgctcacacattcagtcacatttgcacactaaaacaattacactcccatgtgtgttcacataactcatacatgaatacagtcttagattcacatatatgcctgaacatacacacaataacatgctcacacacacattttcacttgcaagtgaacacattcaaacatatgaacttacacacatattgagacactcacatatgcttacgtgctcacatcttcgctcacacatgtatatactcacatattcacttaattaacttattaatattttaacatgctcacacaaaaaattatcatgaatcaactcacaaaaaggaaaatattcccataattgcacaactgacattcattcacacacacagacgttctcaggcactcatgaccacaataagatataatgtgctcacaaattaactgacaaacctatacacacaccctatacacactcacagacgtacacatacttacatcacctcaagctgtacatgatcacactcccacacatgaacttccttatgcctttacatacccatgaacatgctcacacacacatcatttactcagacatgaatgaatttcacatattcactcacacaaatgagcttacaaatgtattcacacagacacattcactcacacacattacatgctcaaaacatcaactgcaaacacttttatctgcacatgcttatg

SEQ ID NO: 138461 - DNA, 1022 bp, Homo sapiens
cgttcctcgcctgtccgttttttataaaacgacgcgacacacctagccacacagcctcagatcctattctaacatcgatccatcctgttacccttttaagaggcggatcccgcagtgtcctttcctccctcccagccacctctacccccagtcggctgggcggagcttcacgctaaagccccagagcccgacgcggcagccgcggtagcggagaagactggagctccgaggagctgcatctgcggcaacctgtgtgctgacgctacgtgcctcctggctccgacgtagctcgcagctccccagtctcactccattccttccccacctggcgcgcacctgctcaagaccagggtcctgccaagcgctaggagggcgcgtgccaggggcgctagggaactgcggagcgcgcgcgccatggggccgccgcctggggccggggtctcctgccgcggtggctgcggcttttccagattgctggcatggtgcttcctgctggccctgagtccgcaggcacccggttcccggggggctgaagcagtgtggaccgcgtacctcaacgtgtcctggcgggttccgcacacgggagtgaaccgtacggtgtgggagctgagcgaggagggcgtgtacggccaggactcgccgctggagcctgtggctggggtcctggtaccgcccgacgggcccggggcgcttaacgcctgtaacccgcacacgaatttcacggtgcccacggtttggggaagcaccgtgcaagtctcttggttggccctcatccaacgcggcgggggctgcaccttcgcagacaagatccatctggcttatgagagaggggcgtctggagccgtcatctttaacttccccgggacccgcaatgaggtcatccccatgtctcacccgggtgagtgcagctactagattgcacccctccagacctctgccatggccagtttctcttattttcctcattgccctcctcgtcctatccccttgctccgaaggaaagtgggtgctctttctgtccc

SEQ ID NO: 138462 - DNA, 2734 bp, Homo sapiens
ctctggtggaaaagggtaaaacaaaccgggtgcagaggctggcaaatcaaggactgtttgagctctttgcgttcccttttcctggtttttcacaagggtgtctagccttggattaagtggtggtgggcatcgggtcttaaatgaccgaggagatcacctggaaatctcttcctcactctgctttttaacaacctcagactggcagcagattttcccctcctctccctgtttttctctccatgtttcctgggtatcaaatactagattgtgctactgtgccctgttaacctcattgcaattttggtggaaactttgcttagttcttgggttcttctctgcccagtggtctcaagtcccaagtgacttggtatcagtgcttttgtttgcttctgaaaaatctgatttaggttattgagttgcaaaacaggtgactaacgttcttgaaaaagaagaggtttctgcatgaggatagcaaaggcctagactttggaaaaaaaaatagtccaggtagttcttaaattcttggagatggtatgaggttactatttttccccgtcggttatccttccacaaacttccctatttgtgattaggtatccataccttatgtatatagttatcctagaccctaaaggacaaaggggaaaaaaatggagaaaaagaaagagacacgtgtaatagcagtgtatcatagtttttaagagctgggcctcaagtcagagcttggtttaaattcctactctgttgcttactagtcctgtgaccttgggcaacttatttcaagtcttagagtctgggttctctcatcagtcaaatgagaatgaataataagaaaacttatccacaagtttgccttcaggataaaatgaaataatgccttaaagagtttagtgcagtaaagcacatcatccactctcagtaagggttagctgataggattagccttctgggagtcactggaaggaagaagctgcttatttgactactggaggttttctgtttttcttaaaaccttatgactgaacctgcctagagagcacttgtattgagtggctggatggcgtaatggaaagaacactgaattggaactcaggagatttgagttcttttagccccttctttgcctctaccgactttgtaaccttgtacaagttactcacatgtcaaatgattgtataggcagtggaggccaagttagaagcgtgtactgaaacaaaacaaaagtagatgaactctaagatccctttcagatctaaaatgctatgatttttagtttttatattgattaaaggagaaactgtatctctcttggccgataattcattgattagaatgaatcagtagcttttagaagttactgaaaatcaagaataaagacctaataaagtttatagtctttatatttcagttgactgtctaatagcaagggtttgactttgtcttctaatgagattcatttgcatgaatgatttgtaattgaagagtatttaattacagagtcctacttagaccattttccttttacttctgttaagggtatttatctgatagttttaggagacaataaaattaacttttgcttggctcccactatatgccaggcactctacatacatattacttatactttattgagaggcaatatggtgtactaagaaaaacacaggcattttagtcaagattgggaataaaattctggatttaccacacaatagctttgtgtccttggtaggattatttaactttactgagccttggataccccatctgtaagatggagataatatttatgttgctgtgattattaaggattatatatatatatactacccagctgataatagtcactgaatgttataataggttaatgctaacaggatgcaaaaaaataatgtacaaatgtatgattgtgcaactgtcgatttgaagacatgaatacactgagaatctaactatgggtgttgtgtttcaggataccatataggaataaagccctaaatattgatcactaaattacactacattcagaaaagcattttgatactttaaaaacaatattatctgagataaaggctataccaaagtttgccatcaagctaactagataaaaccagcaaattacttgaggtaaggaatcacatttctccttgaactcctggaaaaactatttttcaatatagggggaaaatcactgcatattatccacatgtgttattgaatatttgtttgcaaagtgttatattgtttgctttactcattcctcagagtaagcctagggtttccttttaacctctggtcaaaaacttatcttggatcatagtggcagagagataggactgagatttaagtatggattagttcattatatattgctgtgaattacgaaggggccaccaaatgtggaaaagccttctgtatcttctttgtttacaaaatctctcttcactcactctcataggggcctgcacttgaattgtttgcccttggttagagtttgtgctgagtgtctatattcccacctaactaatttagaacagttgctttaaaatttttgtttaggagaaagaaactccactatataagagcaatcaattaggaaaatgagacttttatgtataccaaaatttttcaaaagttaattgtagcctaacatcaactcatgcagtttatttctgtattttgtttgcagagtattcagaaaattctgattcacacagataaataattgcaaatg

SEQ ID NO: 138463 - DNA, 1033 bp, Homo sapiens
ctctcgagtagctgggattacaggcctgtgctaacacacccggctaattgttatagttttagcagagacagggtttcaccatgttggccaggctggtctctaacgcctgacctcaagttatctgcctgctttagcctcccaaagtgctggaattacaggcgtgagccacagtgcccagcttatcattttattcttttgctctgtatatagatatattatttaaagaattatatactatatatactagttttgtatactgctttctattgtaagaatttctccatgtatctagaaatagaagatggtcctcttgtagttgaaggttgtggtcattgactgagagttggggattgagcctctctttctttagctaccagaaaggaagtgaaaaaatggagatggggagggttgtgaattggggcatttaaataaaaaatatgcttcaccgaggtttacattgaaatatacttactagccttaaacatggtctgatctaacccatatgcattgcctattgtggccttggtatttcttagggtttgatcaccacttgtgcttcagttcattttctcccccaatattcccataggtaatgcctttttatttttctttttttatgtcttcttcacaattgaggtttgcacctggtttccctgttgcttttaagtagcttttctattataatgatggctactgaactataaactattgttggtgtttaccccaaagtttatttgataaggcaccataggtatttcctgggaataaataatttttgtatatgtaagttctatcgaagtataatatacatcccaaaaaggtacataaatcattgatttagctcagcgaaatttcacaattgagcacacctgtgtgaccagcgccctgctcaaggaataaaatagtaccaaactccagaagagcacctcacgctccaatatgaagaatttttgatgtagcacaattatcaattttgtttcctgagggaatgccctcttgcagcatgtggtaggagcccagtcacccacagaaa

SEQ ID NO: 138464 - DNA, 1052 bp, Homo sapiens
gccctattttctacaatttgggggactatttgtctttaagcaagccttcatataagatgcaaattgggtctcaaaggcaatactgttgaattatagatagttaatctgaggagggggaggtgtttgttgtatataatagcttccttactaagttatgagttccctaaaatcggtaaccaaatctcatgcgtgtttatataacctacaactttcatatagatagtaggtgctcaaaaatgttaattgaatgaatgggtatccttcctttgtctcattgagacccatttaaaatcattttagcaattgggttattatactaagaatgtttcaccaaactaaaactgaatttgttttattttacaggtgcagtagacattgttgcaatcatgatcggcaatctgaaaggcacaaaaattctgcaatctattcaaagaggcatacaagtgacaatggtcatagaagtagggaaaaaacatggcccttgggtgaatcactattcaatttttttcgtttctgtgtccttttttattattacggcggcaactgtgggctattttatcttttattctgctcgaaggctacggaatgcaagagctcaaagcaggaagcaggtttgtaatggtcctttcttccactattaaaaaaaatttactgttctaattgtagtttcagggtcctgcattttaatacattgtacttgctagacaatgatctccccatatgttttacaaaatctggtagtttttaaaagtatgtcagctcttctcaaaggtttattttctatatttgtcaaagaacttaatcctacctgattaaattttctaacacctcattagagaacacatccagcatttaattacatataggtgtaaatacatatgttcttttaaataaacatttttttctaaattacaaaaacatttcatactcaatatagaaaacttagaaattagaaagtacacgggaaaaaaactcacctaaaacctgatatagcaatataactatagtcatcgcccaaaggtaaccactattattttatatgtacgtctgta

SEQ ID NO: 138465 - DNA, 1007 bp, Homo sapiens
acgccctgggaccaaaaatcaggctgaaaaatcaccagactgaaacatatactttacctaattggatataaagacaccagtgaactaggtagaatatctttgctttcaccataatttcaaaattgaacattgtaataaagaatgatcattggtttgacattttatcatcaaccccaatatattcccattcagaatcaagaaaaaaaaccatgtagtggagattcttcactaactagagcgaatgcagcttttgattagtcagaatagtcacattaagcttctgttaagaaaattggccaacaaccagcttctttgaatcagtcttcagttctactgccaaatattcttagaccaggtatctcttaggattagagaggaggaggggaaaggcaaaaggcgtttgacatcatatacttgctttttaaaattccccaaatcacagtaaatagccagtttgggaagaattttaagattggataattgctggctttaaaggggtttttaaatttccttcgtttgtcttcttcacaagaaatgtgaagcctcttaaaggcttctttgccattacacaatggaggcagtgtacaatagtggagagatcatgggctttaaagccagatagaacctgggcttgaattgaatcacagctctgaagcttaccagctgtctggactttagtcaagcttctgaaccttacttttcttgtctataaaacttggatattaaaatagctatttcacaatgttgttaatgattaaacaagatgacacatgtaaaaagcttacaacctgacacatggtaaaggttcaattaatttgtaaacctttctttccccaaacttaatggagtagagacttttaataattgaaatgagaagtgtcttgcatgagaaaatcaagaaagtctgtttatattttctaaattcagaaaataatttttgagcaaactctagccactggggaatttttttctaagtgactaaggcccagtcctccagctactcaaga

SEQ ID NO: 138466 - DNA, 1814 bp, Homo sapiens
atgaagcaaattctgtggcagtggatgttattcctcatgttgacaacccaacctttgaagaagacgaaactcctaatcaagagactgctgttcgagaaattaaatcttaaaatctgtgtaaatagaaaacttgaaccattagtaataacagaactgccaatcagggcctagtttctattaataaattggataaatttaataaaataagagtgatactgaaagtgctcagatgactaatattatgctatagttaaatggcttaaaatatttaacctgttaacttttttccacaaactcattataatatttttcataggcaagtttcctctcagtagtgataacaacatttttagacattcaaaactgtcttcaagaagtcacgtttttcatttataacaattttcttataaaaacatgttgcttttaaaatgtggagtagctgtaatcactttattttatgatagtatcttaatgaaaaatactacttctttagcttgggctacatgtgtcagggtttttctccaggtgcttatattgatctggaattgtaatgtaaaaagcaatgcaaacttaggcgagtacttcttgaaatgtctatttaagctgctttaagttaatagaaaagattaaagcaaaatattcatttttactttttcttatttttaaaattaggctgaatgtacttcatgtgatttgtcaaccatagtttatcagagattatggacttaattgattggtatattagtgacatcaacttgacacaagattagacaaaaaattccttacaaaaatactgtgtaactatttctcaaacttgtgggatttttcaaaagctcagtatatgaatcatcatactgtttgaaattgctaatgacagagtaagtaacactaatattggtcattgatcttcgttcatgaattagtctacagaaaaaaaatgttctgtaaaattagtctgttgaaaatgttttccaaacaatgttactttgaaaattgagtttatgtttgacctaaatgggctaaaattacattagataaactaaaattctgtccgtgtaactataaattttgtgaatgcattttcctggtgtttgaaaaagaagggggggagaattccaggtgccttaatataaagtttgaagcttcatccaccaaagttaaatagagctatttaaaaatgcactttatttgtactctgtgtggcttttgttttagaattttgttcaaattatagcagaatttaggcaaaaataaaacagacatgtatttttgtttgctgaatggatgaaaccattgcattcttgtacactgatttgaaatgctgtaaatatgtcccaatttgtattgattctctttaaatataaaatgtaaataaaatattccaataaaagtttgtgtctggtgttagtttaactatctgtattaggatgtttcttgtgtcactataaaggaatacctgagactgggtaatatataaggaaaacaggattaattggctcatggttttataagctgtatagtaagcatggggccaacatctgcttcacttctggtaagggcctcaggaagtttacagtcatgatggaaggctaagtggaaacacatcacatgacaagagcaggaggaagagagagagaagcaagaggtcccagactcttaaataagcagatcttgcatgaactgagtgagaactcacttatcaccaaggggatgatgctaaatcattcatgagggatccaccttcatgatccaatcacccccaccaggcctcacccccgacattgagaatcacatttcaacatgagatttggaag

SEQ ID NO: 138467 - DNA, 1166 bp, Homo sapiens
cttaaaaaataattattcaactggtgaaaactcatgctgtttgtgaacagttgtggaaggcttatggctataaggtaagctaaaaataaaaaataaaaagcagtcaggcatggtggtgcacacctgtagtcccagctacttaggaggctggggcgggaggattgcttgagcccaggagttcgaggccagcctaggcaatatagtgagataaaaaatattttaaaaagtaaaaggcattataatgtttgccacattgctgtacagctatgacagattttatattgcctttattttagaacatttgcccagttttccaccttttgctactgctatgtaagcacaaaaggtaagattaaatcctaaatgtgatggtatacaatgctttaattcaacagatatttaccgagtgccttttaaaaaacaagcactgttttaagtgctggagataaagcaatgaaaaaaaacaaagtccctactctcatggggctaataccgtagttgggggaggcaaataaacaaatagtatatgatatgactggtgctgataagcaatatgaagaaaaataaagtaaggtatcatgatagagaggggagggggttggtatattagagaaattggtctgggaaggcctcttaggatgagctgtggacagagacttgtggtactagaatatatgagccaaacaaatatttgggaacagagtgaatacatataattttttctagaagttttttctgtgaagggaaagagagaaatagggtggtagctggcccttgtcctgggtgttgagtatacagtggtgaataagacaggaatagttctggccaggcgcagtggctcacacctgtaatcccagtgctttgggaggccgaggcagatgtatcacctgaggtcaagagttcgagaccagcctggtcaacatggtgaaaccccatctctacaaaaaatacaaaaattagctgggcgtggtggcacacacctgtaatcccagctacttgggaggctgaggcaggagaatcactggaacccacgaggcggaggttgcagtgagccgagatcacgccaccgcactccagcctgggtaacaagagtgagactccgtctcaaaaaaaaaaaaaaaaaaaagacagaaatagttccaacccttacggagtttatcatgtga

SEQ ID NO: 138468 - DNA, 1087 bp, Homo sapiens
aggtcaccagtttacaacaggagactggagaagagaggagatgaactgtctgtccactagagagccataaagtcacagtgcggggtggcaggggggcgggggagtaggaggtggtgacacccacaggtgtgggagtggggctttccctgtccagagaagactagacaataggatacctaggaggataagagttagaacagctgataattctggaattcttgttatgaaccttacatggattaactcctttaatacaacaactttgaaggataggtacagttgggaaaactgaggcttagagtggtttttaaaacttgccccaaatcacacagttggtaaattgtggcaccttctaagcgtcaggctttttacacattttacctcattgaatccttatggcaaccctaaaactcaagcactattattttccttgttttatggatgaggaaactgaggttcagagaggttaaggaatcttaaggtcacgtaattaataaatgaccgatccaagatttgagagatgacagcaattgctccaggttacattaatggtaagtggcagaactagagttcagggctgcctgacaccagagccctgtgctttcaggaggtggaatcaacagggtttgctgaaggattaaatctgtgggagggcaagggagaaaagatttaagttctggctgcagggaagtgagtcagaggatatgaagaactctgggccaggggccaggaaacactgagggcctctgaaaggtgtcactgagggaggaatgtttggggacctcctgcccggcagtggcaggctctcacagcacctgggctgtgggcacagggctaccaggggtgagagggggatgagggaattctgttcctgcccctcggtgctgtgctgcctcagagtggaatgggccctggctgggcatgtctcactctggctgaaaagtgggaggaactaccaattgctgagctctcccgttctatcccaggcactgtgcttggcaccacacacactttatcctgaactgggtggtggtggtggtggggcatcctaatgtttacagataagaaactgggactcagagaagtg

SEQ ID NO: 138469 - DNA, 1016 bp, Homo sapiens
cttgttttgggtcctaagcacccagcatttcacagctcaaaaattgctcgaatccttataccataggttatagggatttaaaatccttggaatcccaatatccttggttttaaggtattatatagcatagtattacaaatccctaaatcctcagggatttaaagatcctaaaacccttggagcagtaattcgtaactcagaatgggctcttctcattttccaaccccgccctccttactgcacacttgctgttgtttactgggcagacattttgtctcgctgtcctctccgtcccctgtcctgaaatggcttccagtcctcttccccatacgtggttgctaagtcattggaattcactgttctgactaatcagagctcagtatgagttactttgttatgggcgtttccaatccttgtgccaacttcaactccagtgcacaaactcaggagaaaaatctctgtgcaaaactcaagagtccttcctccagctccatttggctggcccatcctagtgtcccagcacttccccatcctagcactgatttcctcctgtttctcccaccttgttgcagcagtgagagaacacatctgttggggtgaggctgcatttgagctgggctttgaaggatgggcatgagtagtaatggagggagaaaacttttcagaaagaggcagcactatgaatgccttcattaaacaatacttattgagcacttactatgtgccagcccttaacgttgtaatgattaggagcatgggctttggaagcagatgaacatgggttcaaatgccttttctgctgcatgctggctcaaatcataggcccactcccctcaagtgtcaaggtcagctctctgctcttaaccctttcactacaacctctatagttttttgtttgtttgttttttgagacagggtctcactctgttgcccagactggagtgcagtggcacttggctcactgcaacctccgcctcccaggctcaagcaattctcctgccttagcctcccgaaca

SEQ ID NO: 138470 - DNA, 1101 bp, Homo sapiens
gttctgttacaaaactttctttcttcctttccctctgacctcattgttgcagccaagagaaggggtttaggggccagcttctttcttggccctactggcccctctgcacatatgacacctgttaggggccatgtttcttctctgtccacaggctcttctggcctaaatcccgctccttcgactatctgtacagtgctggggagattttactgcagaactttcctgtccaggcaaccatcaacctatacgaggactcagacagcgaagaagaagaggaagatgaagagcaggaggatgaagaagagaagtaggaggccaatgaaaaggggccagaagggtgtgtgagggtaccagggtccataccctacagcgccacagctcatcccccttcctcacccctaacctatccaaatggaggcagccagagtctgattggggttcagtttgtctggcaagttttcacagacatcagttagccggaagtattagtccagcagatagagctttctggactgaaaattgggtcatctagctgcccagctcaccctggcttacctgaatggcctgtgagctcaggcctcttgcatctcattgtctgggctgctgttgtgttgaccatgggagggttctaggagctctagaaggaaggcttgctgaagcccccaggaagcagagcagggcagggaatgcccttgtggagggaagtagtcattcctcaggccctttgactccctagccttcccaggtggccatgtagtcccgtctctctgtggaaagcctgacttctggcttcaccccaaggaataccaacagcagatccatgcaaggttggggtgcctttttgatgagtcttacaggaagggaaggcagtgtgtagagaatcggcttgctctggggatgcctccccattttgcctgctgtccattgaagtctgtgtgttggcatgagatgaatcaggagaaaaataaactggatggtgttttcctttttcttggaactgtgctgatttcttaactgaactctgcccatattgtgaagccatgggcagaggttcagagaccagctcaaggccaattcattgcttttcctacctgaggtcag

SEQ ID NO: 138471 - DNA, 1990 bp, Homo sapiens
tgtgcataagtctttgatacgggaaggcatttgtgatgctgtaaaattaatgagttggcactgttctctgcatactcttctaggctttttatggcctttttattccattcttgtgttaggggatttggggtatgtgttttttctttgtcttccctcttgacttgcatctttaggatacttctaagtcaggctggtcgcaatcttatttttagaattcttaccaaggtcaacctagtcctattatatccagatgctgcccagtcacacctttcaacttcacctctccgttaataccagtcgcactagtgaaatggttgaggcttgtgggtaaagttgtatccctaacctggacttgtctgtgggtaacatctagagtcagtctgaatatgggaagtttgagttggggctccataggatcagaaaatacttaacttgtactctgacagcttacaatttaatttcctcttcttgcagtaagtacaaatggatcctaggtgaagaaccggtggagaaacgaagaaggctccagaatgagatgacaacaccttctctagattattccatgcctgctccttacaggagggtagaagcacctgttgcctacccagaaggggagaacagccatgataaatcgagttctgagagaagtacaccaccataccttttcccagaatacccagaagcaagcaagaatacaggtcagaatagggaggtttcaattctgtatccaggggccaaagaccaacgccaggggtccctgcttcctgaagaattagaagatcagatgccaagattggtggcagaagaatctaacagaggtagcacaaccataaacaaagaagaagtcaacaagggaccttttgtagctgttgtgggtgttgccaaaggtgttagagattcaggagctcccattcagctgatcccttttaacagagaggagcttgctgagagacgaaaagcagttgaatcctggaacccagtgccttattctgtggcctctgctgcaatccctgctgcagccattggggagaaagcaagaggctatgaggagagcgaaggtcataatacaccaaagttgaagaaccagagagagctggaagaattgaagagaaccacagaaaaattggaacgtgttttggctgaaaggaatttgttccagcaaaaggttagggtaatacctcaccactaggaataagagaccatagtaaccaagggagcgggacattggtgccctgattatttaatgttctgaggcctttaaataaaatatgcccctgaactattctgtggtgtgtttcagatagagtaactgtagtaggcttcctgcccattttagggtattgaaaaggcccataagtagaggaatatgtatagtggaatcacaggatgaccatatgaggaacggtttttggcgtgctcttttgtggggtcattgaatttctgtttcttggactgcaggtggaggagctggaacaggagaggaatcactggcagtctgaattcaagaaagtccaacatgaattggtgatctacagtacccaggaggcggaaggcttgtactggagcaagaaacacatgggttatcgccaagctgaattccagattctgaaagctgagctggaaagaaccaaagaggaaaagcaagagttaaaagagaaactgaaggaaacagagacacacctggaaatgctgcagaaggctcaggtctcctaccggaccccagagggagatgacctagaaaggttaattactagggtttagttatcagcttgtgagtgctaatgggaagcatcccttaggacccccacttactggccgtagacaaaggaggaagccttaattcacaggccaccaagaattgagtaattacttcttagaaagctgcagccagtctccctgtgcttggtggcgttgtgctttcttctttctagctaatgaaaacataactgttgagaaatgtggttccattttgaaggggcttcattttatt

SEQ ID NO: 138472 - DNA, 1046 bp, Homo sapiens
aactgagtatgcctgggttcagtgttctagtgtacattactgcacactgtttgttttgtgtaggaaacagtttctttttatttggccaagcattctttcctagcatcagaaggattgactcatcctttggcatttggtttgaatttgagacttttacaaatcatttctgtcttttataggtattcagtaatccaccaaagatccttactgttcaagaaatggctggattgaataacaagacaattggatatgagggaattcatagccctagtgtgcttccttctggtggagaagaaagcagatcaccatctcttcaacttaagcctctggattccagtgttttacagttttccaggtgactaaaaagcatgatctcttgtcaatagtaagctttagagtctgttttcctgtagagtaagttggtatgttttaccttgtttctgttttttctaaggcctagcatggaattcagaagtagaaacacaattttaagttgatagaattgtgtgttgcatgtacctccaatttttcagtattataactgctgtatcaggtctataattttgaggtgatcatttgctgatactctttttatgtatcatgtattcacattatattgggaattgtgcaagtgaaataatagacaaaatttgaaaagtgtaaaatactacacaaataaggtaatgttataatgataagcattgttccttttcttcagtatatggatattgaagttctcttgggcctcataggcctagcacatgttgaccacatgtaaaaataactattagatatttgtgccattaggtaagctttatcatttgttgtttcctagaataaattattagtataagtttagcattggactttacttgttcaccttctagcacctcatcagtgttattttgtgtcttcataacaagaagaagcataactgttctttttcttagatatcaggagtatttgaagcactgaaggatatgactgcccctttactcccatgggactgaactcagtactcctaattatgactccttgctttctct

SEQ ID NO: 138473 - DNA, 1033 bp, Homo sapiens
aatagttcttcatctgtgacttgagggaaggatatagacatagagtaggaacataaataggttgaaggggaataagagtttataggggagctcatatatgattactttaatcttttccatttagtgagaatctaatttaatatgaataaggtagagataaggaagagtttctcttaacaagagaagagctctgcaaaaaccttggggaatgatccagggggccaagatatttaaaaaattctgaattctaagtgtacagttttccagttgtgtgtagctctacattaggttgtaatctcgggttatggaattaaataggaattagtaattcgaaagttggaagtttttaaaagtaaaattcaggttttgatttttacaaattacatttttgttgaccctgagtctactgttgttcctttagggagagaaataaagagcaagggctggaactcagatacagcctccagtaacggctatgtggtagaatgttggagtgcttgttcatgggcaccataatgctactatgatcagcatttggatgaagagggactatatagacatattagagttaatatttgattgatttataatagatagggtatagtatttgatcatctgatttttaccttgttctgaattatctacctgtagtcatctgacaatcaaataactccccatcaacttatcaatatttggctctatcctatctctgcagtttggtcctctgtcatagtctctaatgtcaagttacccatacactccatgattcaacaagccctgaaaatttatagaactctactttttagcacttgtgaccatttcaccttttcaaccaaagtgactgttcagtgttacaactttgtcattttgacatgtagcttgcaaaggcaatggattcccatcttggtttcttaaagtgtagatgttcaaaaatatgccagatactctaaattattggtgtctgttaaatgggaacttctcaaagatcaaagaattgctcaacaagtgctaaactttgacatacttcttgcat

SEQ ID NO: 138474 - DNA, 1099 bp, Homo sapiens
taacgtttgtgggcctccctgactgtttctgtgggataaattcttaaaaagagaattacttggtcaaatattaagaatattcttaaagctattgcaacagatgtttaaatgcccgcaaaaaggttgtaccaatttatgtcccttggtatttgatggtttttgctataatatggtgtaaaattttgtcgttgaagcccctggtatgtttgtctccttaacgatgttcttctcagaataagcaggtgagaatcacctttgggttctcttgcaagaatagtaaccagtttggaataatgatgtatcataacaaccgactcataaaatcttttgagaaggtggggtgccaggtgaaggtgagtagttaatatttctttgtcataggaggctgaaaagagtaggaagagaatttaaaatttgcaaaggggataggctcattaatggcttttactcccatcttatgatgcttattgaattctgatcctggaattgtgttaccagtgagctgtcttgtgttgaaatctctttctaactctcattcttcagctgttaatcaacccaacaactttactgaatgcattttctaagtagctgtcaataagaggcagaattagaataccagcaagcttaccatgtgtgtcagcttatttgtgttttaggtaactccattttcttggagagacaataaggcatagtggaaggcatataaaatatggtggttgaagaccaggatttgggtcctgaattttccatttacaagctgtgtaaccttggataaattgtttaatttatctgaagctcaatttcctgacctttatgtaaagtggaaacaacaataataagcatacctgctttgcctgcctcacagcttacagggttgagagatttaaatgggataaattatgtgaaaatattttttaaaccactctatacaaattttaccatcatctttaatgtcttaatgattatttaaagtagtaatgtctacaagtatcccttttattcctattttacagataagattgctaaagcacaaaaaatgatgaactgcttcaacatagtaagacagttatataaagcccaggatagctcgttttcagcc

SEQ ID NO: 138475 - DNA, 1015 bp, Homo sapiens
tttaattcagatatgtacattggttttttttagacataatggtattgcacactgaatacactacagtatagtgtaagcataacttttatatgcactaggaaaccaaaaaatttttgtcacttactttattgcaacattcactttactgtggtgctctggcactgaacccacaatatctgcaaggtatgtctgtatttgcgactgcaaccccacccaacacacacaccattttaaggaaggatcaattaaatcaaaagactacgaatattttactatggctaaagtataatgggaactcttgtgttggctgcagctagtgtaatgagctccctgtctaccctccactctccacatactaatatccatttgttaccattgataaactatgagaagtgtttgtttgtttgtttgtttattctggggagaggaaccaaaagagatgaagaaagagaacagaggtgataatataggatgtgttcccagccctgtgtactgagtgaccccttgtggttagagaaggatgaacaaaccagaaatggcagggaacattcaagaaaggctctgaaattctgggcgtaagtgggttagctttagatctaagtcaacacagtgtaatacagaataggaaaagccctttttgcctattcttgggactcagtactgatttgataccctaaagagcgagcatttttgaagcatgcagagacagtttacttgacactataggtggtatcagtggtcatgcttttctgagtagctcgtcaggcagcagttgtagacaaatgggattcagaaaaggagaaaagaacagggtgactgctcagtgataactacagtggataaattagtttatatcacatgagagacatctctttgctgcagtctcccagtggacatttgtattacatacatatacacaggcacacatattcatggaaaactgtattgacggcatgagtatgtatatagaaagacaaaataatctacagataaaaactataataagtgaatttgg

SEQ ID NO: 138476 - DNA, 3037 bp, Homo sapiens
aaggaatggagaagcaaaaagcttgaggcatatcaaaaacaataaaatggcagtcataagtcttcctatatcaaaataacaatgtgcatggattaagcaatactataaaaggcagagatgtcagaaacaagtctgattccacttcatgccatctatttgagacacactttagaagatagaaagagattaaaggtaaaaggatggaaaacaaatatatcacacagacaacagccataagaaagctggagtggctattctaataccagacaaaatagacttaaaaaaatgttactggagataaagagtaaaatgttacaatgataaaagggtcaatacatcaggaagatgtaacaactataaatatatatgcatctaacagtagagcccaaaatacatgaagcaaaaactgaaaggaaaggagaaacagataagtccataaaaagagttggaatattcaatacccctttttcaataatagagcacctagacagaagataaaccaggaaatagaagacttgaacaacattataaggcaaattgacctaaaagacatctatagaactttccacccaacatcagaatacatattcttctcgagtgcatatgaaacatctccaaaataggtcataagttaaagcataaaacaagccttaataaatataagtagactgaaatcatgcaaagcatgccctctgaccacatgggatgaagttagaaaacaatgaaaagttgggaaactcacaaatatgtggaaatcagacacacttgtaagtgactggctgggtgcagtagctcacgcctgaaatctcagcactttggtaggccgaagtgggaggattccttggatcccttgagaccaggaattcaagaccagcctgggcaacacagcaagaccctgtcattaccaaaaaaaaaaaaaaatgtgtcaaagaaaaaaatcataagggaaattacaaaaccctttgagatgagtgataatgaagacacaacaaaccaaaacttacaagatgcagctaaagcagtgtttacagggaaatctataggtacaaatgcctgtacttaagaagaaaaaagaccaggcacagtggcttacgcctgtaatcccagcactttgggaggccggggcgggtggagatcatggggtcaggagatcgagaccattctgggtaacatggtgaaaccctgtctctactaaaaatacaaaaaattagccaggcgtggtcgtgggcacctgtagtcccagctactcgggaggctgaggcaggagaatggcgtgaacctgggaggcagagcttgcagtgagccaagattgcaccactgcactccagcctgggcagcagagcgagactccatctcaaaaaaaaaaaaaaaaagaaaagaaagaccatagcactaacctcactttacaccttaagaccctggaaaaagaagagcaaactaaacctagagccaggagaaagaaggaaatataaaagattagatgagaataaatgaaatagagtgaagaaaagtagagaaaaatcaatgcaaccaaaagttgattctataaaaagatcagtaaaactgacacaccttctgctagactgaccaggaaaaaaggagaatcaaattactaaaatcagaaatgaaggagggaacatttcaactgaacttgtagaaataaaaaagattatgaaggcatattatgaataattttatgtcaataaattatcaatgaagtggacaaattcctaggaagacacaaactaccaaaaccaactcagaagtagaaaacttgaataaacctatatcaagtaaataggttaaatgagtttttgaaaagatacccacaaagaagagcccaggctgaaatagcttcttaaatgaattctacaaaacttttaatgaaaaattaatacaaattcttcacaaactttttcaaaaagtagaagagtggtgaacacttctgacacatactacaacatggaagaactcagaatatgctcagtgcaagaagccagtcacaaaagactacatattatatgatactatttatatgaagtgtccagaattggcaaatatatagagatagaaagtggattagtggttgcttagggctagcacagagttggggggaatgggaagggctgggggtaacagttgaagtgtatgaagtttctttagaggttgatgaaagtgttctaaaattggtcgtggtggtgatttcacaactctgaatatactaaaaaccaggaattgtacacgttaaatgggtgaattgtgtggtgtatgaattatatctcaataaaactcacaaaagtaggggtgtccatcaataggaaaatgggtaaataacttatggtacatctatttagtacaatactatgcagccattaaaatagtgaagtgtatctatgaatatattatgacctatactcatgtccaaggttgtgtattaagttaataaacaagatgcagaaatatgtatagtatgaatacatttttatgcaaaagcattcatttatgtatagtatgtatgtatatagatatttctgaataaatttaagaaaaagctgggaaatagacatagaaagttataaacctttggaagtgggattgaataggctgaaggaggactttcactttgtaaaatttttaaagtggtgtgattttggggtgatttttacttttttcatttttttttttaactaaaaaattttttaaaaaatattctgccaatggcatggcttccagaatatttgtcaggcctactctggggatatcatctgactatactcaggacaaactcctattcctttgatatactgctcacttaggattaacactctaatttcagacatagttaagtgacaaggaataaattatcctgatatagcctctgatacatgttaccaggggcatacttctaagctggactttttagaaggaagtgcttcctgttaggtagaaaatttcacctctgctttttactagacctacagaccactgcaattgaggaacataaaaatgaaggatatccttcaactggtgcatagat

SEQ ID NO: 138477 - DNA, 1800 bp, Homo sapiens
acttgtttctttgaattaggagacaccctcaaacaccgattttgagtttttattgttattatttttgccattaatttaattttgcttaataatgcaaatgggagattatagaaaaaatgatcaaatcaaatgactatatggccttatagcttacatttaactccaaggcaaaataatctaaactaaacctggaatagaattgaattattaagtcctatgtaaattgaaattttttctttctcttttagataaggagatagcatggcaagcattgcatctagtaaatggatacaaactacatgggaaaatattggtgatagagtttggaaagaacaaaaagcaacggtcaaatctccaagcgacttctctcatatcatgtgctacaggtagcactacagaaattagtggtagctagaatatatataaattgtgggtcctggatggtctttcttgaattggaatcttggatctaggatttatgtatagacaccagtttgtttggagttgaagaggaaaaactaactgagggaggggaaaaaagtaatttcagcttttggagagaactggtagaaaacattttctattatataattgaagactatataggacagatgatatgctgagtatgaagggtaaagtgcaaagagtattattttctcaggatgaattacaacggattattcctaaggatttttaaaaatctttataatttttctggggtcctcaatatttgtctctagagataacattctttcttagactgcttcgtatacacagaaataaaaaactaattaaatgttgaaatatttctttactagagcccatttgccatatttcatccacctagtaaataaaagagtaggacccccaggcctaagcatcaacaaatgctattaagtcagaactatcagcagtaatagtaggtagtttcataagtcagttgacttatttaatgaatgcttcctccacaagttatcagtcttcaaaaagctatatatttttctagtgaaatattttagatcaaaatgttggtgttctcacagccatttaagctagcaaccattgagtatcattgaattcatagcaataaacattgattaagtgtctaatatatgttaaatattaggcatatgaattttagaagaggaacatacaagcaaagaatgccaaacggaaatggaaataaagcgttctctagaaaagaggatgccagtcacaaatcccccagttgtttgtttatggttgctggaaaataaaaaaacaatatacagagaggaagtagtacaaactggagtcagacctgtacagccacacttaacattctatgaccttggcaagtcacttaatctgagcctcacatttttcatctataaagtgaggataataatgctacttacctcactgggttgtgaagatgaactgagatattatccaggctgaagaacagaaaggaaaacaatgaataaaattgaacaagagtatagaacctgtgtgacaccattaagcattcctacatatttctaatgggagtacaggaaaaaaggaaaagaaatgaaggagcagaaaaatattctaagaaataatggctataaatacccccgatttgatgagagacattaacctatacatcccagaagaaaaagaaattacagacagatacatcataagaaaaatgctaaaacccaaaaacgaaaagaaaatcttaacagcaatacgagaaaaatgagccatcacttaccaaggaacccaaataaaattagtagttgacttcccctcagaaacaatggcagtggcagtgga

SEQ ID NO: 138478 - DNA, 1012 bp, Homo sapiens
ttccagcctctactcattacccaattctaaatccaattctacatttttaggtatttgttaaagcagcatcttacttcccagtaccagtggtactttgttatggcagacctaggaatctaatacagactttggtactgggaagtaggatgctgcttaaagtgaatggcttaaaacaacagaaagttattccctcacagttgtggaggctacaaaatcaaaatgttggcaaggttgggtccttctagtggctctgagggagaatttgttccatgcctctttcttagcttctggtgtttgctggcagttcttagattatctctctaatctctgcctctgccatcacatggcattctggttgttgactgtatctgtctctgtatcttcacatgtccttcttataaggacatcagtcattggactcagagcctaccctgtgacttcaccttaactaattatatctgcaaagaccctatttccaaataaggtcatattcttaggttctgggtagacatgaattttgggaggattctatttaacccagtacatttacttgttgccgcttgttcacctctcattcactttttttgcaaacgatctctttatagtgagatagatcatgacaaacagcacttaaaacatttttaatcagatcaagaaacagaacatgccgatactccaaaaatccccatatgtccctcacaaatcacaaccctcttcccactagatataactactgccctaacttgtgataatttccttatttttctttatatctttaccacccatacatgcagcactagacagtctggtttggttttgcctgtgcttaagcattgtgtcagtgaattatactgtatgtattctattgggtcttccttttctactcaatattgtggtgttttctggcaattatatttgagatattcgtacatattgctatgtgtagccatagttcattttcattgaagtatagtatagtattcctttatatgaacataccatagtttatcca

SEQ ID NO: 138479 - DNA, 1007 bp, Homo sapiens
tagtacagtctgccctctggtgccaaaaattcacatctatccacgtgcaaaatacataacatccccaaaagtcttaacccattccagcaccaagtctgagtcccaaatatcatctaaataccaactcaaaaagtcctaagtctcattatctaaatcatctatatcaggtataggtgaggttctggatatggtccatcctggggcaaaatttctctccatccagagactggtggagctagaaaacaagttatctgcttccaaaataaaatagtgggacaggcataaggtagacattaccattctgaaagggcaaaaatgagggaataaaggggttactggtctaaagcaagtttgtagcctagcatggcaaattccattagttttcaaggcctatgagtaatattctgggctcagtgctttgtccactgggcccatatactcagtctatcagggcagctatagccccatcctctctggcctctatgtctgtggctttgctcttgtaatcatccttcctttgtcctgtctctgtctctttcacaccaggctggcactggtggtttttgctggtataagattctcaaaaacattgtcagtctcatatatgtcaagagatttacaccattagacatgaggtttctctacagattcttcctagataaccccatctgtattcctggcttctgctgaggtggttgattggatcctaacaccctaacacttaatctcttcaatgaaagtttgtccatctatactgttggccctgtttccagagcacgctatctgtataggctgagaattttcccaatcatcaagtgttgtccccttttttcttaacagttccttcttcaattttcctctgtcctcttttattttattataagcatcagggagaaactagcctgcatcttccacactttgcccattcatctccttagtgaaatatcagtttgtcacttttaagttaaactttttgcccaacagtagaactcaattcagccaagttt

SEQ ID NO: 138480 - DNA, 1102 bp, Homo sapiens
attcacataccatctcttcaaccctgtttatatctccagttccttgaccttttaattttctcccaatctgtcagcccctttctatttcttcttgctttcaaatctcacttagactctatcatccattatttaaccacccatcttgacaatgaatcattctctttgcttccttgtctatgtatcacatccacccagcaaaacctcaaactcaaatcaaccagactaattgccttctctatttctacatcatggcttctgggcactgctagaaagaaaacataactttgttgattattgcctctacaactttctcgtctctgttattggttagagcctctcccttgttcaacaatctatctcctagtccctagtcagctcactatttcattccttataaatagtattttaaatcctcattactctttcctttcctactattttgtcatttttaacagtcttccatcctatttcaaaggaaactgccatcagcaagaactttcatccatttcctgcttcatgctctgctaacttctgtatcctcacccttgttttcttctctcttgactcagtgctagggaagtcctttctgcttaaggctaatgtgtataattttgtgctggatcctatcccttttatcttccaaataacttcagtcatccccagtattccttctttctttttagggttttaacatgacttgtatacttgtcagactccatggtctacatacgcttaccatgaactatctaaagaaaatgataaaaatgaaaaatgtctttcaattgattagctacttgaacaaataatacatttagattttcctctttttttattatactttaagttttagggtacatgtgtacaacgtgcaggtttgttacatatgtatacatgtgccatgttggtgtactgcacccattaactcgtcatttaacattaggtatatctcctaatgctatccctccccactccccccaccccacaacaggccccggtgtatgatgttccccttcctgtgtccatgtattctcattgttcaattcccacctatgagtgagaacatgcagtgtttggttttttgtccttgcaatagtttgctgag

SEQ ID NO: 138481 - DNA, 1694 bp, Homo sapiens
actttcacattgttctgcaactatcacagccatccatctccagaaatttttcatcttcccaaactgaaactctgtacttattagatactaactccccgttttctccatccccaccagcctctggcaaccaccatcctactttctgtttctatgaatttgactactctcagtatataagtggaatcatacaatatttgtccttttgtgactggctttagttagcataatatcttcaagattcatctaagttgtagcatgtgtcagaattttctttttaaggtggaataatatcccattgtatgtatatagcacattttgtttatcaattgatggatgcttaagttgtttccatgttttagcttttgtgaataatgctgctacgaacatgggtatacaaatatctgtttgaatacctgctttcaattattgtaggtatatactcagaaatggaattgctggatcacatcttaattctacatgtaattttttgagaaactgccatatcagtttccatagagactgtaccattttacattcccaccagcaatgcacaagataagagttccagtttctccatacccttggcaacacttactattttcttaaaaaataatagccgtcctaatgggtatgaaatgttatcttattgtggttttgatttcaatttccctgatgattagtgctgttgagcatcttttcacatgctttttggccatttgtatatcttctttggagatgtatctgttcagatctcttgtccatttttaaaataagtttcttgtttgttgttgagttgtagaagttctatatatattctgtatattaattccttataagatatatgacttgcaaatattttctcctattccaagaattgccttttcactctgtcctttgatgcacaaagtgtttaatttcgatgaagtccaatttgttgatttttttcttttgttgtctatgcttttggtgtcatatccaagaaatcattgccaaatccattgttatgaaatgaaggcttttccttatgttatcttctgagagtgttatagctttagctctcatgtttaggtctttgaaccttttgagttaattttcgtatatggtattaaggtaaaaattcagctttattattttcatgttgatattcagttttcccagtgccagttgttgaaaaaagactgttctttccacactgaatgatcctggcaccctattcaaaaatcatttgactatatatacctgtctttatgccagtaccacactgttttaattactgtaaccttgtagtaagttttgaaatcaggaagtgtgagaactccaactttgttctttttcaaaattgttttggatatttggggattggttgagattccatatgaattttagaatggatttttctattcctgtaaaaaaatgttattgacgttttggtaggacttacattgaatctgtatatcactttggttagtattgatgtcttaacagtattgtcttctaagtcatgaacatgggatgtctatttatttgtgtcttgtttaattcctttcagcaacattttgtagttttcagtgtataagtcttttacctcacagaaaatgttttcaagtattgtttcaaatcttgtttatcagttgatcctttcatgggttgccttttatgtatgtgcatttatatgtatctaacaactctacctg

SEQ ID NO: 138482 - DNA, 1870 bp, Homo sapiens
tcgatggagttccattttgttgcagtggtgcttcagcttagaaataagatgtaagagaaaatttgctggtgagtttcattgtacctcttacagtgctgaacctccatttttgtgaatgatagtaacctcaagatgttcttactctcctcctgcatgttttgcagatgtatgtctaagaaagagagctttgctcctggtactatgtacaagccctttgggaaggaagcagctgggactatgactttgtcccaattccagacactgcatgagaaggaccaggaaactgcttctctcagggaattagggcttaatgaaacagaaatcttgatctggaagagccatgtttctggtgaaaaggtgagtggggtaatgtttttttttgttggtttttctcctcaaagaaacagagcaaaatatcttcattttagcactgagagccttttcatttctagttctcacaaaactgagcttggtgtctgaatcttctttgatttttagaatgcagacattggtaaaagagaagctgttctttaacttcttagctaacactttctgtaaacattcatttctgggcctaggtcatctttttacttgagataccagatcatcatgttcaggttgtgccctctatgatacatgccatctcattcctctggtttcagaagacaaaactgagggcaactcctgaagcaatacagaaccgtcttcaagatattgaagaaaggatctcggagcgtcagcgcattctttgcctgccacagagatttgcaaagagcaaacagctgacccggcgagaaatggaaatagaaaagtctttatttcagggagctgatcgtcactccttccttaaggctctttattaccaaggtatgtgatccccactgactttgatatattctttcactgagagaaagattaaacagcagggcattaaatatgaagagttagtgaagggaataggggaaagacaaattgtcactacttttgagaaatgtataataccataagagagacaaatatgtgcacagttagttgcatgacaacatggaaactgctattatagagatttgaataaaatgctgaggtagtgcagaacacagagcatctaagtctagttgggggagtcagaagttgacatttatactaactcctgatggatcaatgggcatttgtcaggtaaataaaggggaatggagattaaaggtagtaaatagcaacaggattatgaaagaacctggtgtgtctaaggaacaatgagaagtttaacgtggcaggagtagaagaagtggcagggaatgacaggaggtgacactggaaggaaggggaggcgaagctagattgtgaagggtctttaggctgaactacaaattagcacaaaatatatagataaatagtatgtgtcttaaccagaaggatttagtttgacagataagttttactagacgctgtggaaggtgcatggaagtttaagaaatggttcctcaccttgtgccaagtatagtctggttggagagataaacatgtaacatttagtgacaatactagatacatttgttaagtgttgttggagttcagaggaggcaaaggccactgtgtattggtgtgattgaagaagccctctcagaggaggtaagatttaaatgttcttttaatactacctattctttagaaaagagaggtaatgacatttcagttgcaacagatggtgtgagcactagggagtgtgctaactatggaggagatgtgagacaaggttagaaaggtagctaaaaattttgaactgtatttggtaactagtatagacttatacagagttagttatcagttagtttcaatatggttgaaggtttttgaaccagaagtgacatga

SEQ ID NO: 138483 - DNA, 1054 bp, Homo sapiens
gtttcattgatctctatggctattattgcccatatcatgctgtcttgattacttgattaagttttaaaattagatagtgttaaatcctacagtttgttcttatttttcaagattgtttttttctggatcctttgcctctccatatacatttaaattaagcttgtctatttctataaaaagagcctgctagaattttcatagggattacattgaatctgtagatcaacttgtggagaattgccatcttaacaatagtgagtcttttaatccatgaacatggaatatatctccacttatttagatattctttagtttttcttagcaatgtttttttgttgtcagtgtacaggtcttatacttcatttgttaagtttattcctaagtattataattctttttgatgctattgtgaatgaaattgttttcttattttcatattgtttagaacaattattttttaataatgtcaatatgtgtatgccatatttaatatgctggcaggaaccagtcaatcactgatgcttgtcatgggaccaaaattctgggcattaagtacctaggtgcagtttttgcccttaaagaatgaaagtcctaaaaaatttaaagtatgttaatacagaaatagtcctgggaattcaattagaagacatgacaaaatgctaatagtaaggctttcttaagaatgctgacttgtatttcttgacagtttattgatttttaaaatcattataaatgtacccctttgcatttaatatgtatcaatcagcaaattactagaatgtgcctatgttgacacttctgatctcaagttaatggtttgttgtagtgctcatctgtgcttccatcatattaaaaactgttatttaggtgaaaaaattgcaccccgcagttagttattacaacaaaaaggagatatagtttgccaggttgaacataatgtttttctggccttttatagacagccagcattgaaatcactgtccttaaagcatgatcttgcagaatgtctttataagataaaatgaggtattacactttaaaaactgggtaacat

SEQ ID NO: 138484 - DNA, 1133 bp, Homo sapiens
ctctaacttatgtgatgggttagataagtgatgggactgaactagaaaggtgtcaaagtactagataattgaattaaggagtgtctgaacatgtgtaggtaatgaccagtttttacatttgatatttccctcctttgtttaacattaactatgccttttttcctcccgatcagtctagataattgggaattagtagtaactatagtcaaataccagtttcccctcttgttattctctttgtaaaaatttacaacattattttgaggttgacttgatggcaatgctgcagtcacacatctgtcttctgagttggtagtcattgaaactgcagcaactccagttcttctgggaccacttatgacagaattggcaatgcatctgaaccaattcgttactagttttaagtatatggtgctacttctcttagagaggcaacatggggtgagggataggcattttctgtttcttcatataccaaaccataatcatgtctggtaatatttatccaacaccccaataaaggaacgggcaatggaaaaatcttatacttgtaattatttgaaagttcactgagtattttcatggcattttacttctttcataaagtatcccaaagcttcaagactaaaatatatttcttccacaattattgcagtctcttaaggaatagaactggataattatttaatagctgctcacaacatttaggctgctatttagggcagagttactccttagagtaactataagcaccatagggattttgtaatatttccaaaataaaatcccattagtactaagctgaatggctatgaacaccttatttttttggtgcaaaacattcttagttgtctctcatgatttgactaactcttgcataaaatgtcataggatcattttagagaagtagttttgtgtgatatgtaataatcatactttatatttacccagtgttaatatttattgtctgagggtattgcttttaattagattttttggagtaggatttttttaagaagctttggtgcagacaagaaagattttttaaaaatacatatattatatgtattttttgagacagagcctcactctgtcacccaggctggagtgcagtggcatgatctcggctcact

SEQ ID NO: 138485 - DNA, 1018 bp, Homo sapiens
ggtatgaactcagactattgatttgagatttttcctattttttaacgtacacatttagtgctataaatacccaactcaacacttccttaactgtgacctacatattatgttatattgtgatttcattcagctctatatacttcttaaatttcctttgtgaatccttctttgactaatttattatttagaagtgtgttgtttaatttccaagtgtttggagattttcttgttgttttttctgtattgatcgctactttgatcccattgtggtattagaatatgctttgtacgattttagttcttttaaatttatttaggtttgttttgtgggtgaggatacagtctgtcttgatgaatgttccatggacatttgaaaattgtgttttctgctgcagggtggaatgttctatatatgttaattaaattctgttgcttcactgtaatttcagatactgtgttattggagtctttctgtctagtagttctttcagttgtggagagtggctttttgaaatctccgcctttaattgtggatttctctatttctccctttagctctatcagtttttatttcatgtattttgaggctttcttgtttggtcacctatacatttaggattgctagccttctggatgccttgattcctttatcactctgtaatgtctctctttggttctagtaattttctttgttctgtagtccactttatctgatattaatatagccatttctttttaaaaaaatgaaccttgcatggtacattctttccattcttttactttcaaactatgtattaatatatccttgtatttgaagtgaatttcttatagacggtatattgttggatcattttttattcactcttccactctctgtattttaattggtatgtttagcacatttatatttaaggtaactattcacatgttagagcttaaatctgccattttatttgtttgttgcctctgatttttgttcttctctttcttttttttaccctgctgtcagttgtttgag

SEQ ID NO: 138486 - DNA, 1038 bp, Homo sapiens
ttctaaccatagtgactcctgggcttctttgtgattgggcatggtcttcctctgtggtgcacattttaccctcacaagggctaacataaagaatggggaattatcataagaacctttgtggccaaaaaggaaatggagtcttgtggaattcaagtaaagtcattgccacgacactgttaccttaaggaaattggaacttaagattattcttaaggcagctttagggacctcccaaatcaaacattgcatatacataattcggttattctccctttgtctacttttttctttttttaaatttctcattggtttccttacctctttctctgccttcctgctgtaccttattcttaattgtgacttgctcatggtcccttacttctacttcatctccttcttctgtcagtcctatcaagtctttttgcctatagttggattccttctatacttttggaaatatttcccagtatctgcctagagtcagatttttccgtattgctaaatttttgaaaatgaaattctgactcatattaatcctgtttcactagagctttttgtgccagaccctcaggtaggctgctagtagtacattggatggcttcccatccttcagttggccatcctgcccagtcaactttgaaccaggaacaaaaaggacagagttatctggaacaaagaatgggtatttgagcttgttccctcagcaggaatgttccctcaggccagcctccctcagagtagtcagtgcttgcagcaggcaccatggtttatgcatttatccagtgtggccattaacctgaaactattgctaattgggaaagcaaagctaacataaaacaaacaatcatgtacgttatattttcataacatatttcttgttacagaagcagcatttactagttgtaagaacatttgaaaatgcagagaaccaaaaagaagaaaataaaaccttcccaatgccctagcagccacaattttctgtgccttgttcattaagtgctcagtgtgtagtaagaaccaaaagtgctgcagaaattt

SEQ ID NO: 138487 - DNA, 1025 bp, Homo sapiens
cccatggacatctttgatatgtttttttggaggaggaggaaggatgcacagagaaaggagaggtaaaaatgttgtacatcagctctcagtaaccctagaagacttatataatagtgcaacaagaaaactggctctgcaaaagaatgcaatttgtgacaaatgtgaagatagaggaggtaagaaaggaggagtagagtactgtcccaattgccgaggtactggaatgcaaataagaattcatcagataggacctggaaaggttcagcaaattcagtctgtgtgcgtggagtgccagggccatggggagcagatcagtcctaaagatagatgtgaaagctgcaatggaaggaagatacttcgagagaagaagattctagaatttcatattgacaaaggcatgaaatatggccagaagataacattccatggtgaaggataccaagaaccaggactggagggagaagatattatcattgtgttagatcagaaggacgatgctgtttttactcgacaaggagaagaccttttcatgtgtatggacatacagctggttgaagcattccagaagccaatatctactcttgacaactgaaccatagtcatcacctctcatccaggtcagattgtcaagcatggagatatcaagtgtgtaataaatgaaggaatgccaatttatcctaggccatatgaaaagggtcgcctaatcattgaattcaaggtaaacttgcctgagaatgactttctctctcctgataaactgtctttgctggaaaaactcctacccaagaggaaggaagtggaagaaactgatgagatggatcaagtagaactggtggactttgatccaaatcaggaaagatggcaccattacaatggagaagcatatgaggatgatgaacatcatcccagaggtggtgttcggtgtcagacctcttaatgggccagtgaataacacccactggtggcattttatgtgcagtagtaaatgagtgaaggactgtgatcataacatgctcactacttgc

SEQ ID NO: 138488 - DNA, 1049 bp, Homo sapiens
gggatgtgtttttgttttctgcggttcctttttcctctgccccaaccttagcctgagctgctattttctcaacagcatccaaagggggaagcaatcattggtttgagaagaatctctgagccaatgaaatgtcagctcagctattatttccaggtgcctaaaggagaattatccatagatggagcaaaacctctgttgaccagaatatttgaggatgggcagataattacacagctttccggtgaatcagggttataattttgattcattgttgaagttctctctaaagtatgaaacctctttcttgtcttagaatgtaaggcccagtgaaatggattctgtgtttgatgactaaggaccttgctttctaaatatcagccataatatttagtcttatagaaagttgtatggtgtagcagttagaacaccgaattctaggagtcagaggatgtgggttccactttgagtgcagccgcatattaacaggtgattttgggcagtggtttatcatttctgagcctcaatttcctcacctgtaaaatgaagtggtgttatttttattttattttgttttatttttgagacagagccttgctttgtcgccaggctggagtgcagtggcacaatctcggctcactgtaacctccgcctcctgggttcaagcgattctcctgcctcagcctcccgagtagctgggattacaggtgcctgccaccaggcctggctaattttttgcatttttagtagagacgggttttcaccatgttggccaggatggtctcaatctcttgacctcaggtgatctgcccacctcggcctcccaaagtgctgggattacaggcgtgagccaccacgcccagcctgaagtggtgttatttttataagatggagaaagtatatgtaaaaatgtggactgaactcagaccatctcttggaaattacttacttgaattatctccttatgcaggcttacttcattattctttgcctctttctccaaacagctgagtgaaggaaaaaaggtatatgatcaatcaatagatcgaata

SEQ ID NO: 138489 - DNA, 2129 bp, Homo sapiens
tcgccgctgaccccacctccgccgctttgggtaatttagagccgcgcgccgggcgggaatgtaagatggcggagtagcaacgcaaagcgcttggtattgagtctgtggccgacttcggttccggtctctgcagcagccgtgatcgcttagtggagtgcttagggtagttggccaggatgccgaatatcaaaatcttcagcggcagctcccaccaggacttatctcagaaaattgctgaccgcctgggcctggagctaggcaaggtggtgactaagaaattcagcaaccaggagacctggtaaggaccaagttgggaccctgactagacctcacctgcccaggcggcagagtataggagggatggggtcgccgcttgagctcaaacagactgggggttggggggagagggtgcagctctgtgactagcctaccccacgggctgtttccgttattttacctctcgcgggagggtcacgttcattcttaccgtgcggtggggtggagtcaaaagatggagtgtgaggcgaagcttctgcgtttgagggcaagggctgggggacccaatagatagtggctgcatagagcgacgagaggggaccgacgcttagccagggcggtagggacacgtggcttggctttgctgttgagccacccaggctggactgggttgcttcagctcttagactagcttgcatttagagagcctacctgcgtactgagctctcctggtctttcttttcctagagtccaataagcagctttttgattcgaaatggtgttggtccgttcggcttggtgttgagggaaactgacattatatactgcaggcgccaaaattattacgacttcccttagatcagcaagcgttggcttttctcatcttatgaatcatctacctgagtaattggagccataaatctagttgatttgttaaagtgatgcgttgactctgcatccttgatagccagcatctcagcttgagccatccaaaaaatcttggaaatctcaattctggaatgtttgaccttccccagtgcagctagtggtacagataatgcaaaagcgtatttttcagtaaccgagtccatcctggacttggctccttctttaagctctgtgtagggaatttaggaaacaattttatacctgaatgttaaagataattgaggacaggcaatgtagtggaagactaggattggacagtgcattgcaacttgcgttttttccattgccttgccagtaaaacttgcttcctcgactccgacttacaccctctaccggcaccatgggactgttttagagatgacttggttacctgattatttcagtgccccttccacctaagtgtgggatctttagtttctgataggtgtaatttgtattttattgttaccctatcgattaaatcagagccctgcccacaatcttacagatttgttaaggggaaagttttcacctaataatcagataagaatatttcgaatattttttcctaaatgtttttgcttacttttttgctttctttggactgatttccaagtttaactcgccttatctcttttagacccagctgataaagtaatgtcaccgataatggacagcttcttcccgaattattgtgctactgattgtgatgcaaatgatagtgtaaacattgccatctgtaaccaggcaataccttagttaaaagaggcttacaaactgctgtctttagatttttccaaaccattatggctcatgggccttaataaagaatacaaaacaggactagactttgtgattggcaatatagttaggggacaagaatgtttttcatttagaggttttctttggcccctgtggatatttaatccttttcctatgcgtctaggaaaaatgtgaaggcatgaaagctttattttctccttgtgttaatccttctgccctctgcataatgcagcaccccagaacctgaggctatattgggagaggagagggggaggacaacttagttttctactgattgatttctattaagtccaacatggataattgctgactggttagattttcttgtttctggcttaatcattagcttcttgtttcctagatattctgaaatcttcattgaacataatcacatttttttt

SEQ ID NO: 138490 - DNA, 1121 bp, Homo sapiens
gtgtcacaaagtgaagtttttctatccaagtggcagtttttaagtatttttgaatggatgtaagtagctagcacatgggttgaatatagttttaccctttcctcttttactgtcctcagttactactcggaagacaagacagaaaaggggtcctaaatcatcatattatggatttgactataacttatgagtaacttggtgctacagagctagcaatacagctataaaccttttgggaagggtagaaaatgtggttttctaatgaatagcagctgctattgaaccacatattggtggacaaattcgcttttacactcctcttacaatgctgttggttagatcattttgatccttgggattaaaatattaagcaggaaggaaagtaaagtgtgacatttttatttaaagccaagatcttaacattttaaacaaactgattgccagggattgccagttaacagtgctttgcagctcacatggtgcagactaagagctcttgatttccttagtggattactcgttagtaatgcattcaaaagtgtgacacatgttcttcttgttgtggaaatagaatgaagagctacaaaacacagatgattaggaagagctaattcagaactttctaaaagccattcaaatcttcaatgactgtttctcaacaacctcttttatttcagtaacttcaacagaactgataagctgagaacttgagttatgttatccagccagatatatgggttggtgagtcccatgtaattgctagttaccatctgtaatgctagagacagcctaagaaacatccccccaactagtagttgtcatatttaatttgtcggtcattattttaatatctttctgtgggacttagaaaatagtcacatttgaaataggcaggattttctttccaaaggtgggtataggaaaactgcctttagtagacaacttattgctacctgatttttttttcattatcattgtcttatagtgatggagtattttacaattgagtgtctatcacttctgtgttggcagggtttggggagtaggtagagatccctgtgtgatattcatttgtacagtagttctctcctcaaaaggtgtagagagttactttttctagc

SEQ ID NO: 138491 - DNA, 1217 bp, Homo sapiens
tgtgaccatagtcacaagagaaacaggacaaaatgctatagtttgttcagttctacattaaaaaacaggacaaatccccaagcacgggctgcttcacacatgacggagatggcacagcggagcatggacagacgtgccactggggcagctcactgtcatttacactgaatagatttttgtttgaattatgtggtactttgtcaaaagacaaatttgtcttctatcctaccttctagtctggtttattttctcttgtaataagaaaaataagaattctctttgattggaagatactttggaccgaatggtgagatgcctagcttgtctgggtaattgatataactttctgtctagcaattgtgaaaaaaactcccaagcttggtgtccaggtacagttgacagtgacagttgatggatgttttgccaacagcactgagggaagtgatgaggacacaggcattggaacaggctggatgctgctcctctcctgccagtcaggttctcttctcaccacatccccattcacgggtcttccatgatgggaattgggacagtctgtgtactcctggcattagttaattctttcctcattccttctgctgccaatccattaaataaacttgcgtgtcttagcgttatactgcttcccagtactggtgagggtgtctgtcctctacccagaatgaatactcatctaagtttgatcagtacgttcataagcttctgttgagctatggaggcactggtttataaaacccagtttgtgatatttgcctttgagaagtcaatgatagttgctttcattcttccagccctgggaactattggtttcaaggagtattctcctccccaaaacaagcccattctttagtccatttctttttttcttttttttttgttttgagacagagtctcgctctgtcacccaggctggagtgcagtggcgcgatctcagctcactgcaagctccagctcctgggttcacgccattttcctgcctcagcctcccgagtagctgggactacaggcgcccgccaccatgcccagctaattttttgtatttttagtaaagatggggtttcactgtgttagccaggatggtctctatctcctgaccttgtgatccgcccacctcagcctcccaaagtgctgggattacaggcgtgagccaccgcccccggcctctttagtccatttcttttgtcttagaagccaca

SEQ ID NO: 138492 - DNA, 2108 bp, Homo sapiens
ttttgatgaaccaaagtcagcgttttttctcagttagcattttgactctttcctaagtggctgttttgttttgttttgttgttttgagacagagtctcgctctgtcacccaggctggagtgcagtggcacgatcttggctcaccgcaacctccacctcccaggttcaagcaattctcatgcctcagcctcccgagtagctgggattacaggcgtgtgccacaccatgcttggttaatttttgtatttttagtagagacggggtttcatcatgttggccagcctggtctccaactcctggcctcaagtgatctgcccaccttggcctcccaaagtgcagggattaacaggtgtgagccaccgtgcccagccgtaagtggctatcttaaaaatgttatgaagaatagctgagtgcagcctcatgacagggaaacagcacagtgttgcagttttaagaggaagggcacttgcctggctgctcatcagtgtctgcaaattggccagtcatctctgaccatatgatagtaacctgatttcctttcttgcctttctaggtgattgacatctctatgatccttgcagaagccatcaggagaactcacaatggagaatccgtttcttacctattcagccatgtccctttataatagagtaacttctgaggctttttgagaataaaatccaccccacccttgtttccccttggtatttgatgacaaattcagcagaagacccggcttgctccagtgtagctttctacatcccacatcaggtatattagagcttatccgaactggggaaagacggattgagattaactgctgggacctcctacctgcattatctcattctggcttccttgataattctgtgggccttgcagctttaactatagctcagctgctgcaagatttcagacttttgaggatgttgtgtgagggtgtttgactgtgactggggaagctcagactactttgtatgtgaatgcttcagggttttctttgttgagaacaactagcaacaaaggcaacccatgtgtgaccagttctccccaaggtctatgctaaattatagcaagagccctgggcaaccccaaacctagtcctggtagctgagcaccctgtaaggcaggagcaggcagctcagcttgagcagacattgggtggggggtggggggtggttgaggggggaggcagcacagtgcagcaaatgtttcttgggaggaagaagcctgatccatcaccatctgcttgactatgtagcttggattctcctttgtacctatccctttcgatttggctttaccttcatctatcttgatcctttcctggccaaatatcctcttgggcccaaatgaacattgtaccatagtcttctggaaagcaaacatgcttcctgctatgtaattgctaacattcatattagatgatgtgctgtagcttgatcttccttagcctactgccactgaggcagtaggttttaggtggtatcgtagtgccttttgattaatttaagtatttaattttcatcttccttctttggatctatttggcctctcaaatgaactgagattcctgttaaaaaagattgatgttattgtctcttgtagaggaaactaataaagtgtgtgtacctgtgtgatttggggtctgtatcatacataatctgtactgatctctctgctaaaggtttggtttagatagatgtcttgctgtccattgatagctcttatttgtttccaaactacgttagcttcattgttaaaccaagagaagacattggcagcagttttattcaactgtaagactaagatgtctggagtttactgagaatgtgataagagtgtaattctgtgcagtatacctaaattatagcatgtataatgtctggtggatctctggttcttactcctgaagatccaaattaggtattttcttatgggaggagaatttctgtgatttattcattttgaactaattttgccaaatgtgataatttccttccattcatcagtaattgacatacgtttggcatttactttctttgttttttttgattttttggtttttttttgagatggagtttcgctcttgttgcccaggctggagtg

SEQ ID NO: 138493 - DNA, 1154 bp, Homo sapiens
agcccccagtgaagtcagtattgccagattctatgacagatttctctaataacaaatgtgactatctacagcacagaatacccccatcaatctaatattccactagctcaaggtttgtaactaaaccaatagctcctcttcttctcttcctttgtcttttccccagcctgtctcacgtgtgttgccatcaagtaaatggctcacaggctgtgagtaggtggggacactgctctccactccaagaaatagaggagaaacagggaaacaaagtcaaaaaggtggtgtgggaattaccagcaggcatgatttgtatccaaagctgactcataagttcttggacaagctcaagactaccatctcagggctcagaagagcttggcacccttagtcccccagatcacagaatccagtgaaaattaggggacctgagatggagatgcagaattttcctttgtgggactcctcccaggcttccagcccctttcttctccctatcccctctgcctttttggttcataggctgtagcagtaaaaaagaaaaagaaacaaagaaaacaaaacaaagaaataataaataataagaaaaagaactgctcagttttaaggcaacataatctgcctgcccaggtgcacagagaaatgaatgatggcagcacctcattcggccttgtaccaaagcgaccaagcacttcaattaatcaatccatcatttattgaccaagggcctgctatgtattgagtaccgactgaggatttattgaatgcctatcctgctaatcactgtagaggacacaggagacgtcagagtctaggaccagggctctgaggagctgagggtatagcaggaaggagtggagcagctgcacccaaggccagtggggaacaaagcactggcgtgacctcaggcctttgcaaacctggtccagcctcctgctccttaagggaaaggccttaagcttactgctcctggggtctgcaggtctggagcttggatggtgccaaagcaaactaggaagggagagtctctttatggcggccgcttccagcagggcctgaaagaatgggttggctttggcacgatggaaagcagcagggctttcagattgggagaggggaggagaacctcgctagtccagcagggctcttgagtagga

SEQ ID NO: 138494 - DNA, 1135 bp, Homo sapiens
aatgttcaaaaccagagtgctagcaaaagtatggcatgtccttaattttaattgcctattcattttgatcactggattttccaactgcctacccctatggtgacatctgtataaatcagatgtgattattataattctctttgagagtgatgtcttcacatttccatgcccacagcctgccaaaaatatagctgatgaaaaccagggggaatagaggaatttcctgaaaggaataaacaagcacattttctttttctcattacatttccacaaattcattactacaaataattcttaaatgcagttacatttacatatcagggatcttgttataaaatattacccagcactggagtaagccttttatcatgggaaagtaacacacacacacacacacacacacacacacacactctctctctctctctctctctctctctctctcagcaagactgggacagagaaagctaatgattgccagacaatgagaagggagatatgagacttggaggatgttcaaaggaacgccacaatgagagttaaaaggttggaaaatatagtgctctagaatcttatcacagttgattacttgtccttcttcctattcagtcactctgtcatccacccacccattctcactcagtcaccaccttctcccagtcatttatctactcacccacttgacacccactactgtctgccaagacagataccctctcaactaatgtactaatgggcatatgactttctcaaccagtgtaagtataaatataagggaaagaaagtgaagtatatttatgagagactaggttgagagtatatttgcatacacatgtatgcatcactgtatatgagtgtgtatattcctgcataaatatgtggctgagaatgactctgtgtctgtgtatgaaagtatatctataaaatgtgtatcattgtatgtgaagatgtgagagtgtgtaaatcttctgataatttgggtaggagggggccatgagtgtaaggtaagctttctgttgtcaccctagggagtgttagagcctcagcagaacccatcctgaggctaaggatcaatctaataaatgagccagatcaaacatatgcatgataagaaaaatcttcaatggaggccagg

SEQ ID NO: 138495 - DNA, 1073 bp, Homo sapiens
tcccagcttctcaggaggctgatgcaggagaatcacttgaacccagaaggcagaggttgcagtgagccgagattgcgccactgcagtccagcctgggcaacaagagcaaaaatctgtctatatatatatatactcattttgaaatttaaaaaaataagttgaagaccgtatgttaagaaaaccatataatcactttaatgtctacataagtgtttatgcaggcagactagacagctggggcagtcatcacaaaaatttaggcttatatctttgctaaaatatttttattgatgtagcaaaagtggttttagggagcttgagatcccagcattttgcttcaggttgcatggttcatgcaatctaaagattctctattaagaaaatctcttcaagagatgttgggttacgcaggaagagtaacaattgtaaaattccagaagagaaagtatgctttccttactttcttttccacctttccttacagccccaaacccaccatctatccgagaagaactctgtactgcctcccatgacaccattacagtccactggatctcggatgatgagttcagcatcagctcctatgagcttcagtacaccatattcactggccaggctaacttcatcagtaagtcatggtgtagttggggcctgtggccagagataaggaaatgtaaggaagcagtaagctgctcaagattggccggggcgccacgaggcaagtgtttgtaagacatgttaggttgtttagtatagtgtttcatagacagtgtaagctccccagggcattgcaaagaccttactgatgggtaacaagcaagttgtatatttccttgctgggcagttgctggggccattcccattcatttatgtaacccttagcctttcctcaattaatccatgtcactccactttcccaaggagagtacagcttggtacttgttccttgccaccatcattgctggttctgtgtgtatgaacatctctctccttgactcttcttctacttcattatcgtggtaaaatacattatgttcaaagacttttcctttaccaaacctacctctatcagt

SEQ ID NO: 138496 - DNA, 1780 bp, Homo sapiens
gttaggaaaccatgaatgtgtatatgtaatatataaagtgaacatatatgtactttatatatattcacttgtgtatgtatgtttatgcatattcactttatatattacatatacacaaaaaacttttttttccaaacaccacctcgaactagaacaaaaaactttttaatttgctaatttgagtgagaaatatactggaagggaaaataagttacaccatccatttttgtcccctaaaggaaacatcaaaatcaatcaacatttatttcctccctctatccatcattgccttcctccctcctgtcacgcacacatacacatgcaaccatgacacagataatgggaagagctttattggattagcagagatttacagacaagattgcacaagagatgctgttgctggatagaaaattgatcaggtagaagtgatgctacctacttgaggatggccatctgaattgttaaaaattctgtcatagactattaaaaaaaaagttttactactcccaagtacacacagttatgagaattaggcttttaaaaagttgcacagtgaaggctctttaggaacctactttacttaatcagtaaaaattgagtattattgatgcaccaactattcccatataaatgtacttgctttttcagataaaacacttctgaagtgctcaagaatgtctgaaaacagtttgttttcttaaataggataaataatcattccttttgcaatcttgtttacagtattcattctcttagccaatccctccacgcaaatggagacaaacttcatcccagtcctaaccagtatagttgaagggaatggagccttgtagtctatgatttttttttttaaatttccatcgaagggattggggatgtcagagagccagagctttcccctttccaggagctaagttggcttcggaagtcttctgggatttgtgaaaatattactgttgtaaaattacaaagtggtagccataacaactccctcagattggagacttgaaatgtcaaaactcccctcttcctttcccctagtttggtggatgctcatttattaattcattcaataaactattagatgccaggtaccaaactactgccatgggagtgcacatattaacaaaatgctctacctgctgccaaatggcttactattctgtggaagaaacaaagtatataatcctccccaataacagttatgtattgtttgttcacttaatgtggaaggcaagactgatgcagacacacaaggaaggctcaaaaatataaatctagcagcaatgtcatcttttttgattttaaataccatatgtgcttactgctaatcaggaaatgaacaacctcagtaaaattcatcagtgctggtaaatagtttgctgtagtggaaagctcataacctttggattcaaatgatcctagtttctgtaccatttattagcgttgtgacctaggacaagtacctcacttctctgagcctgtttcctcctctgtaaaataatgtctacttcacaaggctgtttcaaaggttaaaaaagatagcatatgtaaactgtcttagctcagcgcttgacatttcctaagtgtgccataaatattaatctctttccttactcccagctccaatacagcgtaacagtgctttaaaatgtatgtccttcatttctccttcatttctcagtcacctttgtctcttccctagggcatatccccaaattcttaaacaaaaaaaaatgatttttttccccttcatcaaacttttcactggctccct

SEQ ID NO: 138497 - DNA, 1038 bp, Homo sapiens
agaggagcctttttcttgcacttgttgttccctctgcttgaagtgtccttctccacatccccacttcaattttcttttcctgactaacatcttctgttattcaagggccatctcctttgacaagccttcaccaatttcttcttgtgcttccacaaaccctggatagtgcttactctgctgtatcgtcatttcatgtcaactcatctttgttttccactagactgggtgggaagcctgagacataagagaatgcaagaagtatttctttagaaaacgaataaatggaatgaatatatgtttacaaagccactttcatttatgtaaacatgcaccgcttctgtatccacccatccatttattcagtaaatatttattgagcacctattatgtgccaggccctgttctaggtgattaggatgcaggaatgaacataccagataaagtccctgtcctcacagagctcatattttagtgcagaaagacactaaacacagtatgtactgtaatgtaacatgatgataaatgctctatggagaaaataaaagtagggcaaggagttttagggtgacaggtgcatagggcaactggggaagggatcgctgagaaggtgatacttgaacaaatatttgagggaagagagggagcaaaaccctacagacaactggagaagagcataccaaatggaaggaacagcaaatgcaaaggccctgaagtgggagcatttttagcatgtttgaggaataaaaaggaggtcagagtggctgcagaaggctgagcaaagagtggtgggagataaggtcatagaggcaatggagatctagaccatatgccatcaacttatccaaccacccattgaacacataccctcactgaataatgtggtaagaaatttcaatattgctggggtgagtggtggcagttccagggagctatatgtaggacaaaacagctttccctacagatagatgctttccttagttctctccttacccagagcccttcccaccaggttctcagatgcaggtcctacaggagacc

SEQ ID NO: 138498 - DNA, 1072 bp, Homo sapiens
actctgatgatatgaatgtttaatgtatcattaaagtcccgtgtgtccctgaagctctgtttacctttttcaatttattttctctctattgttcaatcgcataatttctattgttctgtcactagtttcactgattcttttttcagtctcctttttgctattcagcccattcagtgagtatttcattttggtgattgtgttttacagttctaaagcttccatttgcttctcctttatgtcttttatttctttgctgagactttctttttataaaaaaatttgttttcagcatgttcgtaattgcttgttgaaacatttttaagatgactgatttaaaatccttgtgggattaattccaatctgtgtcatatcaatgttggtgtctgttgaatgtcttttctcattcaagttgagatgtacctggttctttttatcatgagtgattttctactgtatcttgggcattttatgagactctggattttattttaatcttctgtttagtaggcctactctgacaccattctggtgggggaatgggagcacagttttattattcagggaaaggtgggagtcaaggttcctcactcaccatccattgatacccagggtaggggtagggatgccattattactaggaaggagtggaatttcaggatcctcactaggcctccagtgacaccactgacacctccctaggcctccattgacaggcctctacaaccatcatatgccgggggactcattactgcctggcaaggatgaaagtcccagatctccattcggtcatttctgaaaccacctcagggagaaggggatgtgtgactatttaaaaccagttgaaggtagaaatctaggctccctacttgatttttgctgagggcagtggagggaggagtatagttttttctgctgtggtgtttgccttggatagggaagttattacctaaaagttttctgtctctctaggctaccccttttctgttcctttggctagagatagccagttttttgaggcacttttttttttttttttttttgcacccatggcattgctgggttgctggcttct

SEQ ID NO: 138499 - DNA, 1022 bp, Homo sapiens
ttctgatgcctcatctagggatctttcccctattttacaatgtccttcttgctgttcagatcttcatagtgtatattcagaatagtcatgagccttccaaatctctttgaccattttgatgattgcctttggtagtatttgttctttatctaagtaagactggcttccctgagaatttcagggccatgcaagtgagctatgcaaggcaaggtttgggtctggcagatgatgacatggaatggactaagggttggtattcatacatggcagtcacctaccaaaattgcatgtatacctagaagtcttcaagcagaaaacataagggacacatttagttcatttgcttgttttatgtttggccatagaacctgttttggttgactcagcactatgtttgcaagttccaaccatatacccaaatcttgtttgatctgtgggtgtatctgtcacctcacttttcagagtatatatatttacctgtcttgtgtgagtcccaaatatgctgatgtttcaggaaagggcaatttgaggaacccatattaattcccttccattttgccaacaggtggaacgggcccttcatcagatgctggttggggatgtatgctacgctgtggacagatgatgctggctcaagcccttatctgtagacacttgggaaggggtgagttaaatttgttttataaactttctcagagacctctgcagtatcacttgctgctgttgatttagcttgatgctgagccttgggaacactcagtaacaaacttgagggtcttaaaatgctctctgcaagctcaagtggtggggctgacaagtcaacaaagcccctcataagaaggaaacagctaatgtttccttgtgagtcaccaagccagggagttattttcctgggacagaactgaacatcgagggaggtatgtcatttatcctttccatctttgctattgtttgagtaagtccttagaaatgcaagataacaaagggagcaggaagaagggtgtggtgattaagtctgtttc

SEQ ID NO: 138500 - DNA, 1638 bp, Homo sapiens
ccactgaaaccatgccaatatgtagcaatagtctcttggggcagatttaatttcactaactgacatttctttggagccagtgcttcaggaacatgtcacccctaaagtgagctggacccatgcgtctggcacaggcactatgcctcatgatggagaataggcagtgagtgctggccttcatcagatactccccgcaaagtccttccttcctggctaaacagtatctagaattgaagatggctgagtcttcagatggttcaagtagaggatgcatgtattttctaggcccctgttttcacctggaaaccagcagaccactgtctcagggtttggggtcaaagattgccaattagaaatgttgtgactctgaagtatttaaaactgttttgtcatctccccaggaaattctaaaggagaatttaaggatgtttgaattagttcagaaacatccatcacactggcctccctttgtacctccagccaagccagaagtgacaaccactggggcaggtaagctgttgttcaatggctctcagctagcagacccacatatagcagttgttttatgagaaagaagaattgtggcccatgctttctgtggacagtaaaatttctactcagctggagtgataaaaaaatggcacttctggttattttaatcttctgatgagctgatatttaccaatttcaaagaatgataatagaagaaaatgagctcattgcaaaagttctatgcaaaatcaagatgactaggattgctttttcatggtctggttcagaatagcaaattgaggccatcgataattcaaaggtatcttgaagggctttcagagccttggccacatcaccgtcgttaggtttatgtaacaagtctggctattttgagtctttatagataatttctaatacttggcagtagttctaattgtaagtctcctccacacaagtctttctttagtacagcaattaaaaatgcttagtcttaactactgagtaaagtatttactgaccacttcaacccaagtgtcaagcttttcttctttctcatttccgtattctgatagaattcattgactctactgagcaactggaggagtttgatctggaggaagattttgagattctgagtgtgtagaatcctgggaactcaacttgaaggtctgtcttccatctggcaccataaaaacatgaacttattgcataaaacttttctagtcagcaagtgcctgatatgccaatagcatacaaactcaatagcaatcatgactgagccaatcactgtttctcagaaaaacaaaacaaaacaaaacaaatgacagtaacccttccccggaaagaaatagaacaatcatggagcctaggagcagagagatgaggaggagttcattgcttcccagcttgtgttatatggctacagcaagtcttcagctgctgcaatgaggaaatgggcatctggaagacaaacagcaactctcagcttgcttcaagaaccagcagataagagatggttaagctgttcttcaccctttcagatgtgacctcttttggactaagcagcaatctgttctcttgctcaaataataaagtgactgaatcagggaggaaaaggttcttgttaaattatttgattgtgtagtt

SEQ ID NO: 138501 - DNA, 1016 bp, Homo sapiens
ggaagggtggaagagcaaacacagagggtattgcagtagtccaggcaagagatggtggtggtgacttagactatagtgacagcaatggaaatggaaagaagtggatagattcaaaatgtaaaaatgttcaaccttgttattagggaacatttcaaacatttacaaaagcagagagaatgtcataatgattcctcgtgtacccatcacacagttttaataattagcaatttatggccaatctgaagcaaatcatatcatttcatcacaaatacctctgaatatttaaaaggtaagggctttttaagacatagtgacaatatcatcatcagtaatttgtgatcagtaattaatatcagttaacaaggcagaattcaaatttttgattgtcttataggtatatatatatttttacagttgccttgtttcaatgagaggccaaacaagaccaatacattacatttgtttaatgtgtcttttaaattacaagatatgttttgaaacagctgacaagattttcatggattgggaatagggatcaggtgggaaatggatgaatcaaagatgactaggcctgcctgtgcttgctgggccagtggggatagatgactccattccttccctacagtactttgagatagtttgggtctctctgggtggccagaaagcagagccagtggagccagtggcacaggttccttctatgatgattcttattactccatagaaataaagggggcatggaaaatcatctgttcaatgcacttgattttaatcacctctgtatctaatgaaccagaaaggaagagaaccctagtgttggagacagaacacccaaactttagacccagcccctgctctgggactttggcaagtcactgaacctctctttatatctgtaatttgacaatggtcatatttatactttttattaatagaaaatatttctacatatttatagggtacatgtgatattttgttacatgcacagactgtgtaatggtgaagttagggtattt

SEQ ID NO: 138502 - DNA, 1033 bp, Homo sapiens
taacttcttacaagtaaatagcttggttcatagctaactccatctatttccatggttctaataatttgctttagtaatgcattttatcatttatatagaggaagtaaaacaatttggaggaataaaggaaatggtagttttattagtcttgttactaaaaggtaaaactatactgttaacctgtcagcaaaatgccatctgcatttttaaatgtgagcttctcagcatgtcatcacagaaatcattttagtgatcacccaatagatgcttgtggtccataccagaagtattgctttggttctgtcatatgatcagcaaatctcaccaggcacaattaaaaaaattatcttctataggaactgggcaatcaaatttatctccaacatcacagcatgatcaaattgactagtgatctcttcataccaacctcatgtctatacctcatttgtcttgtgttcactgctctagtagtctcagttttgcatccaatgttcaccttttcattttgtatctgtgctgtgtcatttcattttactaattttggaaatgctcgttttcatccttgattaatgtcactgagcctagtcactggtgataggttatgaacagattttgagacttgatattcaaattttatatttctggtcactgaaaacttggaagtaaatgtccttttattctttgaaagtctctgacattatataagtgcatttcaaaatgaaaaatgttatttatattacagtaaaatctaaagtgattggaattcattttaataagatgttctaaacacatgaattaaatgggatcacatactgtgttcagaggatcattttcaaaaccaaattttatctgatctgacataatctgatggaaagtattgtttaaggttttatgtttgtatactactgaagaaaaccagtgaaaatctcctcagccatgttaactctcttgcatgtaatgtaaagaactgaagcaagtatcttgcttggttttgcatgcagtaattcaaataaaccaaactattatctttttt

SEQ ID NO: 138503 - DNA, 1040 bp, Homo sapiens
ctggcaactttggggaggaaggcaatccccagggcaaagaagatcaggaaggaagcggaggtgactacatgcctatgaacaattggggctcaggaaatggccggggctcaggaggtggccagggctcaaatggccaaggctccagtagccatagctcgggaggaaaccagtgttcaggcgagggacagggatcccgaggtggtcagggctcaaatggccagggctcaggaggaaaccagtgctctagagatggccagggcaccgcaggtgggcacggttcaggtggtggccagagacctggaggtgggcatggctcaggtggtggccagggacctggagatggccatggctcaggtggtggcaagaactctggggggggcaaaggctcaggaagtgggaaaggatccgatggtgatggtgaacgtggaaaatctctgaagaaaagatcctattttggcaaattaactcaaagcaagcaacagcaaatgccaccacctccaccacctcctcctccacccccaccagctggaggaactggtggaaaagggaagtctgggggaagattcagactttatttttgtgttgacagaggagccacgaaagaatgcaaagaagccaaagaagtgaaagatgcagagatcccagaaggtgcagctcgaggtccccacagagccagagcttttgatgaagatgaggatgacccatacgtgccaatgaggccaggggtggccacccctcttgtaagctccagtgattatatgccaatggctcctcaaaatgtctctgcttcaaaaaagcgccactctcgatccccttttgaagattcaagagggtacatgatgatgtttcccagagtgagcccaccacctgctccgagtcctccaaaagcacctgatactaataaagaggatgactcaaaggacaatgacagtgagagtgactacatgtttatggctcctggagccggtgcaattccaaaaaaccccagaaatcctcagggtggctcttcctccaaaagttggagctcctacttctctcta

SEQ ID NO: 138504 - DNA, 1050 bp, Homo sapiens
actactttcgtgtgtgtgtgtgtgtgtgtgtgtgtgtgtttcccattcatcaactttggagtttggctctaacacctcacttgaaaacagaaaacaatttcctagcttattcagtggcagtttttgccgctctctctccttttctaaggttcaggtggtgtcattttcattgccgtgaatgtttgtaaaatattgaaagtctaaagtgcttagttgccaagaaaagattataaatttatatgtggagactgaaaaagactcagattcattgagaagattatgtcctaaagacatgcacttaaaattagtgaaaaattttaaaattgcaaacttcagagtccggcctttaaaatgtctgaatttatatgaaagaatgtggactgtatatagagctacatagtggttgaaataaatcatcagcttctgtcagtggttttgtgtttgtgaggggttgaaaaggttggtaatctatacttctggaatttttcttgtaggattttaaaacttatgtagatcaggcatgtagagctgctgaggagtttgtcaatatttactatgagacaatggataaaagaagacgggtgagtgttatagactctactactctttatagactactactctttattaaataccaggttgtgtctggagccagcgtttcatctgacttgcataagtggtaactgtggatttactctttaaaagcaaattgctcagggaaggattggtatggcattagtgggaacatgggctctggaatcatatcccaggtttacttttacctagttctttgacctggagcaagttgccattttcccttaacctcattttattttcaggttggtaagtatgaattaattaaaataccgcacttaacattaggcccagcatattttcttaaatatgtttccttttcttagttccatcaattaaccaatatggttaaggtattattagtgctaatgaaggggtgggtcattacggggaatatttcctgattcgccccttttatttcatatatttatagataatttctgatcatggctcaaa

SEQ ID NO: 138505 - DNA, 2377 bp, Homo sapiens
acaatgtattttaagcctgaaaatctgcttatttagagatagaaaatgatgtgttctcttttttttttaatgtggatgaagagcaagcaactcagtcccaaactacagttcttgttgtgaccagtggaactgtgaagtttgatggaaacaaacaacatttcttcaaccagaacttcctgctgactgctcagtccactcccaacaatactgtgtggaagattgcaagtgattgcttccgttttcaagattggtctagtagttaaaggggcaaaagtccattctcatttggtccattagttccagcaattgaaatttatgtgaattattttgattgtagaagcactataatatgtgctgaaactaaatttctttaatattttctattcctgtcagcaccttttctagcagctgccagtttggagcattgccctctaagagctttaaaactatttttttacatgccttatatacattccactaatgacattcttataataatattaaacacatgatcttggtactaacatactcactgtgaacccagcctattgcaaaaataaaatctttttataatattatctatgggatgtcagcacaatataacactctgggaagaagtggagttttttggttattaggttaattttctagtaaaacacgttgcctgttttcagttaacactggtaatgccattttaatatatggctttttcaaatcagttcagtgaaaatagtacagatttaggtttacataactactctgacatactggaattgcatatagagatgttcagtggtcgtttttcattttaagtaatttttgttttggcatttttttgtgtgaagtaaattaatcaactagagaggtgcaaaacgttctcagttgatatctgagtattgggtgcatttggtggcttaaaagcaaagcttcctaaaaagatttttcttggcagctccaggtctatacatttaggtaatgaatggtagtagaactaatagctttaacaggagaatagggaatgagaaatagaaatccaaggctgaagccaaaagtaaggagggtggccaaatggtaaactattggtacttgttttctacctcctaaaaatgtagcttatttttaggatttaaatcactaagtaaataagtatccttgccaagtgatcatgagtgtcatttttgttctaagactaatatttttagatctttttacttcacctcatacttatcaccaatgtatatctccatttattcaataacttactggggtaaaataacagcaataaacctaaccttttaacagggtctaacatgagagttggagtcaaagccattgttatcttttggtgacacccttaaattttaagtcttccagtcttccatgtgaactttaggcccaaagtttcttatgtatcacacatcccccaaataagtgattttttcccagtgctttgtactgtcaactgcattatctttaattatttaaaggtagaattatttaattttgtgatttgttcttccatatgacattgagcaaatagatctgtttcaaaatatgttcccgctatgtggataactcttctttttaaaaagaaaatagagaatagcaaatcttcatgataatcctcaaaagaacaaaatgcttaactttatctcttaatttctaaaggtaaataacctaggttcagcttttgcttaaacattaaatatcttttccattttttaatgtttgtaagctagatatgccagctttgtttctacattgcaaccaaaaactgtttcttttcacttaattataaaaccagtaattcatttactcttgcccaaaactatacactgtatttctgttatagtaacaaaatagagttatgtagaattgtatggaactcaaatttaaaccatgctttcttgtagtactgattgaaacttacacgttttattctactcatagtgagcttattcttattttggattgattttccaaaaccacagcttcagcagcaacaatcagaatgtccaaatgctgtcctttcccttacagagaagaacaatggtaactaaaagctgcatataactagcaataactacattgaacggtgtgcattgttcatgattgttgtgttttaagacttgtatataaactgctttttccaaactctgtataacttttaaatggctggaactactcgtataaggactagactgtatttttgacatgctcctatttttgtaacttgaaaaaataaaattttgccttgtgacagattttctcaagattgttttaaggtcttttgatttttgttcttaggtttcagaatggttacttgtttctttacaatataaggttttttaaatttagaaaaaaattacagtagtgt

SEQ ID NO: 138506 - DNA, 1138 bp, Homo sapiens
cataattaacacttaaggttgggtgctgctaattctttgcaaaaatccaaatattgttaagggaccagggagatgccactaccccttgattttccatctaaaaatatacatgtttatgtaaacaaatctttccatatccatagtgacttttcaagtatttaagcctaaagattttgatctcacatttttatacctgtttaaattgctcacagttattacatacacatcagccatcaactaaagttgtactttaaaaatttactacaatatgtacatttctaagtcaaacacttgtgacttttgctttaattccatgaatgttcctgcctccttgatatttgtatttattctttttttctctagagtagaggtataattgtgtgatatttcagaaatacagataaatgattcaaaaagtcacagttaaggagaatcatgtttctttgatcatgaataactgattagtaagtcttgcctatattttcctgatagcatatgacaaatgtttctaaggtaacaagatgagaacagataaagattgtgtggtgttttggatttggagagaaatattttaatttttaaatgcagttacaaattataatgtattcatatttgtactttctgttaaaatgcatgattgcagaattgtttagattttgtgtttattcttgatgaaaagctttgtttgttcttgtttttaagtttgcactcaaatcttaagaaataaatccacccatgttatcaagccaatttgtacttcattatgcattgagataaaatctccaagtttgaagattattaaccaaacttttaaacacatatttttaaagtactcatctccaggtttatggaattgcattaagcagttaaaccggcttgtatagtcccatccattagttcagagtatttgaatcccaaactgttactttggtccagtcaatagagtaaaacccctttgtaacactgatactttgggacaaaacatggattatcagtgggcgctaccaaattataactgctacttttaggctaattaatattttagagagaaattaatttgagttatatgagggtgtgtataaaatggcattaagagctctatttcctggctttgccactgtagttgtgtaaccttcag

SEQ ID NO: 138507 - DNA, 2502 bp, Homo sapiens
tctccggggtggtggtatttgagcagacatatggataaagtatggaagtgacacacaactttattgagaaagaccatctcaggcaaatataaagtctctgaagaggaagatgtgtgtgtatgtgtgtgtgtgtgagtataaataatgtgtatatgtatgtatattttaataaccacatagactaaaactatccaactgaaacaacttaggtatactttgagaaatataaaatgaaattgtaaggtagaggtagcattaataaactatctagtataccattaaataagtttgtggtgattggtgattcaacacccgaatcatctaggtaaatcctgaaaaactcatattttattaattgcttctccttccccttctttccccgtccccactcctttctcgtctctttccccccctctccttttctcccatctttcacttctaatttcagtgaaattggagcgatttgaaattccaatcaaggttcgattaagcccagagccatggacccctgaaactggtttggtaactgatgctttcaaactgaaaaggaaggagctgaggaaccattacctcaaagacattgaacgaatgtatgggggcaaataaaatgttgttgtcttattgacagttgtgcaggaggtagcctggtggttttcaacctctagaattttaagcctttgttgaactgttagaatgtaaggtatatcattctaaagatagagtaaaaagaaaacaaaaccaaaagttattaaaattgttgtccggtttactttaacttagttttgcatagttctagtgcagctgaaattgaaaagttatttccctttagctgtgttattatagagcagaaattctgtttttaaaaattagcctaagatatacttgtttttgtaaagaaaaatatttaatgttgaacaaaataaattggagttggagtagaatgtagtttgaggaaatttgcagcttccaatgcctcttgtcttcctatttcagaagtttaaatattaagcatgacagaaaatatgtattaacactactcaaagcaaaagtgctgcagggctttaaaattctcttccaaccatttatcttgaaggaaaaattcaatagtaatataatacacaaaatcaaataataccttagaaggtattaagattataattgttgcataggttagatatagagtcattgtaatgttgtgaataattacagtgcctaaaataagaatagaacaacatatacaacaccaaaaaatatctagtaatatatttaaagggaaattgagctgctttttttgaaactttgagatctaaaaataactgtaattatttgaatgactaagaggaaagtacattttttgaaatgctgaaaattgcctttctgtgtttattcaaactgaaaagctgagaccaagagcaaggaaggtaaaaagttaacaggcaaacattttctcttagaaaaggtgataaaatcataagtatttggaattagaacccttgcacagcactgaacctgggaaagagatttaaactctgaatttatctttgataacagggattgattttaaaatgtacatgtattaaattacatttgtaatttaaggtctgtttgctgttgctgattttattcttgatcagtagtttgcatttcagaaagcctttcattttgctttaattttagcaaagcgggttataatgaatgacttccccaatatcttgcttgaacttacaggtgattaacttggatgagttttgggaagttaaagggaagaaaacactgttatcattttttcctgtttgggaagagcttagaaactggaaatactagatttgggagaagggcagagttacttgataagggactgatgtttgtgcagtaacttgggagtgtggtttctttttgaatctttaattaaaacctgggattatatatccctgataaatattcacacttgaaccatagttactgtaaaatgcaaaaaatcttaatactgttattctttgcactttttcttaatcattttttatatatatgcatatatatatgtgtgtgtgtgtgttgcttatgttgttttgtacagatgtgggccaccattgcaacaaaatacattctttttgctctaaaatatttatgaagaaaatacttaaatgttatgtatatggtggtaataagggaaaaatcaagtattataaacaagaatgaaggtttttgtaaagatttctgttcagcgttttgcaaggtaaaattttaggcaagttttccctgaagttatgtgtatgtgagtattctcattcttcccaacttgcctttgaagagtgaaataccattattatcaagtagactactgttcagcttttattcctgccctgctgtttatcccttaagaatgagtttcttagacttttccaatatgtgattttttttcccatttagaatggtgattttaaatgtgtgagtgcatgtactatcttatctcagatatttgcacccccaatctgcccccaa

SEQ ID NO: 138508 - DNA, 1006 bp, Homo sapiens
atacatctttcatagcaggcctcttcatattttaagtataattgtgaggtatacatagtatcataagaatgcaaaatacttgtttttgggtgatttgagcaactactaatggctatgaaaattgctatttgctgccacctgcaagtcacatttcataatgttctagttaattcagataaaaatgccacatttttgtttgttttgtttgtttttccttctcctaacctttctcacttgttggcaatttattctatttacaggaatctgtgatagtccattgcttcctatggcttggagtattagataatgtttaggagttttcaagatgaaacttctatagcagtctttatttttttggctttaaagtaggaatttaactaagattgttttcagcctgctttcatttgcttgtgtgcaactgaaataatgtgtttgccttgtcccaattttgtcagtgtttctggactaggacctatgtatgtaagaaaagtaaaatgaaataaaaaattggggggccaaatctgtagctgagaatttaactgtttccttgagttccaaatgtgacgttgggagcagataagcttattttatgaaactctgtgtaactgagctgtactttaataacagagtagacctggttaattcaagcaagttttatgttcctttacgacccattcaggcattatttttaggaagttggttgtaatttatatttaaaagattatttttcatactcaactttatatttttctgtcattttagtgagaaactcactagttcaatcaagctttcataaaacgtagactagtactagaaaagaactttggtgaatgtgagttctttgtgcttgccactgaaaccaaatcatttctaaactcgtctaggctattttgtagtagtttttaaaaatgtgcgaatgtttgcttcttggcaattgctgttttaaataatcacataaaataacattttatgttgattaacataacatctgttgattaatattact

SEQ ID NO: 138509 - DNA, 1029 bp, Homo sapiens
tatgaggtaggcatcattatcctgataaaacttgaggattagaaggttaactgacatgccgaggatcacttagctagtaccaggcagagttaccattcagatagaatgttccaaagtcctagttccctctattaaattgattataatatttaagattataataagatgctaaagctttgggtttaaggtgtaacttttagccaatacttacttaagtaggcattttatttttaactggtgtgtatgggcaacattatatatatgcagtttttgccattttaaaagtaatggcaaaaaccacaattacttttgcaccaacctaataataattttagaagaagtagttttgtaaataacgattaaggcaatgatattcaaagaagacagtcagaattgcatataccttagttaaacagacttaacattctttatgacttaacagatcgtaagaaagatctagtgaagttacaagcaggagagtatgtatctcttgggaaagtagaagctgcactgaagaattgtccacttattgacaacatctgtgcttttgccaaaaggtaactttccaaagttgtattttttgtttcgtaagtcaaaagatatttagaaaataatgtgattacatattatcataagggtaacatagtcttctcttagaattttcatcagatctggggaattgtacatttatgtaagttagtgaattcaacagcttaaagatcattttagataactcagacgtgttaactatttattggacacctgcatcttgctaaatacttagctatgcaacaagttatttcatttaacatccatgacaactgagacttagtataagtaattttcccaaaaatgtaacacaactactacatgttgagatgaattttgaacccaagtttttctaaatcaaaagcctaagagattgagccattttctttatatgttgatatgtcttatttttatgggttttattcttttttaaaaattgtaattgtggtaaaaagcatataacgtaagatttaccatctt

SEQ ID NO: 138510 - DNA, 1049 bp, Homo sapiens
ggttaaaacctccttagaaaaaatttgaaatgcattgatatcagtatgtcagtaatttacttataacagcttcaagtgttactcttcctgggggtgattttatcttaacagaactctgtgaacactaagctctaatggtgttctaagtgtgaaatgttatggtatgggaaggtttgagatgggtgattgttggtggtgattatcattgagcctttcttggtgttcttaaaatcacagtcacccagtatcctcatgtaaattttagtaaatataaactaatgttctctcataaagtgatataaaatctgatcagcagaaaaatactaacatacgtataagctttaagaattaatgaaatttgttgtagaacaataactaatttacttttatgatttccaggcggttatacaattaatgacaagccaaaccccagaggtgaaatcgtaattggtggacagaacatctccatgggatattttaaaaatgaagagaaaacagcagaagattattctgtggatgaaaatggacaaaggtggttttgcactggtgatattggagaattccatcccgatggatgtttacagattataggtcagaatgttttctttttatggttttctttagtttttataacttcagtatatatgaaaggtaatattgatcagtcattaataaagttgatggttccattagttcaaactttggacaagttatttaacttatgtatgagcttctccatcagcaaaacaaggacaataccaacctcatagggctgtcgttaagattaaatgagttgatatatgtaaaatattctaaacagagcctgaaccttagcgtaagtactagcagcactagcaacagcagcattgagtgtagagagaatgggcagggaaatagcaaacaggtaatgagaaaacaaaaagagctcagaggacgtctttcttggtcaaccacatgtgattttatataactgtttcctataacatactctatgctaggccttcctcactcttcacctctccacccaaggggcagcatgggcacatata

SEQ ID NO: 138511 - DNA, 1065 bp, Homo sapiens
tgaaggcttagcttgtgccaagaagtgttaagcattgtccatgtatcatctcatttaatcctcacagcatatccctgtatgaagtaggttttgttactatctccatttcatagatgaggaaatggaggcttagagaggctaagttacttgtccatgttacatagccaatgagtggtagagcaggaattccaatcaaaatctatcttatgacaagcttaggtagataacggtggagccatctctcctcctttaacagatattttgtacttaattacataaaatataaccatgaaaagcaaaaatgatgtaacaacaatggaatccattgcactattgaagtggagttgaaatactgaaaaatgatcacactttgcactccttcttttgtcatttttctgactctggttctaactctaatattcccagtgcattggtacaaatctggaatgtggtatgctaatatctctgttactttttccctcacagtaactgactatactactggcagagttggagcacctcttatttgctgtgaaattaagctaaaagactggcaagaaggtaagaattttatgaaaagctctagtgattcaagatatgctgaaaactactgtcagctttatgactttcatttctttaaagtctggggaagcaaataattctctgctgttttgctgttgcctgtccccatgcattctttttcctcagtgatatctttaggttcccaagaggaaaataaaatctctagaatctaggattaatgattctgaacttgacaatacttgaaggtaaagagaaaaaaaattcttactggagctttctgggtttggagaaggtgaggatccttgaaacttgactttactagtgagaatgtttgggctgagaaaccccagatttttaggggatagaatgatgggttgcactcatacacacaccaacttcttagatcttgatcccagaaaagattttcatagttgagactcaactgtccagctatttgtatagttgaatttttatatgtacctgcacagacaagccacttagaagaaaactagagacattgat

SEQ ID NO: 138512 - DNA, 1965 bp, Homo sapiens
gagttcgacaccagcctggctaacacattgaaaccttgtctctactaaaaatacaaaaaattagccgggtgtggtggcaggcgcctgtagtcccagctactggggaggctgaggcaggagaatgggatgaacccaggaggtggagcttgcagtgagccgagatcccgccactgcactccagcctgggcagcagagtgagactccgtctcaaaaaaaaaaaaaaaaatttagattaacttaatgtatagaactgaagaaacccctatatctgtccttagtctttttgaagtagtgaacaagtagtcagtgaaattaattacataattaaagaaacaaatatgtccattatgctaaagacttttacccaagatgttgcaagtaaggtatcttcaactaaagactgtctccattcctttcagattattgaatattttgtttaactttcaggaaatcatggatagaatttataagaatgttatgagcaaagtccaagagatgaattatattcagaaaactctgttcaagatagggtatgattacaaattggaacagatcaaaaagggatatgatgcacctctttgcaatctgtaagtacatttcataggctctgtggtttgagcctttaaatttttttatgcttttaaatccagaagatgaataaataaatggcaagttaattcatttgaatatcaccaccatgatcataaggttgaaattctcttttattctaagtcttattgtttatacagcaagcagaggactctgatcttggcaatttaacaaattttaataattgagtgtatatttaagatttatttataaaatttagtttcatgaagaaaaactaaaatagacttttgaatcaagacacttgagcttaaaaaatgtcatttctaactaaaaaaagtgacctccattgcatgaaggtttctgatttattgtattcataaaatagtgtagtaagtatatgaatataacttattttaaatgtgatgctgaggagtggggatggggaagcattttttattggaagtgagataagataggtgattaaatgttccaaagataattaaaatttttttacctctgatgtctgttttctttcatttacttgtgtcagcatagtttcccgatgctacacattatctttcttcatttttaaagagttttttctggcatttttacaaggcgttactagttgttgccttgttaacctctcattctcaccgtgattctgacattgagatgttcaaccagttgaggaatctttcccagagcttataaattagtgtgttgccaagaataatgtatgcgtacattaaaatcatttatcctccctttattaaggttactgtttaaaaaggtcaaggccctgctgggagggaatgtccgcatgatgctgtctggaggggccccgctatctcctcagacacaccgattcatgaatgtctgcttctgctgcccaattggccagggttatggactgacagaatcatgtggtgctgggacagttactgaaggtaagcattattaatgtggtaaatattctgtatcagctgctactaataaaatacattcgcattacctttggaaaccatggtaactttaaaatacctcttaactaatatcagattcattgcaaatcagtgtagttttggtttatgaattcttaattataagtatcatgtggaccctttcattttaagccttataattttttttttttttgagatggagtttcactcttgttgcccaggctggagtgcaatagcataatctcagctcactgcaacctccacctcctgggttcaaacaattctcctgcctcagcctcccaagtagctgggattacaggcgtgtgccaccatgcccagctaatttttgtatttttagatggggtttcaccatgttgaccaggctggtctcgaactcctgacctcaggtgatctgcctgcctcggcctcc

SEQ ID NO: 138513 - DNA, 1678 bp, Homo sapiens
tgtgtaagcattaaggttgttattcaactcacagaatgatatgcagagtaccagtacacctagaaacctagaaaaaaataaattcagaagttgatgtgctcaaagacatttacgtcaataatgattacaaatggaaaatgccagcctttcagaccagttatttcagctttctgtaattaattgtgtaaactaataaagacctgagtatttaaatcaattgtgctatcaacttgttaatattcttttgtttttgttttttgttttttgtttttatttttcctgctctctgcttggttcattgtcatcacctacaggcgtactttattgtcggcttccaaagattactaacttttatctgtatcactaagattgaactgccttggctgtactgctattcttactgctgcttctattattgccttcttcagcacaataaggctttcaaaagccaaagaataacaagaaataagcaccattttagaagcctttccactatgaaacttaagctaaatgtgctcaccattattttgctgcctgtccacttgttaataacaatatacagtgcccttatatttattccatggtattttcttaccaatgccaagaagaaaaacgctatggcaaagagaataaaagctaagcccacttcagacaaacctggaagtccatatcgctctgtcacacacttcgactcactagctgtaatagacatccctggagcagatactctggataaattatttgaccatgctgtatccaagtttgggaagaaggacagccttgggaccagggaaatcctaagtgaagaaaatgaaatgcagccaaatggaaaagtttttaagaaggtaaagtattttggtgcttttcatttatgttttaaagaggaagacacatttgttttatcataaatcgagtgcgttttaagtatgctggcattctattatagtgctgtgtaaaactactcagaagccgctcatagcttctgtatgttcatttaagagcatttttagagttttatgctttggatagtattttaattgcttgtttgaatatactaatattagagaatgtatcactttaacagttaattcttgggaattataaatggatgaactatcttgaagtgaatcgcagagtgaataactttggtagtggactcactgcactgggactaaaaccaaagaacaccattgccatcttctgtgagaccagggccgaatggatgattgcagcacagacctgctttaagtacaactttcctcgtaagtgccttgtgtttttggaggggggagaggagggtctttgcttgcatgtgagaattgttttgagatgctcttgttttcacagtaggtgttgtttagccattttacacattaattatgtccataatacggcatgtaatattgtggctaaaagatatccgatgactcctgttaagtatggtaacttgtaagaactaatatgggaattggcagctttaagggatgtgatttacacttttattttccaattggaaatgaattgtaactgaaagagttggagtttgggggtattttgggggggtgatatacaaagagtaatgattaaaagaacaaaaaaccatttctcaggataattcaaattcattgcttcactttgagacctcttatttgacttattctattttacgtgtgaaata

SEQ ID NO: 138514 - DNA, 2475 bp, Homo sapiens
agtcatactagccaggcacaggtgtaatgtgttggtatatggcatctctatagtcatcttaggttttgttttgcttttcttggttttaaaatgtatttattataattactgtatatttgagcttaaggtttgattgcacaagttatttgatattgaatagactgcttgttatttgcaatataacaatttgaatcagatgagacaagtgccgtaatgatacatatattttacatgattatttcgtcttgcagactgatgaaagatcttgttagaactcttaatgcttttattttcttaatgtattggcattctctaagttttaatgttaaagtataaagttaattgtaatgtctcttgtaaagtttgatttcatttacaaagtgaaaccattctgactcaacctagttgagctttctctggtatgttttacaatcatttggaagtttttaatagtgtatgaaagaaaataagattttaaggaagcactccacccctttacaaaagtccttgtgatgcaacatgtatttagaaatatgatcttttaaagtacagcaggtattcttatcggtttaatctcttggaacttttataattgttttctgatttaatgtttactagttacaactaatctttttcagaaggcaaattgtctctttatttggtgcttaaattactcttaaataatgtgtaacttgaaaatgagacttctaaaaaagtagcacttatatagttaattgttgattttcaaattgatttaaaaactatttttgtaagatcttatgtcaaggacaaagttaatttgtcactactgtatgtttcaacttggcagatgcatggatccttgcttggtttagttcattttctaaaacttttgaaaaaatatcttggcattaaccaactgcagttcagtagtttttctctttcattctcaaattggtgttgtgtcacatgcttctgggtaagacgatttcttcttttaaattcagactttaattaatatgtagtgtttgtttactttgtgtactagagcttaatgtatcactaatgctttctgtatttaacctatctcggagtgtttgaagtaactggaatgaaatacttattaaatctcacctcagaacaaaaaaataaaataaaattgaatctgatttttcactaaaacttctagtacttactggacatctatagaggccccccccccctaaaatgtcttaggatgtaggacagattagtgctcaaaattgttgccagtatttcttcatacccaaagtttgtcactctcacttatttagattataccagtattactaggatcacagataattgagctaaaaacatggactttaaaatcaaagcgacctggttcgaatctctactcagctgtgctatcttgggcaacttaatctctctgagtctgttatatctttaaaatgaaggtactacctcaaaggagttttctgaaggattaaatgagataatatatctgaaggacttagcacagtatctagcctgtagtaaatgctcaatacctggttattactatgattcccatatggaatggtaaagttcaacaggagcaattaactatccaatgactgaagataatgccctgcctttttctggctgacatacaaatacatgatttcaaggaagcaccactcaaagttcatgtcctcctaatgatgggatagcagtatcattcttcatacatggaaggacagcatacctttgtgaaaattatcagtgaaaatgcacatagtgcaaattgtgtaaccttcatgcttttataacaccaatcttttccaactctatgcaacaggcagtttttccagtttcatattttctattaagcaactaacaacatgttcaagtttattttaattaccagggattttaagagtatagtatttcctaggatgttgacatggacaagtgattgttttttaagatgattaaagttagctaccttcacgttattgtacttgcatatatttttaccttatagattcagaataattccagtacattcttaattcagtaaacaatttgattgaagccaacacacggaggcactgttccagtcacagattcagcagcaaatgagacaaactctctgccttgtgaagcttatattctactgggagcatagacagtaaacatgaaaaataaaacatggtatattagtaaaagtactcaggaaaaaaataacgcaagtaagggatagaaagtgtggggagtacaattttaaaagaagttggctggagaaatgcctcactgagaaggtgttctttgagtaaagaaaaaaaaagaggcaagagaataagctacgtagatgtcttggaagaacattccaggcagagagaacctcaagtacaaaggccatggggcaggaacaaatgggactgcagaagaatgttccagggaaagcgtactaggaggtgaagtcagaaccttggggtaggggaaagactatat

SEQ ID NO: 138515 - DNA, 1444 bp, Homo sapiens
gtttatgcttgccccgatacgttgaagcttattcttttttttttttgccccaagatggagtcttgctctgtcacccagactggagtgcagtggtgtgatctcggctcactgcaacctctgcctcccgggtttaagcaattctcctgccttagcctcctgaatagctgggattataggtgcccgccatggcgcctggctaacttttgtatttttactagagaaggggtttcaccatgttggccaggctggtctcaaactcctgacctcgtgattctcccaccttggcctcccaaagtgctgggattacaggcatgagccaccataccagcctgaagcttattctttgagagacagccacaatgtatacttgtgccgaagcttattgaagaataagcttcaatgtatcggggcaagtatacattgaggctgtctctcaaactgatttgcgtgtatttctgatcttcataaatttttaagtatatatttcattgaggcatctattctagactacaatatggagtaaaagaaatacaacagagcacctaaaattaaaatcatagtgtttgaggcttggactttgaaatttacctagtcctatagtccccgattgttgatttttagaccagtgctggttagtgaaaacgtttttactggtccatggtgaagtgagaaaaataaggacagcagatcatgagtttttaaaagctaaacattttcagtttaaaggattgcttcttatagaatatatctttctaatttaggggaattaaacatgttatttatctcatgaaattatggtgatagtaaatggtagggctttaaaaaaattcatgcctggcaaaacaacaacaacaacttggtagctctgtgtcatttccccccactaattctttcttttacattttttgctgttttgtgatatcttaaaatatgaacccaactttctcattttacagatgaggaaacagacattgagaggttaatttgttccaggtcttaccactcagcagcttgtgaaccaggactaaaaccctatatctgatactgtctctctagaacttctggtcttctgaaaattgctttcattataataggttataaatttgaaactgaagatatagtagttcttatgtgctaataactatttttgatttccaagtataaagaaattcaaaaggccatgtttttgtatagctaaatgctgaagtccactgattagcctgcattagaagaatcttaaacatggccaaagatttgtatcagcagatcagaattagctgtcaccgaattcagctacttaggtgttacacgctacccagtggctgacaaagaagttaaaatatcagcaaaattattatttccttttggaagttgacagactatactgccactgtgaagagtggtagtattcaaacttctatagttaatttaactacagaaagta

SEQ ID NO: 138516 - DNA, 1681 bp, Homo sapiens
ttagttaaagggtgaacataacttattaaataggactatacttttttaaagtcacaaatcaaatacctatacacggagatattttcttacaatgcatctgatttatcctatatctgtttaagatacaagtgtgttttttgtgagatgagaaattgacttcagtttgaagtcatcagttaaggtgttaatctagattctagaaattggattataaatgttgcacataaactaagattgtagtaatttgatatcattgaaaaacacttggaataaagagtcttgtgtgtttgtgtgattaatggtgtgcagctggtgctttcatttacttgcccgtcgtatatgactgtggattcaaacaggagtttttacttggaagtgtttttccaggagtgaaggttggcttctgctaatatacccatacattcttgccttgttctctatgggatgaaagttaggatacaactagggtcatcattaggatatttttgcaaaagaaagaggggtttgataattatgctgggacaaccacaggacagtcctcagaaagctgggaaatgtgttcacctacattttattttattttattttttgagacagagtttcactcttgttgcccaggctggagtgcaatggcgtgatcttggctcactgcaacctccgcctcccgggttcaagcgattctcctgcctcagcctcctgagtagaggggattacaggcatgcaccaccaggcccggctaattttgtgtttttagtagagacgggttttctccgtgttggtcaggctagtcttgaactaccgacctccgtgatccgcctgctgcagcctcccaaagtgctgggattacaggcgtgagccaccgcacccggcctcgccttcattttaaccagtttatctggggatcaggtttgtgactctagcttccgaagtactggctcaacccagtttagcgaaccatcagtgacagagagatttccctctactttggagtaaaagttaatttttgagaaaatattctgttgtattattatactggaattgtatgcgtagcagctgtattctttttatactttttagcattgtgaactccatgctgccagaccctgttggggttattgcaggacacatttgtagatgtgtgggccttacaggaagtgaaattacttaatgatattttaccactgctcgaaacatttcgaaagaaaaactttgagagaaagaaatgattcagccttttctgcctcctactttttgaagtcagctagtacacatttgtaatgtgatagcacagttgattggaatgtctgaagctagacaggtaagatgataccctttgaagtttgagtatttggtcccagaaccaggttgtaaagaagaaagtactgatggaaagctcacttctgaaatcccctcctttcacaggccctctgatcacccgtgtggaaagtagccctctgggtctactaatcacagacatcaaaggaatgatattcatttggttccttttgcttgagttaccttctcctggggcaggcttaatttcctgtaggggactgattctggtcagttgaaaaacattttcattatggggcagaaggttgcaagtatggcatggtacctattctatctcatgcagatataatctggcatttgagttcccatttgttttaataggataagt

SEQ ID NO: 138517 - DNA, 1051 bp, Homo sapiens
gtccttattctaaaagcttttttatatttttaaaattgatttttttctctttaaacttctgtgttaaaactaagacacagtctcaaaacaaaaacaaaaacaaaaaactaagacacaatcacaaacattagccgaggcctacaaagggtcaggatcatcagtatcgctgtctttcacctccacatcttgtcccactggaaggtctttaaggtcagtaacatgcatgcagttgtcatctcctataagagtgtcttcttctggaatacctcctaaaggacctgcctgaggtgcttcttgagaaggtgtcattctttttagaaatattgatatgtccatggtggtttgctagtattcttgaataatgtgccctgctgtgacttcactagtctacaggaatttttcatctccattatattcttatgggacgactgtatatgcagtccgtcattgactgaaatgttatgtggttcatgactgtagtttattccctatttttagatattttgttgtttccatctctttgctcagttaattcttcatgattttaagtaaaaggccaactgtgtgtgtcttctcaatcttttcccccctaacaaatgagaaatatgacactcttatcattacagtggctcaataagccagtgattctaaatgtatgtatattatgttgaacgacttgaaattgccttttttttttgtctgtagcaaattttttactattggcaattttatgtggttcaacctaatagcttgaaaaagatttctaggttattctgaccaccctgcacccctgtcccatctctcacttccctgagaatctgcatttagaatagtgagctgtttctgaagcctttggactaagcaacaatgttgacaaacttaccttccaggagtctctgataagcacaacatcctgaagacatatccttgtgttgatgacatatgcagagaactttaactatagtgacttgcatctgtgtgtcagtacggtagagatagacttctgagttttcacctaagctctgcaagagagcctgatggtcctctatcc

SEQ ID NO: 138518 - DNA, 1066 bp, Homo sapiens
cgcgaggagtacaaaataggggagttgatacttgcatcagccctgctagctgccttgaatcctagctcagtaggggtcactcttaagctgccataggcataacaacttctacataggtggcacttctggcactttggagaacattctagtggtgggatagttccctaacccctgtcttatctctgtggtaccctgcatctatgccatttttgtttggttacataaaatgtttctgtggagtgattggcctatgattgcattgataacatttagtaaaacagaagatttgttcctaacacgttttacagagctgatctttttattgaaaaatccctaaccctaaagaccacagttttttgtttgtttattttgtttgttagcctcatagggataaagtgcttccttataatcttgtttccaattgtcttcaactgaggaagaggaagtctgttgactgtctccctgcaccccctctgattgaaggatcaccttgcttagggcactgccagcttaaaagtggaggtggatgccatactaggacattaccaaagatgaggaggagtggcagtgaacttagagtctatagccagagtgtacattgaattttaaaaaccaataatctgagatctagtctgtacttaagagacatatttaaacaacaaattgtagactatgggatttcttttctttctttttttttttttttttttcttgagacagggtttcacttctttcacccaagtgcaatggtgtgacctcggctcactgcaacctccaccttctgggctcaagcaatcctcccacataagcatcctaagtactgggaccacaagctcatgccaccatgcccagttaatttttgtattttttgtagagacagggttttgccatgttgctcaggcaggtctccaacttgtgagctcaagcagtttgcctgcctcagtctcccaaaatgttgggattacatgagtaagccactgcgcctggctgactatgggatttcttaagctaagtagtatattgaaaagtctgcagtgtttcatttgatgatcagtctccagtgaaa

SEQ ID NO: 138519 - DNA, 1068 bp, Homo sapiens
ttaaaaaatcttctggaaagtgtaagacatcataacccagttaaaaagacaagtgatggccgggcactgcagctcacgcctataatcccagcactttgggaggccaaggtgggaagattgcttgagcccaggagtttgagaccagcctggacaacatagtgagaccctgtctctaaaaaaaaaacaaaaaaaacaaaacaacaacaacaacaacaaaaaacaacaaaaaaagccaggcatggtggcatgtgcctgtagtctttgctactccagaggctgaagtgggaggatcccttgagcctgggaggtcgaggctgcagagagctatgattgcaccactgcactctggcctgggtgatagagcgagaccctgtctcaaaaaataaataaataaaataaataaaaatgaaaaagcttctacatatgcattagaagctttaattgacctccacttaattgactcaccacattgaataatttttatttcctttgtaaaatacagtgtacactgaatacttggtattagttggttgatctccagtactccagcgtgcttgtttacctaccagtacagtaaatttttttactactaaacctgtatatgttggttgtatttgtttttttgtttgttggttggtttgtttgtttttgagatggagttttgctcttgttgcccaggctggagtgcaatggtgcaatctcggctcactgcaacctctgcctcctgggttcaagcaattctcctgccttagcctcccgagtagctgggattataggtgcccaccaccatgcctggctaattttttttgtatttttagtagagacggggttttgccatgttggccaggctggtcttgaactcctgacctcaggtgatccacttgcctcagcctcccagaatgctgggattacaggcgtgagccaccgtgctaagcctgcttgtatttgtttttaaaaggtaatttgtttaatatgttgtaacctgacaatatatgagtgggggagattggagttctttttactgaaaatttacaaatgaaataatatgatgtctgggatttgcttaac

SEQ ID NO: 138520 - DNA, 1333 bp, Homo sapiens
gggtgcgcgcgcgccgctgcggctttttctctggcctccgccgcgcgctcctcctcgtcccagcgctagcgggcacgcggttcctttttgcgagctttccgagtgccaggcgccggccggctgcgaagacgcggtgggccgcccctccggtgagtatccctggatggggaggttgcggccccggcacccctgccctgtcggtaccagggccccatttccagagggggactggcgtacctcacctgagccgggaggaggttgggtgggcattccagctcctggagtcggctcgcttttttccttgagccagggctatctatccgctcgcctccgctggggccgggaagattcccgaggtcactgtatctgctcctgtgatggactctggggtcctcggaaccccagcctgcctcttcctgccgctcaccgcatcccgagggccagaagtcatcttcctgatcggggtactaggctttgccacggccctttccggaggagaccatgaagtgcttgctagacctccaaacgacctttagggtgcccctaaacctcaactccattttgtcccctcccagtcgctctgtaactgagggctagggagcctctctagccctagaggcatccgccctctcgaatttgagggatgccgtcgcttccgatatcttccttgcttccgatatcttcctagcttccgtaggcttaggtttgttagaaaacagctggatcctggcgaagcgtgctttccttccttcccccacccccgttctttctgtctacatccctgccttcagtgggtgctatatatttagtatgagctttattcacttcctcttcctctcgtttgagtgcctgaaagaactgtggctgatgtctatagacatagaaaaatctaggagaatatgattcattgtctaaccccatcaaggggttacatattttaaataagacgtcatttctcctcttcactccagcatctcctccttcaaaggcatttttcaccctcttgaaattaatacgctctattcgctcttttcacctaaaaaaaggtcaatcgtcgctctgagaaacaacagtgagatgcaaaataagggtaaaatggcattgaaatgaatccctttgaaaaagtaagcggtttgctttatcagttaatggtctcatcagcgcttcagtttcctcttctgcaaaaatcagtctgttgaactagagcatatcaaaggttccttctagtgttttgattctaggacctctaaattcatgcaggctgcataatgcaaatttaacctgattaaagccttatttctcatagtcgcttgtcaccttagtttttctttta

SEQ ID NO: 138521 - DNA, 1045 bp, Homo sapiens
agggcttcttgggaagtgatgccattcacaggaagtccagggctgtcccagctagaccttctgtgtaaatttgagccagtcttctttctttctttttttatgaatgggctttttgttaatgataggaaacaacgcatctcagccgatgctgtgtgaggctgtcgggacaggagtgcttttttaggatggcaggtggtgagggtcaaagggtgcatcttctacaaagtggtcttgaggcctctggcaatcacatatctagaaggtcgacaaaggactaaattcagcctgactggagctgcggctgatgtgatgacgtcaagactggcaacaccatggtttttagaagcaagatttttagaggctctcagaagactctggagacctagtgctagcattaattcattgtatgactttggagaaagtactcttcctgggcctcagtttgcctaccttgtgaaatgaggcagagttgccctcctagctcttgacagtctatgtgattcttgtctccataagtcgtagatgggtatgcaacagagagctattctgaaatgcttttgacctcctgtgtggaaaaaaaggaagctagtttcttctctgtggaagtcaggtggccagttcccattcattgttttctccctgtgtcttcccagtaaagtaaactcaactgggccatgcttgggaactcatgcagaggatgatggcactttaggactctgaagccttaggatgggggcatggaacagagccatgccgaggagttcttgagctccatcagaattatgcttctttgcccttttcccctaaatcactgctttgtatcatttaaatagtaacccctggcataccaggagacctagcctctgattaatccaactttctataccctccatatggcttttcctgggaagcaggaatgtatggatttttaaaagttgatgagtcctaaaaaaaaaaaaattaacagcagatggttggaaataattttctgtcttggttgcagcaatgaccaatgatagtatgtatacccagaataccataatac

SEQ ID NO: 138522 - DNA, 1344 bp, Homo sapiens
aacagtgtatattccaaagaggagatactatgtacaaagaaatgtttggcaagtgaactagctgaattaggctatgttgtagtggcaaattctgtggaatttagaagtcctagcaaggaaagagagatattagctgaagtgaaagggatagcttagcagagacatgtctgatatgtgtctctcaacaggatgactcagttttggctttataaaaaggccttcttcctcagagagtcagtgtaagtttgtaacaagggaggtattgctttaggccaggaaatagataagttggagggaaattggttagtctccgcatctctcatttttcagtctgcaacatattcattcccaaggccttgttacacaggctctcatcatagccatgctgcctttgagtgactgccaactgtagtagcataaggaagggcagtacttgtgtccaagttctgttattgattaatattcgtcctgtcagatttcattttggccttgtctgatttctcaaacgtgtcctgggactgtagactgatacaggcatgtatggttgacctagcactgtctcacagctaagcctccagccagagatatttgagtgttctcaagatcagcaagcaccaaggttaccacatggttgctaaaccccttgctaaatatcactggtgtctatcaattataccaataagtatttcttcaagcatggccagtccctttttgcttatgattttggcaggtatgggtgacagggagtgaatttatggagtgactgtactgtttaccaaaaatcacccagtaagttagtggcacaggtggctttagaactgagctgccacagtgggaatctggcttagcaggaagagattctcatagctatttaagtcttaaaaatctacagtttctcagcagaagggttaaaatgctagatagtttgactgattgttgtaaagactggtggtcttaatttagtggccctttaccctccttgagtccagttatatttgtcttagaaacttaagaaaaagatcccatttgggatgtcttgtttaattgtccaattcctgttggttctgtatgtgtctgtgccaacatctcctgattaggcacagaacttagtggggtgaagcatatgcagtttaaccctccatgtctatgcgcataaggcaggctgtatccaggctggatatttggcaaagaataattggtgctgttgaccccttagtcccaagctgttggtttttagtgagtaacactgaatcccatccttttttagagttgctgtagctatttgattttttgtcttctttacaatatattagaaatctaacttcaaccaaatatggcttaccc

SEQ ID NO: 138523 - DNA, 2718 bp, Homo sapiens
aggaagtatttttttcccagtcttttcatgccttgcacctgttaatacaactcagcttgcttttaaataacagtatgttgctggcccctactcagtggatgatccacaagctcacagaatttttattcctttgccacagatgggccaccttcttctcagtctttgtgagacttgtttttagtttcctccccctctgtaaatactcccctgaagattctcctctacgaaacctttccataggagcctgacctgactccagtaacactttttgtcctttcccagccgtctgaatacatgtcagaatgttgggctctttaatgaatacctttgtatgcatgtaggtaatctggtgtttggccagatcatttttttttgtttgtttgttttttgttttttgtttttgcatgtttctttaatgtttctccaccattagtgggaacacttttttaaagtaaaggagtagtggatttttcctttgtaactccttgcagagctgaatataatactgtatatgcacattaattgtttaatgtgtacctggataatggtgactgaatgattgatggaactgactttttgctttccttttttctttctccactggtggccctatgttcctattaagagaatcttccagccaggcatggtggcacacgcctgtaatcccagactttgggaggctgaggcaggcagatcacgaggtcaggagattgagaccatcttggctaacacggtgaaaccctctctctactaaaaatacaaaaaattagccaggtgtggtggcacgcgcctgtagtcccagctactcgggaggctgaggcaggagaatcgcttgaaccgaggaggcagaggttgcagtgagccgagatcccgccactgcactccagcctgggtgacagagcaagactctgtctcaaaaaaaaaaaaaaaatctttctgcctgttttttgaaatagccacaggagtgaggcaatctcagctcctgctcacacatctttttgtagaatttccatcacaaagaatggttattagaatctctactcttggcccaaagtgtctgtttgcttttctcccaatcaggaaatcacactgttggatcttgatcttaatctcttggacatgccaactttcttgcttcttaatatcatataaataaaaaatgttattaagccagagacttacttttcctttttctcccctcttctctttttcagtggatacctcattgttatgcctcattgaaatgaagagctaggtttctctgcttctcctggtctttcatatattttgttaaattgagaatgtcttgtctcacgtgctcctctcctgccaggaactggctgagtgaatgcgaagagactctggatgtggaaagcggtgattgtcaaactttatttgtaaaagagtctcttggaagcttgttataatgcggataccttgttctctacatggtgattctgagcaggtctagggtgaggattggaatctgcatttatactcgctcttgggtgattctaatgctggtcagccttggaccccacttttagagacattatctagtggctgaagtaattaggtgggaagttggtttcagtgcccatcctaattgagcatgagtctgggtgatctgtgggcaaggcattaagtgttctggcaccatctcaatacctgttaaatagtgtgattcagattagaggatgagggccccaagttattgtgaagagggttttaaggtagctgtagagttccactggcttgtttggtgactgttagttatgtcaatggagtatttcaaccaggccacctttattaccttccagtgatatatggaatatatccctccagtccttctatatccccccgctttccagtctctaagatctgcagggactaacaagagggaatgttgacacatggtttgttgtatgctaactctctgtttgcaggactgttgttttagatgttcgtgggagtttattctttcttgcgttcactcaacagatatttatcgaatgcctattgtgtgccaaacattggtgccaggtattggagattcaaagagaaataagaagcagtcattgttgatgtactttcaaaaacaaaaccaaaaacaaaaaaaaaagaagaagtagcctttgccttcattttgttcacagttttgatgagatggacaaggaaatagatcaactaaattacaacattacatgtatagtaacagatttgaacaaagcataggggacaggggtctttttttttcctaatgcaattaaggaaagcttcctagaagaggtggcatttgagctggctcatgttagctccatgaaagcaaggacccttggtttttgttctcttagtgcctagaacagggactggctctagtaggtgctcaataaatgtatttgaatgcgtaggaattcattgggtgatggaggaaggaaagcaattctaggcataagaaacaataagtgcaaaggctatgtgctatctccccatttctcctatttaatatctattcacttacccagggttcaagtagacaggaagaggatggatgtggagagcagtgattatcaaactttatttgtgaaagaatcccttggaagcttgttataatgtagatgtctagctctcttcatagcaattctgagcaggtctaggatgaggatgggaatctgcatttataagaaactcccagatgattctaatgcctgtgagcct

SEQ ID NO: 138524 - DNA, 2157 bp, Homo sapiens
gcatcaaggcacttggacctgttaccagcatgagatcctgaagggaagggtttgggggatctcttgattggttttggttcccgtctagtagctgctggaggaaatggcagagggaggaaggataatatgagttttattctgagctgggtggtgttgagggaagggaatggattgcaggagccaggaggtcagacaggattggcctgtttggcgaaaacagtgcaagctctgccctgtggccatgtgtttaggtgggtaggagagggaggagtgagatcatctggaggggaaaggaagcatggtaccatcctaattctagcccagtgccttcagtctcctcatgtccatcacatgccagtattggtataaagtcagggtgtattttgcctgtgaattgaattgtctttgccaatcgaccagctgtgtttgcagaaagactctgactgactgtgttctggctgttgctagcaaagagacatttcattcaggtgctgattaaataaggtgcagagccagattgcacattaaggcccttaactatggctctgggagtcctgggtaaacacttattagatgttctgggcagagcacaaaaaggctggtagtcaggtgttctcttcagaaatcaggttgaaggaaaatggggtaaagagagacttctataaagagttttgatcttcttttcttaacattaatcagatctgagtggctggtgtgtacacatcagggccagataagtttcctcattggcatttacttgccaaattcttgctgggacattgtaggcttggactgggatacagcggggatcctgacttaagtagggcagtaggaatgcttcattttcctaatgcaagttcagcttggtggatagagcctttggaccatatttcctgggtttgggtttgagctccatcaccatgtaaccttaggcatgttacttagctgcatctgtaaaatgggaataataatagggttgttgtgagggttaaataaaataatttaaatcaagtatttagcagaatttctggcttattgtgtgcactaaataaatgttagcagtttttaatagtaatagtattacttaacatttcaagatcatagtggtgtattgggtaagagtacaggctctagggtggtaaaagcctagattcaaattctaccactagctctgtaaccgtgggcaaattacttaacctctctgagcctgtgttcccacattcataaaatgatatgatcaaacttgaacattaccagagttgttgtgaggattaagtgagaaaaatgagaaaatattaataaagcatttaagatagtatctggcacataagacacattcaatacatttaaatgatgatgatgatgatgacgatgatgtcggcaactaagatggtgagggtgatgatgacagtcatcatcattctcactatggctgctgcttcgagcctgggtgcctgttgttgcaataagatggtagggatttgatacaggaaagcttttccaagaaaatcttccctggcatcataatttcatgcagtgggcaaaggtattggttccatgaagttagcacccatgtaataatttctgcgggacagggttgtttggctgtttgaggcttaaggacgtgtttgtgggtaatgtgaaggtactttaaattatccagtcctttctgggtgactgggtgattctgtttaaaatggcaactcttcttacatctctaagatttaaagaatttagaaggtggctctcattgttaggaagcttagctttccggggacctattggcttaattattattgctctttatcaatgggctggctccatggtgcaaactctcttgagattggtagtctaggaaaccagtgagtttgtgacagaagtatgaaaggagtgagcttgggggaatggggtgggcatagactggtgaatgggtttttttttttggttgtttctttttttttttttttttttttttactttttcatttatttcttttgattaaggggagtgcaactttctccagtgccaactattaccagagctgggtaactgttggaagagaaagggccacccccagagctcctgggtgaaaggcaggttcaagtgaacaagtatcttagctgaaggagaagcacagtatagtggaaactgtgctgc

SEQ ID NO: 138525 - DNA, 1801 bp, Homo sapiens
ccgagtagctgggattacaggcatgccccaccatgcccggctaattttgtatttttagtagagatggggtttttcaatgttggtcaggctggtctcgaactcctgacctcaggtgatctgtctgcctccacctcccaaagtgctgggattacaggcgtgagccactgcgcccggcctgcaggccacctctttacctggctggtatagcaactgtttttttcaatttactttcctgcccttgcttcctgtcttccacagaggagtctggccctggtgtcaccattacttgctgtttgccctggacagacagttcacagggatgtgtgtgctcactgagcctgcatgtagagccagtatgggttgcttgcagatgttggttgtttggaaatgggacccactcagctgcggatataactgaggccatcatttcctgcctccaaatagaggcctgcatctaatcctagtaaacagttgtatggggctccagggcaagggatcaaaattagaaccttagtctagcagaggtgacaaaggccaaagaagaaaaacgtcagaataatctgtcagcccagtagtagaggttagttcatcttggttgagtagtagaaacagcactggattaagggttagccagacctgggtcctggttgtaggttcatcactagctggttgacaaaactgagtaattttggccattcaggtagcctctctgtgcctcagtcttcttatataataagaaatagagtgtggtagttaaaagtgcaggctctggagccagactagtcaggttcaaatcccagttctgctgctttctagctgtgcaactctgggaaagttaattgacatatctaggcatggtttttgatttgttttgttttattttgtttgaggtcttccaagttcattatttttcttgtttattgctagaccagtatacctaaagcctctgggtctgttttcttatctgcaaaatggggattaatagtagtatctactttatggggttcttgtaagaattaaatgcatgactacatgtgaagtgtttagaatagtggtgcatggcaagtgtttaataaatatgagtatggctgttatcatctgtaagacagagatgatctttgcccttcttaccttatagggtaaatatgagaatcaagtcaaataaggtatgtgaatgtgctgtgaatatatgaatgtgctgtgaatataagaaagtgctatcaaaatgagaacaatcatcatgtcttgagagcaggaacatttaaacattccctaggccacctgtttctagaatcagatattgatgttatttccttggtagcctggcaaaagggagaaaggtaggtttgtatgtagggttatataaatgctggggccatcaagcaatgtagatcctgcttttttcttcccagtgtactcaagagggcttgaaagccatgcatcctaagtaaagtggttgggggatttggaatgaaacagtatcatctgccatgatactgttccttcagtactcttatcttatttaacagcatcacaatccatccagtgacccaggttaaatccctagaaaccttgatacatctcaattccaccctcttcctccttttcatcatcatagtctcagtcatcttgattctgcctttcatgatctcttccatttctcttccttttcttctttgattcccctgccctggttcatgttgttgtttatcactgtcatcatcatcacctgtcttgttagagcagccttgtgattgatcttctctcctctatcctttacactactctatcctttactcta

SEQ ID NO: 138526 - DNA, 2358 bp, Homo sapiens
attttggtcccaaccttttttttcagccttgttatttagtatattcttccatgtgttctctgatccagccaccagcaccatgcacttccattcttctctgagtttatactttgtttatgctgcactgttagacagaaatattctttcttttctcttcctgttgaaatgctagttatcattcaaggctcagcccaaacactccctcttgtgaagctgtcttcaagcctctaagccggatttagcctctcttgtctattttagcatgttattctgccttgtattatgtaattgtttgtgtatcttccctactccttagattgtatgttcccaaatgtaaggtctatgtttttattaatttttgtatcccccgcacagcttctggtacattctagattcctaattttttaaaaattaagtctagtccaatccctttgttttccagatgaggaaactgtggcttagaggaaaaggtcattagttcattttgggatttgttgattttcagatgtttgagatgttgaggatggattgtccagcaggctattaagatgtggtgaaggctagaaatgttgatttaggaggtattgccttcgagaagataaaggaggagaagaggagagcatcatgcaagctagagaagagaaagaagaaaagtattctggggaatgtctcctttgggagcagaaagaagactctgacggagcagccatccaggaagtggaatgagatccaggagaggaaggagtttcagaaggcaggagctggtcctctatgtcatgaaatgtagagggtgaggccaaggaggacctgagagaaggtaattagatttggtgtttacaggctggtccctgtggccagccaccccacccactttaaaatatttactctacaaatgttaatgtgtgaagagttgcatgccagaatatttatggcatcagtgttggtggatacagaacattgggaaacaacccattaatagcagaatggtaaatctggccagtgaatagtatagctttttaaaaggaggctgatgtctgaattcactttcaaagttgttcacaatgtattgctaaaatacaaaaatgttgcagaaccatatgtatgagagaaacccctttttctaaaaaaaaaaaaaaaaaaaaaaaaaaagcccaagcagcctctttatatgtgcatgtttatgagcacattttaaaaatctggaagaatgtatactaaatagcacttactcctgagtgattagggaaagaggggaattctcattttttaatgaccacatttctgtattatttgaatttggtttaagtgtagattcctttagtaattaagagaaatacttatttaaataaagaaaggatgattggcagcctgtgagaatagctttactaaaaaagattcaatggacaaaggaagccaactcacgagagaacatttggcaactgagaaaacatcatgtgttttggaggctgtgccacaggtgccttgctgtctgtgtggctggtgggggtgaggcagggggcatggagagattatggctggaatgaggcagttaccccattgccaggaagttcagtggaaagggaggggataagtagaagagtagctaagtggccaagaggcaggcaggggctgattaagaaggaattaaaaaagcaaatctgtgtgtgtgtgtttgtatgtgtgtgtgtgtgtcagacagtcagattcagtgctgagctgcagagggagaaggaaggggacactcattgctatgaggaaacatcagtgtgaagcggggagcagggtagttgagaagggacaaatggaataccaattttagtagtagggaagcttccagaaaagcatgagatctcaggccaattaagcctctgatacatgtaatggttggggactaggctggactagctaatcgccttctctaacggtaggttaagaaagctcctttttgtttatgttttggttacaaaaaatgttttggcagtagcagacttattgtactggctcagagaatagtctggtgagtgactgaaatggaatttttgtgagcccttgaaggcctttaagtcatctggacctgctaaagtttgggactagaagtggagatggagaacagtggaggtcagagtcctcaaccctggctgcatctctcagtcacctagggcagcagataataaaacacaaaccaatgcctgctcccacaccctgttcttagataattgattacacttggggcctggacataggcatttaagaaaaaactcctcaagtgattctaatctgtagccagggttaggaatcaatagttgagaagactggattaaatgtgttctgagcctaaactgaccactagaaatgtgt

SEQ ID NO: 138527 - DNA, 1018 bp, Homo sapiens
ggtgtgtgagtaatgagctgtatgctgggtgtgggagttcagtgcccagccttcgggaaaacatgggtaggtttcattggctcttatagcagtttgtggctccctgactctatctaccctggagatgtattggagtccaatagttagaacctcagagccgtgggtaataggcctattacctacttcttcacagtaatgataacagctcacatttattttgcccttactttgtgccaggcattgtcctaagtgccttatgcgcatgaactcatttaatcctcacaagaattctaaaaggtagggtgcagagcaactaaatagcttgcctacagtcacacagctagtggggtggagctcggattagaaattaggcagttcagagaccataaacttaaccaactgcttggttgagtctctagtcctttggtttccttttttaacttaacatgttataattttgtaactgctggtctttagaaatgcagctgatctttgtgcatcatttttgtatccagcaaccttgctaaatgcttttaagttaattataattaatacatctgaggattctttgggttctctatcttggcaatcgtacataatctgcaaataatgagaactttgtctcttcctttgtggccattattttttttaatatctttttctcaacttactgttttagttgagacctcccgtatagtgcttaatacaagtgacaatgttgagcaactcttatcttgttttctgccttaaaggatatgctttcagtgtttcatcataaagtatgatccttactataatttttttgttggtattatttattagattatagaagttccctcctattctaagtttgctaagattttttaaaaatcatgaatggatgttgcattttatcagaagctttttcttctgttgagatgatcatattgcttttgttctttagtctttcagtgtggtcaattatactgattgattttctaatattaaattgtctctgtacttcccagaatcaagtcac

SEQ ID NO: 138528 - DNA, 1039 bp, Homo sapiens
attgaaataatagttgcatagggattctaaataatttattagttccctcacttgctctgcaggaaacaaaaataaagtctatagaagacagtgttcacgaggatcaagcaacagaaatgatgtcagctattcccccttttattagattttcgaatggaatcagactatgtgaagctggaaggcatacagagagacaaattacatttggtcacatatgggtgggaatggaacttttcagtccagctcttgagcctatgtggtgctgtgaaatcttattttcatgctctgttagggcagcagctcctgattctgattgcgtttcctaaataagcactctgagctagtcctctttgctagcccttccttgctactcagagagtttcaatgaagggggagcaggtgacccagttagggtcccttgtttcaggtgttctttcatttgaatgtaacaatacttctctgtctctttttttaaaaaaaactttattttttgattatagaagtagcatatgatcataaattaagaaattagaaatatagaaatatagaaaacaaaagtgaaagtttctggtaatctgtctccctgacctgttctcttctctccctttttctctctctttttctctgtctgtttttttttttttttttttttttttttttgaggctgggtctcactctgtcacccaggctggagtgcagtggcatgatcatggctcactgtagccttgacttccctgggctcaggtgatcctcctgccttagcctcccgagtagctgagattacaggtacatgccaccacacctggctaatttttgtattttttgtagagacagggtttcactgcgttgccgaggctagtttgaactcctgggcttaagcaatccttccatctctgcctcccaaagtgatgggattatgggcatgagccatcgcattcggcctctttttttttttttttaacattttttttcgtgtttttaaatgtgggttttattattgttcagatgtgaaaaggccaacggatcaagagacagttgc

SEQ ID NO: 138529 - DNA, 2440 bp, Homo sapiens
ctttccccctacctttccccacctctagtaactactactgtactctctacttctatgagatcaacttttttagtcctgctctttttttttctttttattattattattattatcattatactttaagttttaggatacatgtgcacaatgtgcaggtttgttacatatataaagacctcggctaatgtgaaagaatatctccttctcactctctgatcttttcctttaaatttgcatttctcacaaaagtgtagtgtgaaaaaaaatccagcttgatgggggagagggctccagattttacagaatatggctgcatgaagtaaaggtcaggggttgaaggaactggaattaaaaatgccaattactcatctttatttaaaaatgggtaaatataaggcagaaaataatattttaggtacacacatcctgatctagctatgtttatgtgtgttggggtgatggatggacaagaggtatagttcaaatgagatcatttttgtgaaatggctttgtaaactgtaacatgccctataaatatgagattagctttaatactggccctgactctccagtgtggctttgtgtgtttgtctaaacacttagttaatatctgtcagtggtccattgcacaaggaactgacacaatggtatcctgtgcctctgttgttgttgttgttgtttttttttgcagttctaaaagcttagttaattgccttcattagcttaatatataccacgtgaaaagcatagaaaagcagaactcaaaactcagagaataaaggacagaacataactaactactgatgtgcaccttagttacctgatgcagggaattgaagcatataagcttcatctagtactacctcaaatacagtaaagtggatgacagcactcgataaactgtaaagctgaataataatgccaaggattgttgtcatcatgactacttagattggctgtcacccagtgacttagctgtgatatgcttccaggcagttcctgagaggtcctgcaagcccctttcctgtacaggtgctagaaagtgccatagaaatacagtctcctgatgactgtaaaagccaggcagctaaatttaataagacatttgtcaaggagatggaagattatggccaattttggtagacagatagttgccggctaaaacaaagcatgtattgaactgttttggagtaggaagaagcattgctatgacaacaaattacttatatttgatttagaagaaggagagcagtgtagcttaatggtttagaaagctcatgagaacaattgttggcacgggtttatgttaaaatataaaatgttaagtaggatctgttaaataattgagcacctcagtgcattctgtctcttctctcactgtctctaaccaatagaagacaatataaataaattcaaagaaaaaaaagctagcagaattacatgcaaattgttccattttataaggtgcccaaatgaaattcacagccaaaatttgctggaatgcaaaaaatgtcgtttctttacaggaaaaaaagaacccagagacctattcactgtgttttcatgccatccaaacctgatgatggtagtttggagtttctcattctgtaggtgattaatcttctttgtgattggtagtatgttttatttgaaaagaaactacacttcagaccatttctatcctttggctgtgttcatgcctgagagaatgagtaaacagtcatttgtatgaactggttatttgtagttcccctggggaagtaggtatcaggcaggtagcaaaggcatctagcatctggaggaagcttgtggatatagaggctttctcttagaaagatagctctttccttttcctaaaggtaaaaccaaacagatggcccatattcactggggataggtctcagggtcttcttcatcgggttctgagggtgggtagatctaaggactccttgagggctcttgaggcagagaatcagatactttctaatctctccttttttgcttttccctgatccccacttttacccagtaccatcttcctgttttccccttatacttccagaacagtacagtaaagtaggaaacagggaaaagcttggaaaatggaggactgactccaagaggacaggaataactaccctcagcttttaaactgcctctgcaggcaaaactcacaaatttgtattcccccccgccccaccgcccacccaacttctttggagggaaaaattccattggtcattaatactgggaggaggccatgtcatagagttcattcagaggcggaagactgaaaataataagccagatcttaggctaaccttctcctgtaacagagaagtgacccagaatcacagctgtttgatgaataatagaatttgcctggcatatagtttaaatttcaccttcttatgtgacttggtgttctgtgttttactag

SEQ ID NO: 138530 - DNA, 1340 bp, Homo sapiens
cattctcagtaaactatcgcaagaacaaaaaaccaaacaccgcatattctcactcattggtgggaattgaacaatgagaacacatgaacacaggaaggggaacatcacactctggggactgttgtggggtggggggaggggggagggatagcattagtagatatacctaatgctaaatgacgagttaatgggtgcagcacaccagcatggcacatgtatacatatgtaactaacatgcacgttgtgcacatgtaccctaaaacttaaagtataataataataaaataaaattaaaaaaagaaatgaaaaaaataaataaaaatcactcatagtcttgccacaaaaatgttaacatttttgcttattctccttcttctcttcacattattttacatgcttgtgtctatactgtatattgccaattttatacctgatttttttcactaagcatcctcataaacgtttcctgtgttatttaaaacttgttggcataactcttaatgcctatgtggtactccatcctgtatgtaactggatcataatttacctagccatttcctttttttttttttaggggggatggattcttgctctgtcacccaggctggagtgcagtggcacgatctcagctcactgcaacctctgcttcccaggttcaagcaattcttgtgcctcagcctcccaagtagctgggactacaggctaccatcaccgcggccagctaatttttgtattttttagtagagatggggttttaccatgttgtccaggctggtctcgaactcctgatctcaagtgatccgcccacttcggcctcccaatgtgctcctatttttttttttttgcagttataaactttaaaaagtttactcttgtacaaatctttgtgtttcacattattttgtaggtcactttccttgaagtggagttaccaggacaggggtatggatgtttttaaggagcttaatatctctttttttgttgtttttttttaaaaaaggtagtgcttatgtacattcctactagcagtggggacagagagagcctcttccaactcatcctcaccaacatcagatattgtcactaaagcaaaatcttttttttaaagcaaattttaaaaaaatggcatctaagttaatgtgtaattctttgttaaggtgattggagaaaaagtttcaaatgattgttgaatgatgaatgggatcacatagttcttctttggctcagtttttcataaatgtaccttgggccctaacttgcttctccttttcctcatgcagttaccccctttcatctttctggctccttctgttaaaattctacttattctttagggctca

SEQ ID NO: 138531 - DNA, 1055 bp, Homo sapiens
ggtaggataaaggcagagtacaataagctggaatacctagaggagacatatggacatgatacgattggtgatagggaaccattaaagattcatgaaaagaggagtgatagatgagtgtggtgttgcaaggtcacctttgccaggcgtatgaagctgctgggaaaggatgtgagttattggcccctccttcagtggatagggttgggcagtagtgattcacaaactccatcaaaacccagccacatcagaaaacacaaatgatttatttttgcattagcttccagttattgtgtgccttcctgtggttcagatatacaccaccatatattgtggagggcttgtagctggggggctgtggagaatggccgcctatgtgacaggaggcaggccagtcacctctgcttagccacaggcaaaattgccatctgtgaccctggtaccttgaaaggtgtgtcttgaatggctctttgactcttcagaaacaatctgggagcccattcattctgttctcacttgcctgcttcctttaagggccgatagcaaatttctaattttactgttaggagaatattttcaatctcattttttaacctttaaattaagttgaacctttcaattaagttgaattaatatttcttcccactacctactccttactgccctcactccgtcctttattagattgcttatatttccataactgcatcgtgaccttagcacatggacttaatcattaactatcgtattcctaaagaacagcctttggactcattttttttttttttttttttttttgagacggagtctcgctctgtcgcccaggctggagtgcagtggcaggatctcggctcactgcaagctccgcctcccgggttcacgccattctcctgcctcagcctcccaagtagctgggactacaggcgcccgccactacgcccggctaattttttgtatttttagtagagaacggggtttcaccgttttagccgggatggtctcgatctcctgacctcgtgatccgcccgcctcggcctcccaaagtgctgggattacag

SEQ ID NO: 138532 - DNA, 1029 bp, Homo sapiens
tgacccacttgcatcagagtcaccatgtgtgctttttaaaaatgctgattccttccaccttgaatccattgaaggaaaaatgctaattcctgggccctatcccagaactattgagtccggatattggagtgggggacagaaatggcttggcttggaaatatgaattttaactcacccacctccaggtgatatttatgtgctctcaactttgagaaaggctactctgtaaaatggcctgaggggatttggagggtagctctgggaaattatcaacccttctctttcactcactatttgtagagcaagtgagtgggtggggagaggaaagtggggcattccaggtgtcagaaggtatttttcaaagtgcagatagttaaaggctgtctactgaaaggaaagtgaagaaaaatagagatgccagcatgctaaattagatgacacttaacactcaaacatttgttgaattaatgcctgaataattaagagttgattgggcagagacacaggaagattgtgtttaagttacagacttggcttgcatccgtgtttccttctaaagagaccaccttctccatttctgcattgtctttctttagagtgaaaatagctagtcatccccaacatatttggggttttgtggtaatttaaatatctaataggcactgcataatgccattcaatggttgtacctaaatataaccctactaatcaaaatgaggatattgtgtttaagagtctggctatatagtctctggtctgattatagtgttgagtcttttttcaaaaactgtctctatggagtaaagcagggtcctgtgtttcattgctttccagacattccccaacaagtgctgaatggattttgttgcaaaagtttctttggaagtctatttagaattcagattgcattttcccaaggacacaatattcttcttgtggttcaggttcccagaccagctggcaaaagcctatttaatgtgaagtagagtagaagtccaaccccaccagccccttaccagaatgcctaaa

SEQ ID NO: 138533 - DNA, 1760 bp, Homo sapiens
ctttcaatttgcagcgtccccagcccttttatccatctcagtgcttccctggttgggaacaaaacccaagctccagggtcagagcacatacggaggaagaaccctttttgaaaatccaagcacatgaggaattcatgtttcattgtcatcctgctttgcaattgggtcaggtacatatgtggggaggagagagtgggcttggaagaaaaaaaattggtttgttacctccacaaaagcagacattctgattttcccccagaagttccattaagaagaaagcaagtttttaagggtttaattgctaattcagggttgctttcagccattagggcatctgtatcaaggcgcctagtttgggaggtggaacagaagtttgacgtgctaacatttgggaactttctcagacaggatgtctttgttatctaatttctttccatttttcagtacctgctttcagatttctactttttctcttctgcttcctttggtttcaaatcacagaagacctatctctttgtgctcccagcttgttgtcttggttacaggcttcttcagcttgccttcctttgaggggaatatacagtgtaaagaagattttttaaaatggtgactaaggtccctttctctaaggttactgggatattaagcagtgggtagaacagtgacttgtaaacccggctgtacattgaaatcagctggagcactttaaaatactgatgcccaggccccaggcccaaccagttgagtaggcatcttgaggagtaggccccaggaatttttttttcttttatgaaacaataaactgcctacgtgagtctaatgtgcattcagtatttagaactgctgggttttacagcaaagccaaacaacttggttctggctgtttgagccaggtgaaggaaatagaatcaacttttctgtaccttagttttacctgcctagaacagagaagcactaaagcttaagaatttaaagaggcttactgtgacccccctgtcattattgttgcatacaaaagagaggtaactttctttcaaaaaaaaaaaaagaaagaaagaaagaaagaaagaaagaaaatccagttattcagctggcttggcttctgggctgtaacagtggcttgaggattaaaagaaatctttccagttgcttgaagaagggttatctgtatggaggaacagcagcttcattcccagtgtggtttggacagcgcattccaggttttcaaacctgcctcagcttccagctgactcccttctcatgccccaggtggttagcagagttaggcaccatacttatatttttagtgaaattgccttttaatagtattttcctaacataaaagcaacagatgttcatgattcaagcccggaacattataggaatatgacacatagcaaacaaaagtcccctagaagtcggtctcccagacatatccattgtaagcatgtttttccttctgatttttatctctgcatatgctaaacattttatatttttattctaaaaatgggatcattcaacaatgtttgtatttttttttccttaatatcttagccatcagtccatgttagtacatataaatcaacctcattcttaaggacccctgattcttaggattttagtcacacaagggcacaatctccttccgcttccctccaagattttgctttcctatggaaaggcttgggttttgtttgtttctttgggcttcaaatagagcaaatccattatatctggtatatttatgtttggttgtt

SEQ ID NO: 138534 - DNA, 1053 bp, Homo sapiens
actgcaccttccgccttccaggttcaagcgattctcctgcctcagcctcccgagtaggtggggctacaggcatgcaccaccatgcccagctaatttttttgtatttttagtagagacggggtttcaccatgttggccaggatggtcttgatcttttcacctcatgatctgcccaccttggcctcccaaagtgctgggattacaggcgtgagccaccatgcctggcctacatgcatcattttttaaaacagtgattaatggagtcccctttcccaattttttaatacaaaggtgtggatgggagatttgcagcaaagataggaaagcaaagatataacccacaatctttactcttgccaacagctcttaccttctttcccaccaaaattttcctttgataaaatgtcttgctgagagttaggctaactcaccaaccagctttaattttggttgacagggtgccgtagaagacctttgctagccagactgtgagcttcttgcagacaggaattatgtcctgcatcactgtgtgctcagaacctcaggaagaacaaactgatgtaggcaccaggaaataggtgcttttattacattctcattttatgccttagaagcactgcaaatggtaggtattcttatttctgttttaaacaatgagaaaactgaggcttaaggaggtgtaaaaaatactttcttttaaaaaaaatacacctctcccccaccatcataaaaaccccaactttggccatagagttcattggtggtggagcactgcaaacattagctgtcccatgtggctttgactctgacacaattggtcctcttgcttcagggaactggataccatccatccctcccatgggttggcctaggctctgttacttcagagttttcttgacgagtttcaaggtaaccaggtcatcctgttctacatatttttctgggattgaggtcaaggagcagcatgatcctctcttaaatgggtcagaggaggaggactcctgtggctccctgaaaggtcaagccccttcatgctaactacaccgtcttccct

SEQ ID NO: 138535 - DNA, 1053 bp, Homo sapiens
gcagcagaaaacagatccttgtatattgctggagggaatagcaatttaaataatttttctggagggcagtttagcattatgggtcaaaagccttcaaatggatattccctttgaagatctagactgtcttctatcaatgtgggctaaggaaatagtaaaggaactgaaaatttagatgtaatttacatgtgcaaccagaggatattggttgagtaaattattgcatatccatataattgaataaaatgaaggtattggaaaatgagatagtagaagtgtagtaattgacacaaatacgttcagggtacagcttgacataacgcgcaaggctgtcatgctggagaggtaggcaggatctagagcaaagaaggccttgtccgccatccgaagaaccttgagcttttttggtaggtagtggcaagccatggaaggatttaaaatggcagatcagaggggcattttagatagatccctcttgtagcagtgtgcctggaggcaggagaccagtaaggaaattattgcagtggtcctgaaagagatgatgagggcccaagggtatgaagtagatggagtcataggaccaactttgggcagcccagagagttaatcttccttatggtgggtaacagtcataagcacttggcctcagcgatccccagatagctatgtgccatcccaggaggtgctgacaggagaactggagcttggggagattgtgtgctaggccaaacaccactctcctgtacctctctcactctgtttccctttcatttagtttgcccatatcccttcattgcttaccctggctagcctctcatttaggatggcctgtggtcactggccctccttcccaattacatttctcatagtactaacacttgctccagtgtacaaaagctatcttctttaagtgctatgaaaatgaggattgttgaatgtaacactggggtggagcagaagtggatgggaggctgaacaatggtggcagtgaacttggggctgatatgactgggggaacaggaatgggaagcaggccaggtgttggctgagagg

SEQ ID NO: 138536 - DNA, 1018 bp, Homo sapiens
tgggtgttgcttgttagacatgcagaatttcaggggccacctgcagaccacctgcatcagaatgtgcattttaacaggactcccaaggtagcttatatggactagaccttttctgccaaggaccccaaagcatcttacagataaagcatttgagctctcgatggaggggaacatctgtgttggggagggcagggggcacagcctctgtcttaatagtcagggtgcacttggttcaacattcccctgtgagctgggatcagtaggcacaggccgctgacacaggcactgttgccctgccttctacatctcccacagtctgtgacttgcctgacttcacctggtggactgtagaatcagaactcctgacttggtctcagagttagatggggtaattccaaagaatggtaaaaataaaccaaattgggaaacttaacaaaaaacggtgaatttcccataccacagcataagtccttcctgcctcagggttgtggaacagggttggagcagaagttacttcctgcttgtggaggtaacctgctagggcagaaaagtagatccaatgctatcttatcatctctctgctcccccttgtacctgttttctcaggagactgagaagtcaggcagatagagagctgctttctcaaatttcagcagctctatcagatcccagaaaaggaaggtgcatcagaaaatctccccctaggctaatagagttagtgatcctgaattggggtgtttccagcccacaactctggccaaacagcacctgctgaggtggatagatatagttcctctagacaggccaccttcagctctctttctagtaggacctttcccccagtgaaaaccaaatatccttcttcttgcaaagccattgaacataaacagaaattttgattctcattgtagaagcatgagaatgaaggccccaaaatgctccattacatacctgaaatcagttagaaagctggtggtgaagttttcattcagtcaatattgttacacaaaaggtacat

SEQ ID NO: 138537 - DNA, 1046 bp, Homo sapiens
ttttttttcaaccacctaaaataatgccattttcttgattacaacaaaagacatatttactgttgaaaatttgtgaaatatagaaaagtataaattttaaaaaaatcatcaccaatgcaaaggtgattatttttctggacactgaaaaaaaaggtggcggctttgtgccttttgtctttatacatttatgtatcatttctttacagaagtgatatatgttcaaaacagaaaaaaatggaggccaggtgcagtggctcccacctgtaatcccagcactttgggagggcaaggcaggaggatcacttaagcacaggagtttgacacaagcctgggcaacatagcgagaccccatttcttaaagaaagtaaggaagggaggggaggggagggaaaaatagaataaaacaaatcattgagcagtaacaactattaacattgtttgttacatattctggaagtctttttgtctctttatagatgttaagagtttatagtgtagtggtcaaaagtaccaatccttgaaccagctggtccatggttttatggctggctcttctacctgcagctgtgtgaccttgggtaagatacctaaccttgctgacctaattttcttatctgtaaaatggtgcttggttgaacggagatgatgtgtggtaagcacttagcccagggcctggcgcataggagataaccaataaatgtcagatgctgttgtttttactactattactactattatcctaaacactgaggaggtgcatgcccttgttgatgttagtctttagagctttgaccccaactccctgagcttttcagtggcggtaatgtgaagggggctttgtttctgcattagccttgctgagtgagattaaaattcccaggcaggctttcctatccacattgaccaacactgcctttgtttttcacatttgtttcagtgacagcctgtttgattagggaactggccaatctgcttttctccctcctgacaggtgaattgggcccactcctttttgggttttcaaataaaatgtccagaccttttag

SEQ ID NO: 138538 - DNA, 1050 bp, Homo sapiens
catgttttttgtctgtaggggccactcaggtccttcatattccaataatacacatgggaaaccaccaaggggatatattatatactacatctcctaaatttttaaccaaactttcttagtggagcatttacaagtaccttctctacaaaagacatctaggaagatcctgatctagatcagaagaatattcattttgttcttttttttttcctgcaattgtaaagagaagtgaattggtgaaatgcatgggattgctgaaatatgggtcctgaacagcaggggaggtcaactttggactctgttgaaatgaatgcttcctgctctaaaacacttctctccctcctatcctcacagctcccctttgaattggagatttactacattcagcatgttatgctctacgtggtacccatctacctgctttggaaaggaggtaaggccagcaaaccacattcctatgtaacccccacacctaacctctcccttctgtttttgggagtcacagcctcttgggtgcttcccaggatcttcagctgccgcttgactgagtttcttcaacataatttatgccgggcaccaggaagtggggagatgggaatggacgaggcctgcaaggggtctggggactttttagacccacccttcactgggtgactatggtgctgctgactgtctgtcacagggcctgggctttgggttcttgatggtggcattgtgtttgcatggagccccccacactgtcaccttcttgtacttgtgccttccccctgcctcaatgtgcagtgtgggatagaaggagagagtaaagcactcggtcccctcaagaacaaaagaagatattgtaaggggcaagaagtccggggaccagggcaattatgggattgaggggagaggcaggtgaaagagtggtggtcacccatgtaaaataaaccactgaaaaccttcatttggtgaagagggagagaccaccaacctggtagaggcagcctggaaaggaagctgatctatttgtaacctctcagtgacccttagattatcccttccctctat

SEQ ID NO: 138539 - DNA, 1048 bp, Homo sapiens
ggaagtcctagccaaatctgcatggctgttatttaaacatatttgtactctaaggtcaccataaaaatctgtcaggtagctgggttagactggtctgacatggaaaataccaagtagccatctttcctccctccaaaagaataatccaggaagccacatcctcaagacttggctaactctaagataattgtatctccttagagcagatcctcccgatagcccagttccctaagtggcgaggtgagagatagtagggctgtaatgagagacagtatgctctgttattgctaataaccaatagataccctggtgcagtgagggtttagcttgcagcaccagtggagtgatctcaccaaactgactttttactccaggacctcaatgagagcatctaccaccccgcagaagttgatgggccccagtaccttctatctggccaactttgagctattttgagggctcatctcccatctccctttccagctctttactgccatctgctgttcacttggggggaattatgagcattgagagaaacatctggatttcttcacctttgatcccaagccttggacctaggccttgcagagggagaatggatctgaagcaagctgtcagaagattagttttctgtaaaccaagaaagccgagagtctggggcttctgttccctagaagtcgcttgtaattttgtagaaataaatggcttagcaatttttacccagtacaagacagctctcctataggtatctcccatgcccaggaaccctgttttcctgaaaggcaaggtcctgcttgagcatatagtgcctcttcctatggtttggggtgggtgggtaggtggcgccttgtgggaaacccactcatcccttattgttgcagaccttatgcactgtcacagtacatgggacctctctcatccacactgctcttttcttcctctggcctgtcccttcatttccctgtttcctttccttcaaacttgttgcctgtggccctctggaactctatttcttttttttctgtgttacagtatttttaaatttaat

SEQ ID NO: 138540 - DNA, 1044 bp, Homo sapiens
ggttctcctacttctctggttctttctccttgggctcttttgctctgcctgccccatagatcctggtgttcttcatcaatagagataacacaggcttgagaagcagtacaggtacttcaaaaataacaattagactcctcatttctgtaccccttctctcatcctgcttgtcttcctcctctgtttcctgtcttggttagtggctctactctccatccactaccaaagcaaaaaatgtaggcaacatcctagatctcttcctctgcgtcttcccatttaccaatcagttcagaagttctgacagtttaaattctcaaaattgtttgcaaatttggcccttcctcctcatcctcaccacccctgtccgactgtgggctctcagcctctgttaccaggactactttgcttcctctctcctctccctgccccctgatttcccctacctcctacccaggctatcctctatacagtctccagagtgaccattttaaggaaagaggaaatctgatctgattttgctcagctgcttaaaaatcccatccaggatgaagaccaaacttctttgcatagcattcaagaccattcacagtctgattcttgtccatctctttggcctcatttctcattgcttagactccgattctatcactttaccttctggtttttatttgttttgtttttttagagatggggtcttactatgttgtccaggctggagggcagtaatgcaatcatagctcactgcagcctggatctcctgggctcaagtgatcctcctgcctctgcttcccaagcagctgagactgcaggtacataccactgtgcccagctcattactttactttctgaataaacttatctgctgacaggtttgcccagccttccttgctttgtgtccaggctcatactatctattctacttgaaacctggcaaacttcgtgtgttcctttgcaagttagctcaagggtactacctcctctctggaggtgtctctgactttcctaggcagccaagggcatgtattccttaatgtgcctttctcc

SEQ ID NO: 138541 - DNA, 1051 bp, Homo sapiens
gtgactgggtgggatagagtatcattaactgagaagagggcgcagaaggaaggagcatgttttagagagtgtcttagtctttttggcctgctacaacaaaaatgctatcaactgagtagcttataaacaatataaatgtatttctcgcagttctggaggctgggaagtccagatcaaggtaccagaagattcagtgtctggtaagggcctgttcctcctagatggggtcttctcactgtgttctcacacgtggaaggggcaagcaggcttccttgggcatcttttataagggcactaatctcattcatgagggatccaccctcatgacctaatcagctcctaaaggctccaccgcttaataccatcacattgaccattaggtttcaacatgaatctgaggagaggaacataaacattcagaccatagcagcgaggaagatgattttacttgagtttgaggtgcttataggctatctaggttgagatgcccaggaagcattaggataaaatattctggagctgttcaggggaatctggactagacactgactttagtatcagtggttatagaactagtagatgaaaacattggaatgaatgagctggtccagggtaactatgtaggtagggataaaataggacttagagaaagccttggggaacatcaacttgcaaacagtagacagaagaagaagagtgtaaggagattgcaggaaagatcagtgatagaaggagaggctggttgtcctgaaaactaaggcagtagaaatttttcccaaagtggtattagccaagccatgttggatctaagaggtacagtaaaatcaggtcctcagagaagtgggaattacagggaagaagttaagggcattaaggaaggaggggttaagggtgttacagagccaagggagggtgtttctcctcctcctttctccccctccctttctctccttttcacctccttttccctttctctctgccccagggctgagcatgttcaaatgctaaactgaagcccagtagagccagggaacattgaaggtaccagaga

SEQ ID NO: 138542 - DNA, 1063 bp, Homo sapiens
ggctttcaaacttgagtgtgggtcaaaatcagaatctctaggagggcttcttaaaatccagcttgctgggccctacttcagagtttctgattagagtttctagtagatctagggtgaggcctggaatctggaatctgagaatttttattaataacaggttccctggttaggcagatactactattccagggaccacactttgaaaacaactgtcctagggaagttgtggaaaatgcagcttcctgggccctgccccatagagttgaatccaggaagtctgagtgggccctggaatctccactgtagtaacaagcgcttcaggatgatcctgatgcttgggtcctccaaccatataggagaaacactgacttagagggaatcctggagctggaagatgaaccaagagacctgggaaaagctgccagtgaaggggacagagtctggccaggtgtgaggagcagtgtctcctggaaggtgagaaaattaaggcagaaaacacttgacttaaccatttgctcccacaaaggactcctgagcaccaatcacttcttcctcagcagggacaatccagtggtcttcagaaactcacctacccacctgttgcacaaggctcagcccttcgccaatcagtcaaatccctcaggtcccccctcatccactaaccctttaggagcctcaggatttaccagagttcctatactttcacctgcccttacctgaccagtatagtggagcagggaagcctcatggaagaggggaacttctctaacatcctaacactagctagatgggaggggcaatgggctcaatggtatggaggagaaacaggaaactcagcctggatactgatgtcagcatgaccttggggccagtttttgagctgccattggccaaagtacttccgctttaactggtcccagaaagtaactagcacaggaggtccaatcctcatcctccagaagatgagctgaaagcccactcaagagagaggtggcctgcctagaacaaacaacactgaggttcttaaccccagtttcttgaaatgtcctccaaaaacatctga

SEQ ID NO: 138543 - DNA, 1088 bp, Homo sapiens
taggtgagtttctgaagaccactggattgtccctgctgaggaagaagtgattggtgctcaggagtcctttgtgggagcaaatggttaagtcaagtgttttctgccttaattttctcaccttccaggagacactgctcctcacacctggccagactctgtccccttcactggcagcttttcccaggtctcttggttcatcttccagctccaggattccctctaagtcagtgtttctcctatatggttggaggacccaagcatcaggatcatcctgaagcgcttgttactacagtggagattccagggcccactcagacttcctggattcaactctatggggcagggcccaggaagctgcattttccacaacttccctaggacagttgttttcaaagtgtggtccctggaatagtagtatctgcctaaccagggaacctgttattaataaaaattctcagattccagattccaggcctcaccctagatctactagaaactctaatcagaaactctgaagtagggcccagcaagctggattttaagaagccctcctagagattctgattttgacccacactcaagtttgaaagccactgctgtagcggattctgatacagaacgagttgaaaccttgttgcctcagatgatccaagagttggctcccccttgcgtaaagctcagcagagacacagctaaggtcacacagcagcttggtaagagtaggtaagagtagaagctgggacctgggtccttggacttcagtgcatattctgctaggtcaggtccacctgttggattctttgccaattcagggccctcatcctgtgtactactgtcagggggctgcctctctgatcctcatggatgaaggtgggtctttaaattgccttagccacaggctgggtggccagtcagccccaactaggctcttccagggtgaagcatggcctgggtagactctccagcctcttaggatgggaggttgacaagatggaccttccctgtgaacacttaacccaggacatcctccacttccaagtacagtaaacagaatagaggataggtttttttggtcaaatgcctggatg

SEQ ID NO: 138544 - DNA, 1324 bp, Homo sapiens
cagcagaggatctgtgcctcagctgaagactagctccggaatgtcataggggtgtgactgtgtaggccttctcctcctcctcgtttctgtggcatggcacaggttgcctggttgctcgagccttccccatgttgacatcctccacaagcttgcctttgctctgtctacagcttagtaccccattctggagggcactttctggtgcttggaaggagagaagaaagcaaaagccacatgcctggcatggccaagccagagacagatccacctgtcagaggaaggaagaagtaaagggggcatgcagggcttttgggggccagattggctcagaaacatgtaggtcaaaagaatagagggggcccagtctataggcttcacaaggagccatggcctgtatttggggcattggggagcataaggcatctgaactggtccagatctcactcttatcttgggccaagccaacgtggagagaagcaacccaaccagactcttggcagcctgccttacagggtagcccaccttatagggtagccctcatatctgccctgtgccggccctctactgccccagctttggtacaggagtgagggagaagctggagcttgcacacccagtggccagtggggctgtcttcccagctcctcctcagggctttcctgtcagtgccaagccagttccccagccaggtttccgtgtgccatttgccagcgtgtgggagctctgcgcgtgtgtgagggtgtttgtagaagagggcagtttcctttcaaatggccttaggaagggaaaagagtactccctccagcccctaggtagccttggccagggatgtgggccaagaacagtctgtggagctggccaacttgtggcatccactccaaatagcagagacccagtcacgcctgcttctggtcctccctgccctcagtatttggttttgtacaccaaagatgatctggcccatcttcctcccagaggcacaacagtaacatgttcctctgtcagcctgtgaaggcatgcagggttctgaagccacagactcagtctccccaagtcagcaatctctttctctctctctcctcaaacttcatcgcattcatagaagctgcttgcagggtcgccgggctaaccagggtgatcggcgaactttaccgtacagtacctcagtctagctgtcagatcaccccttttgctgtagcctctgttgaggtttttatatttgtgatcattggtaattcagtgtcctatgaagtgggcacagctccccacagagagcaagttgtcagcaggtctctgtgcactggtattggggcagggcagtgcc

SEQ ID NO: 138545 - DNA, 1022 bp, Homo sapiens
atttgtagatgttgacccagagtcctctgtcccctcctgaagaggattttcttactggtttctactgaaggggaggtaggggaggaggaaaaaaggaccatgtgtgatgctgttagacaagacactgacgctgattatggagggtctcctgcaggcccttgtgggctccttggcaaggccccaggctgggaaggagctccccccactgcccatcctgcccgctttgtggcgggtagagtcagtgacagggaggcagccctccttttgtgtatatagagtgagctgatttgggctcaggaaaacctagtcgcttgttgctctcgtctgtgacatttttgtacactggtttgctactcatggcaagaaacagacaaagccccatgaaaaataaaacaaaacaaaagtcatttcaaacaaagctgttgttttgaaaactcttgctttcttttggtgtccattttgtgttctattttaaagaatctttcatttatattggtgttattgtagtgaagagaatgtgataggctgatctgtaatggtttctgtcaggagcttagcaaatgcctctgcccctcttcccctacccctgtccttcctcagttcccagctgggattgctatgcactgggcagacccgtcactgtctcccctgaacccccacacagtggcttcccttagaaccagtctttgtactctccctaaacagcagcaggcttaggatttttgtcaggctggttcttgcgtgctctgtgcccccaccagtttgctcacctcttggggcattttgtaatgtgttttctctgtcttgtaaaaccttttgattgtaccgaaatggtatctgcagtcgcctttggaaataaatggtcattaatttgtgtacttagcattctgaattttagtctcaggtgtttctgttgttgaagatccttgaatgaaaaggaaccctcaccatggggcttactgttataatgtttcttcatttactgttattaaaagatttatgagaacccaggagtcctggcc

SEQ ID NO: 138546 - DNA, 1150 bp, Homo sapiens
aaaagtggaaacccgttgtgtgcctctcgatttaagggtttctgatgacattattcttaagaccagcattgatcctttatatacaaatatatgttttccttgttttttattgctatttcagaagaaaatgaaccttttattttgctctacccagtaactgcgctggtacatagacgcactgagcaaacaaacttttgtaaccacctctgactacttttgtatatcaaagttgattacttttgaaatatttggatctagtttctaagttattttagtgttttatatgttccccaaaattactttgaatctgtcaccagcataatgagttcttggtgatacaatggtgagacttgtaatgagcaaaaagctacctggagtagctcctcttttccttctttcttagtaacctgttttttgattaccgtaagacatcacagattacctgaaaccccttccagtataactaggccctccttccttccacatttaattgcttaatagtttgaagaaactattggaaatgggcattttatatgacatgtatggctttacaatattaaatatgagcaaaaagaaaaaatatgagaaggtttatgtgggtctgtaaggtatggctgtggaaagatattgtagtagttttgacactattgttattacctttaaaatcatttacccaataaaatgttaaaaccgagttatcattttatgtttcttttttaagtttaacctctctcatcataggatcttggtctcgtcggtacttcttactaaaaggttaacagttgaaggctctgaaggaatatagttaggaacagatactgatttattgccaaactagcacttgggaaaccttacctgcttgtagccactccctgccatatgatttgccaatgtcatccttttgtctatctctgaatcctggcttgctgatatagattagcctttatttggacaccctaacctggccacattgatcctttaaggatccttcagatcctttgccacagaactcaggcaaatatcagacttgaattctggcgggagcttagctgtgcttaggtccgctccaaatcagtcagtggttattgggcatttcctctttgtgagctggtgaggggcagtagcagtgctattcagttaaatcatctga

SEQ ID NO: 138547 - DNA, 3345 bp, Homo sapiens
atgagatgcatactcctgttagaaaactggggctgaggggacaataaaatttttaaaagaacaatttaaacaaggagtagtagagtgcaaagagcactggactcagacttttgatttccaagttctgatcttagctttgctacttactatctctgtgaccttgggcagtcactgcttctctctgggaccccgtttcctgatctataaaattatctttaaggtccttcctagcagtgacaatggcatgtcacctacttctcaatgttaacttttctcttccctgactttctttcaggtatcgtagtgaaaagatgaccctgagctatgctgaataccttgctcatcgccagcatcatcatttccaaaatggcattgggcatccccttccgccatacaaccattattcctgacactgagccgcacaaccagtcactgggcctctctgcagacctcttcccaggagaccctacaccttcttggtctagctatctcttttactgtaccattttatgatgatagtttccgttgccatggtgaagcttcgacatcgtcaactaagatcatcatggtaacgggtagaaaaatggcatttgttaagatcctgttttattattttagatcgttgattttttttttgcagcatatataattttgggtttttttttccttataatattatgtagaattttgctttgctgtctcagtcaggtttctgtttttctgtcctccttgcctttcttcccgttttgcttcctgttttccttcttccttcccgttttccttcttccttccctgcctcccttcctttgactgtggatggaagaaagtgtgcagtttttagggattttacttaggttcgtctttagttttcctcagtaagatagttgttttttgatacctgagtttgggattaattcatatcaaattcaggtatttgtatattactcttgatttttgtctgaaattcactttgctatgacagcctagtagttgggtcttcactccttaagtatatgtttttcccatggtgaaaatacatgaactttagttctagtagtgagcattcaaaggtccgtgatagggcttgtcacagagagagagaaatcatttatccctattgtgctggttatcatagaagagactgcctcaccactttatagaaccaatttgcaaactaaaacactgtttggagaaggtacaaactacctttcaaaaaggctacaggaaacattttatgagcagcaaatattaggaagagagcagatacagaatttagtgcctttgagaagaatataattaagtggaattaagaggggttagaaaaaaggcaatttagaaaaatattcttgtaaaactttattgtttctatatgtgaaacagaagattagacaaattccttactcttaagtatttttttaagctgaaaaaaaattattttgagcaaataaccaataagagacatttgtctattttatattaatttaaatttgttagctctaggtttcaataagtcatgattggctagaatccattttagctaccatctaaagatatggtaaagataatttagtaaaacaaaagttcatatttgccatgatttcagatatgtttgtcatggggacaatattagagttttagagatactataaaatagcttgaatttctttctgcactacatacttttgatagaaacacatttactacattgataagatgttatgtcacacctgtgaaaatggagttggcattcagatatgctatagttagagcccagctcatctgcaagtatagtcttcccatgatgcatacaaagataacttactgatgtcgataggaggtccatacatatatccccaggaaaaatgacagattattctggaggaagatgaccttcattttatggttatgtgtgtgtgtctgtgtgtctttggaaaaatatatataattttttcaaataggaagccaacatatcaagtgatgaattaaagtatgctgcagaatatatattctaaaactacaaaaaagtcactgaatatcaaaatgatacagcttatacatatagttactgtgacaagtgacagactgctagttcagaattcaaaaatcctttcctagtttgtgagataatgggctaaattccttctgcctgccactggggcaaagcaaattgctttagtttttgatgagagttcttagaagtttgttggtattccttcatccacagcatccattgttgaaataaccattttcagttgtgatgccttaactaagaagccaattgttagcctgaaatgcaatcttggtagccagtttcaatgaagctagagattagtcagaaaaagttagctgttgggctttagaaagggattttgagtcctgtcatttctacttgggagcattttggagcagattagtctttcagtataaaaacaagtggctacctgatggaaacttttcttacccttatagggaaactgagcacaagctgaatgatattgtctgctgcaaaaaaaaacaaacaaaaaaaaaacaaaacaaaaaacaaaaaaaaggaaaaaaaggtaaataaaacaagcaaactgaagagagacaaaatagaccaatattatcgtgaaatccatcttatccatcatctcatcggttcaacaggctcctcgtcctgggtgagcttatggttagaagtttttttagcaaagatttattacatacatagatgtgtgtgtgtacatatacttacacatacatacatacatatatgtgtgtttatttaacggtgctaatcaatcttgagcaggtcacgtgactggtcatgcggactctaaaatcatatcagattttttaaaatccttgatatatgcagatgttatacagattttcttagcagtgtaataacgttaaactgaagaaataaccatcctgcaggcttcaaaggacgaggtcagcaatatttcccaacatggcttgggggaaaaggatagttttgtctccttttgtattcaagtaatgcaaagtgcatttttgtctctaagtagcttttgactaaaagactttgtagtgtaaagggtgttatacaaactgtaatggtgtgcttcaaacaaatgctagaccctttcacctttgtcgtatatacaaagctgttaattatgtggtatgaattaactttgaacatgttgaaatatgtagcatgtctttaactcagacgaagattctgattgcacaggttgtgttctagccagttgtgatttatttgttcagaaacacaaatgtgaattgcactcttatcatcagaatattgtatgagttcagtgatctttaaacagctcagaagtaatacttgaacttcat

SEQ ID NO: 138548 - DNA, 2584 bp, Homo sapiens
tgtgtttgcttgcctacgtataatttaatgttttaaacggagtagacagtttgggaggggatcagcaccaaaaattttggaacttaatcagaagtggtgagtgtacctgcaaaacaggatggttgtttgctatctctttgaagtcagtcacctttgtctctagttctttattggcatgagctacaatttgggagtggggcaggatttttgccatcaaccgtcttattctacagacagcttcagaatagttgttccagttttccaaacatagtatcatagcctagtgcatgttgggcacatgcaaatcaatattttccctctccgtggccatcataatggccttcaaatccaaagtcaaagctttggaaagagaaaacttatacgtccttctaaaaacaaagggaaaggaagaactgcattctcttgaaagttaaattataaccttttctttctgattctatgaagaagactgtactaataaaactgccaatttctttcaggtgggtgtacatggcattagaatagaattcatcaatgaaaaaggatcaaaacgcaccgccacctacctaccggaggttgcaaaggagcaaggtcattgttgtactttatttcatatgatctggtgaagaatttaaacaaatatacaaactgaaatgcgttatctgaccttgcagttatgtctaataattgaagtgtcaaattataagaagtgactcttccatcactgccactgcaatgtctgtatcaagtcggtgaagtactcacagaagttgaatccctgcattgaagtttgatggcataaacccataagtgtatattttttaaaaagcagaatttatattagttggttttcattttaggcaacaatttgctaccgatttgaaatgcatttttcccatattccattgtggcataaacaagccttttgtttgacaatcagccacatagttctttgtcattttaagtatcaaatgtttcattcttaggtggttgccattactcatcctgctgatactaagattctaggtttcccactaagatcagaggattgcgaaaacatgaagtgttagtgttttatatgcttggtctacacttcctaatcagaattttcctgtttcacacatagagcatagacctgtatgaaccaacattgtaacacaaagtaacttttcactctgtagtattttatcctttcttagcaactactaaattctggtttcatgttggtcgaaatgaatcttttatcttggggagcttttcttctcatcagaaagcatttgtaatttggttttcccgtgtttgtcttataaatgtgagatacataatagcaaaattaatgccattaaatccccagatcagaaagtcttcaaggcagttacttgaagatttatttgggttgctttagaaaatgtcttaatctcctagtatcattaactttgtaaagcatacataaaagatagagggcctcagatactagtataccatccatgtcagaactaatcaaaatacccttgaatactgcacacaaacttgaatgattacagaattacagaagataccataaggaacaacaattactgtgaggtggtgtgggagtcctaaatattgacttggcaaaatggcatataggcttttcactcccttttaaagatgtcactgttagaggaaagtacaacagatatggtttgttacagtcatgactgagcaatttctgccagccccttagaccccttgacttcgaatgcgaagataaaggagccagtgttgtttggcattgtggatagctagaatttaaggagtgtggtgatgaccctgcttttgtaaaggatgaaatcttagcttttctgtgtgattgtttttaggaccaaaagatttgatggcatttggtgacagtgatagctgacctctacaaagtcattttgtatttaatgaaaggtgtttgttacatgtgcttgactgatattttatctggtcatctctctacaggatgggaccatatacagaccatagactccttattgaggaaaggaggatacaaagctccgattactaatgaattcaggaaaaccataaaactgaccaggtacagaagacattttctagcacaaggctaacctgtacattttgatgtgtatgcctataaccctttgatttctttggtctctctaactacacttcttttttctgaaacagagtggaaatgaatggcagggtcatactgagggtggatacaatggaactctgcttcgtagtaaagcctgtgtgatgtatgagcctatctttcccatctttagctctgtgtgattactctggcttttgtacgagcaagcccttggagattttagactactttattggagaaagtacttgaattagcaattggctagcttttgacattactgagcagaaccccaggattctgataaacagtcctcaaattcgaatttaatctcagaattttggcagtgatagaagtctaccaagaaaacttgttagcttgctgaaaaacacaattgagctaaactcaaatgctaaataaatttcagcatgaaaaaatagggatgcttatttaaaaaggaaaata

SEQ ID NO: 138549 - DNA, 1076 bp, Homo sapiens
tagaattaggagaatggtaataatgttcttaacaaaatcatagtagctttctttctgttacctcttgagcaacagcattttctttactcctagaaccacaagccactaaatagtcatactgaacaatcaaaacaggagaaggagaacatggcctgctgtggagaatgaccaattctggccaacctgtggaaatcactggctttgcaatgaaatgagcaccaaaactaattccatattgtttcagggaggcatctgtcacagctacaactccaaaatgtaaccctcatgcataattgaatcttcccttatacatattggagaatcctctggcccagcaacatcccaagagacaaaggctatagttgcaattataaactagataaaagatcagcgaaccagggaactgggattccccgaagcagatctttaaaacactaccacggtaactttctacgtatggatgagggggcagcatgtgggaatactatgtcactaaacatacccctaactaatcctgccactgtttgaagtacagccaggtgggtacaaactggaaacttgcaaatctagccttatgggtctgcaggtcattttcaaaattactagatggtctatgaaaaaaatgctttcgaggtccatcagttgcgataatattcttttaatcaagactacttttgctaagcaaagctaaaaatcaaccccaatggtagtaaattaaatgtaggacttatagataagaggatatggaattaagcagagctgtatctgtgtgtgctgatagaacattaagaccagttcaacggattcatatttcatgctaaaaagaaagccatatttattctgaaccattccatagcaagtgatttttattaatgctattatacaatcttttgtttttaacattgttcagaatgattaaatatcaagattaatgttaagaccctaaaatatatcttgattattctggggttgattatccagtttagggattatgcatccccagctccacctggcctcagccccatcctctttcgtctcttgtccatttctctattttttcactcctctatcagata

SEQ ID NO: 138550 - DNA, 1010 bp, Homo sapiens
gaccagttcctatacctgtctttattttcaaatatcctttgagatgcgtttagaagcagaataccagaaacatgaatcaaaaaggataattgattacaaagtcatcacctgagcatgactaaccttttaacgtactctactataaaacctctgcttcatcatctgtctcagctgaagtttttctttttttctcagttgttactttatgaaaaaggtccccttgaccaaaatacatatgtgttgctcttctttaaaatccctgcagattagtcacctttggcttagatattagttcagtctccatgaaccaattcttggcttttacagagcttaccaaaggactaattagggccaattttgatttatgtaggagacagactacttgtctatcaggaacaaaagcctgccaacttatttcacaaaagccactgaacaacgatctggtaacatttattttaatagctgacacacagctttaaaatacctgatctctctaatagtcaccatgaaattttagtaaaattttaaataaagtatggctaatgaagaggtgctttgaaaaactctgaagccaaacatgtttatatatcttttgcaatgaaggaaattgatcttactctaagattttgcagagaacaagtgacagctcagagtgcaattaaggggaaaaaacccccaattctctgtaatgattaattataatgagcatcccataaaaacttaacatcctaaagcttcccaagaaatgttcaggcagcacaggtgacctttaaataaaaagcgtgctttctatcaaagttagaaaaatgcattccttccatttcttaaaaaagggaataagggagtgaatttacagacaagaaaactaaagttataaaattttctcaaaacctagagatgtgacttagtttactttccaaaggctagtggggacagggtgggcggggggaagaaatcacctcctagcaaacatgcctaatatgaaataatgctgtttgcctaataagaaa

SEQ ID NO: 138551 - DNA, 1031 bp, Homo sapiens
ccagggacagatttttggcatcatacaataactgtgctggccagccccacccagcatgggttgattccatgtacgtattgtgtgctccaatggaacagtctgtcttgggaccacaatgtattgcccaggtgacagctgtatagaaaaagtgagataccagtgatccaggtagccagatataggagaaagtgactaatggtttgtgaaaatgtcattaatcttttgaaatctgatctaaggagttactttagaatacagagaatatttttacttcatgccttcaagtgatcttgtctctaaagcacagaagtaaaagacgcttgattacaatttagaaaatattttgacttctgtcagcaaattgctacattagcttccacaaaatcactggtaacatacttgctatacgaattcttctacaaacaaaaagtttattcatttatatcatcctgaaaatgagcacctatgaggtgacacacatagaatcacccctcaagtcaagctccagtccattgtaatgtctggttttatatcctttcagatttttaaaaaggaaacatggctcccaaacagtttaactctacaagttccaggctatgtcattttggcaggctccaacatgctgcatgagtttttctttctttacaaagcaccatgtctgtcaatcaccctgtcattcagaattaagaaaatgatgtcaactgaagaacacagaacaatggtgatgagtttccgtgttcaaacacaaagcatatcatgtcagatttatctaggggagcaattttcctcatttaacaaccattttagccttgcaggtagacattccaatttatcagctaatgaaatttttcctcaaattattcactcttcatccttctcatacctactaggacaataagtacatcatgatgtgggcaatgatcagttattcttggaagggtggggccactgctctaatttgtccttactgccttttgtggatggctgttatttttaatgactgcccagattccttcagaggctacccataa

SEQ ID NO: 138552 - DNA, 1967 bp, Homo sapiens
tatatatataattttactgccaccagcactagatccagaaatcttcctacaagtttccactagtctagtttttattcttctcaaaagcaaaataaaacattcttagattctacaagtagcagggaaagacatcaggaaatggctgtacaggaaatgtaattgatgattctctctttacaattgaagtggtcacaagattggctagcaaacacaatctattaaatgaaaaaaaaggtgacttctaaaatctttggggaatttgaatacatttgaagcttgttggtacctttgacatcttactgattctttttgaaactcttacctttttcaaacaattgtttgcatttgaaattgggaactttcatatccagtgattgctttaatatttgctttgtttttaacagtgcccttaaagatagccgttttcccccaatgacaagggatgagctgccacggcttttctgctcagtgtctctgctcactaactttgaagatgtctgtgattatttggactgggaggtaagattatagaaaaatttttaaagaaaaatgaaggtaactcttgaggagatgttaaaaattaggcccagaaaataactctttcagcccattctctattgtaatggaggtcgagagtaatatggatgaataaacctcacaactgaacgagatataagtaaatgagttttttaaaggacaaagtgccacgtgttgttataatccccaaactgaatttggttttcatttttctcctactacctcaccaaagcacctcataaaagctgttaataagtaataagaaggactgactggaatttatttctcctcttactttcattctggtgcactctggtataaccgccactaagtaactagttggtcagaggatacatctcagaaacaagaagaaatatttaggataatacaccatttgggggaatcagcttgtgataacaacaaggtattgattaactagagttaaataatgtgaattcattcttggctaccttagtttatacacttaaacactctaacaaataatactaaggttatttctagggtatctctgtgcattgctattgttagagtagcttatattgatcatatttttattcttctttagtacatggggttggctaacattgttagtgaagttcaaaggttctcaccatgatttgctttggtggctgggaggagatgttgagtgtaggtctattgggtctatgaaattttacacacaagcatgcccatattactgaatgcctgttttattccaggcaatgtgctccatgtataaaagtggtaagatttggttcccaccatgaagcatgtcataatttagtggcgagtaaatgtgtatagaaagtatgaagaaataagtgctatgagaatgaaacaatgggaactcagtgataaacataacattctctctcacacatacactcataaatggcattattgtatccttatgacagattttaattcttctgctgttttagaaggaccatcccccatagtaactgaactattctgccttggagacagatcactgtcttcacagtttattagacttgaatttaattttggctttgccctgattccttgtgagactttgaacaatttacttactccactgcaattcagttttccaatatacagaataagacatttataaggttcttcatttgaaaaaaaactctatgatataaattattgttgttataccagagctatttaaaaagttttagggggtggggtgaaaaaaaacttttctacagagagtacaatgctagagtcccctctgggttttgtgctaagattttctggagcattatcagaatatgaacacatcttaggatttttgcaaaggaagaaataaaataaatttatactgttgttcctaccaaagttggaatgtagaaaaccttttgtaaacttgaaatttctgatttattatttgctataag

SEQ ID NO: 138553 - DNA, 1150 bp, Homo sapiens
agtttaaaagattctttcctccaaagataccatatagtgataaaaattaaagtaattccatttaaatgaatgtgaggccaattacagaggccataagaacagacatgcagttatacttaccatagagaaatatgccatttaaaagcacacagatcaaggaatgattcaataaacattgattgattggttaggcagctaggctttggggatgaggtattctacttttcttcctgatcccccttgtgcttgtcaagtttgaaagaaacaggcagtggatcatgttcttttctctgtcactatcacccatccactccacgaaagttagaatagaacattaaaacctgtacagaagggaatgggtcatcttgacccaatagcagagtatgagaacatgaggccgccttgcatactggcttgtcagacttggcctcgccagcactaggtagcagtgaaggcagctgccgtatgcctttgtctttgtggtcctcttctcttcctccacccccattctgttctttcatgtccttcttgtgaccttttactattctttcttccttaccttactagagtagaaaagaggagcgcatacaaaaggtggggaaaaggaagaagagaaaggaaaataaagattaaaaactttacaatgaggtagtggggaaggttgggctcctctctttctctttctccttctcagtatgacggacttgataattttactttgtacctcatctttaagtttgacttcattcttttctttagttacctttagtccccgatcagtgacatatgcagaaaattataaacaggccgcatgataggaaccagtatcctgcctctcagcagacttgtatcatctaggactggcagtagttttagaaaggacagctgaaccagcctgacatgacacataagttagagtgacaacacatgttttgcagtttatagagttcaattaatagatttgattgccatggaaagagggaaggaaaagaattgcatgactcgtgtactgagtatgagagagcttattcatacaggttggaaaagcaaaattaaaaaatcagaaacaggcccaccagcctagatatgtccaaaactagtactttggtaacctattatgacttccagcagattaagtttcaaactgtgg

SEQ ID NO: 138554 - DNA, 1042 bp, Homo sapiens
ttttcacatctttgcatcccctaagtagctatgagggattaggcatagagcaaaataaatgtttgaataggagagtcatttcccctagtatactgaggtatttgtttactagctgggtaagataattaaagaaagtgttaggagccacagcctatgcaaaggaagtgagaaatgaagattaaagcatctctgaaagtataagtcataggaaaataaaattaatttgcaaaggtgatttacttttatttttaggaatggtgagatgtatctgcattttgttttctatttatagttttaaatcaaggaaatttttactcacttgttttataactggatcagttttcatttaataaaggataggaacactcaattcttatgggatatttagatattctaatcacacctattaagttgtgctattataaaaatgaaacagttgaaatacaagtttaagatgtgctcccatggaagaatctatatgtactaattgtacaaatgagatgagaaacagaaatagcctggggaaaagaaatggggatgctatttaacatcctatatattacttctagcagacaattgcaatttacaatcactttataagaagaggtgccatgagggctgcttattaaaattgttttatgaaggacattttattcacagtagcactactgtccatatattatttttaaatccctacgagagagatggtcatttttgtgaagtttcggttgtagttcctggtcctacaaaggtttagtgagtgagtgatggcttgtcagaaatgatctttctgtgatggctgaaaactttgggaggaccaaagtttcaggtgagcaatcctaggtcatagcttcacatcctgccatttattatctagttaattatgcttgattctgcttgatacaaaaataaaatttgcattcaacaaacaaaacagtacctcacctctttttcacaaagaagaagatttgggctagagattgggagattttgtatttagcaaatttttaaaagtccttttgagatgtgtcttctaagggct

SEQ ID NO: 138555 - DNA, 1002 bp, Homo sapiens
ttgtacagtcataattcattaaaatgacttcattttaacatgtaccgatgtagactaatattgtaagttctgatttaaagaatggtgacaaaatggcgcatgtaatacttttgcaagtgttggggaggtcggtatgttttgaaaagagtaatttaacttttgggtgctaggaaatgggttatctcaaagaccattgctggcaatgggcaggcctggtaatactggcacagagcattaatcatacaccttattaacggtgaggtgaataactttgaaataaagttttagggaagaaaagagactacccaaaacttagctatctcatgaacagttgatactaattataataataattgctttgaatctaaaagaaaaaagaatatttttagatgttaatttttcttcacaaactctttgaagagtgtcaatgtgacattagagaaaaggtctttggagtggcagtagaactgacaacacaggttggacttcagcaggcctgaaaatggtatggccaaaaggggagatttctttctgcctctaataaagagtagtggctaggaataggagtcatctcagatgatactggatttcagctgaagcaactcttaaatatttcagtggtaaaaggatgactatgttaaattcatgggtttgtaaatacatgttataaaatgtaattgttctttttaaaagcacatatttttttaaaagcctacattttaaagttgtcatctattgtgtattgagatgttcctgtgcctcacagatcagctcactaaggtgtggtagctattgtctaaaaatatgtaccctctcatactgttgcagcttcctcttcataggctttattattgcccagagcagcacatttaccccattagccaaaatggcacaaacaacgcccattggcatgactgaactctccttagttggtgtcaatccttatatctgagataagaagctttcctgtgtctacctttctcacctagagtaaaagccaaa

SEQ ID NO: 138556 - DNA, 1026 bp, Homo sapiens
tacacagggagtttaccaaacattagctagaaccaagttggattatagctctgatgcttggcaaatgaagaaaattaaaagttatagtttagatttcactttcctcttgtcttgttaaagtgaattcatattttgttttagtacagtaaactgatatctgtctcctttcctgagagtcattgtctgcgatagtcttcattttttcagatgaatgactgaaatggtaaagctaagttagaacacaaatattgtatgaaattattacattggatgtggcctaaaattatactatagacattaaaaatatatttcttttgtctgaatatttacataataaatgttgggcttacttataagtgtctaaagtatttgagtcattaggacctgaatgaacaggaggacagatttgtatcttagtgttctggaagaataagatggttatgctttgatgtaactaaaggtgattatcatgcaaatcctatgcttttaccacttttaaggggacaatgttaggaatttgagtactttaaaataattgaaagttgaggttttggtgtagcaattgaatattaaaattttagttatgatcttatgagcatgagaaatactttttaaaagtagaaggcaaaagaaatgaagcccttctctgtgatctttcccattctctcaaacttcaaactgccttaaatgtggttatccaaagtagtagtccttggaaaaaacttacttttcatcattgataacaatttgttgatctttaaatgctaaacacttattgcatcgtaagtcctttatcttgcatcataaatatatttttcttagaaacaactctagtttttcttacattctctctcaatttttaaataaagagcaaactttcaacataaaagtcctgtcctaaagaactacattatctgatctacttcttgttaacaaaagaaataaatatatctatatttatataacaaaatagacatggacaaattgtaacatttaaaaaattttctattggaatagaatatcata

SEQ ID NO: 138557 - DNA, 1075 bp, Homo sapiens
gtacatattaaattacacatttaatactaatcaatggcaatttattgtacatttcccaaaataagttgttatgaggaacactggttcctttgcgctacctgaagaaaagaattctgtgaccaaataagtttgggaaacactggttaaaaaatgtaaacaactctgctcactgtaggacttctcagaaccttttatgttaatagtgttatgtatatctaagagagagaaatagaatgtagcattttccaggcttatttgactacaggacccttttatcctcccaccccaaagtctgagtgttccaaggaaaacatttttggaaacacaagtctgttttcaaaacagaatattactttatatttgggtagtaagagttggtattatagaaaccctttgtgctttctagtgaaattgtagcagaaatcccattatcaaacattatataccttagaaatctttcgtagtggtcattgtggtagcaattgggttttgtttaaagaaaaaaataaattcttttgccaatgttggcaaggggtgaaaacatccaacttttctggacttgtccatttatatcctagggtaatgaccagaagaattacagtataattttctgacaataatgtgattctgaatgaattgttcaaatacttgaagttggaaatttgcctacatttgtataccttgttaccctcattgcaatctatagctcttcctgtttacttttcatcttttttctcatgtttctatacagcttcctcaaattgtatatatcacattaaagaggcgtgtgtgtgtgcgtgtgtatacatatgtttgtgtgtgtatacacacatgcacatacctggttttacttctcatttttgtttggcttaatttcttttgtataacaagatattaacaatcatactatttggaaaagatgaacaaaagaaaacaagtcttacaaaatacaattaatcttttttcctggattcattttagcatcaaaagttgtaaggagtcatttttaaaagttggaatataatatttttctgttcagtagtgtgcttatcatttttacgtattatgttattat

SEQ ID NO: 138558 - DNA, 1063 bp, Homo sapiens
cattggtttttatcccggattttccaaattagacttacaaataagtcagtaatttgaggtttaaatgagtaattacacagttagccataatggttaaggctctatagttaagattgcccaggtttgagtgcctgcttcattatgtatcaactgtgagactccctcatctgtaaataggaatgttagtatcagcctcctagaattgttgatgaagactaacataattagtttgtttaaaacatttattgagatagcaaacatataggatacactcaatataatgtagtagtagtataatataacttttgctaaatgtagtcctattgggctggcctgtgagccccttgaaggcctgtcttttggtctttatatctcaggcacctaacctagcagacagtcaatactcaataaatacttgcttgaattgaattgatttatttaccctatttttatcttccattacagcccactgtttgtaacatggaagattggtcgagacaaaagattacgtggatgcataggtactttttctgccatgaatttgcattcaggactcagggagtacacacttaccaggtgaagaccaatttttgttacctctgcttttacattaaaaaaaaaaacttatgaaacttgaatctgatactttaactccttttactgaattgtcaacgttcttgtcttccttcatgtcaggtttttcctttgtctttaaccatttaccttttctctggtaaaatgttattgatatatattaccataatataaaatactgtgattaatgtattctgccatcgatgttttgaagtgttttttttttcttccagtggccagcttattttgtataacttgaaaaccaatgaccaaatgtccacgggttaccaaaatatgtgatttctatagtaacagtcattatttcttccctcttgtgttttttaaaaatagttgttgtctctttcatcttacacattttgttacacttttaaggacttttgaaattgaaaggagagcctaggaagaaagtgatgccacagcctagcagtataatcattcacattcacac

SEQ ID NO: 138559 - DNA, 1033 bp, Homo sapiens
tccctctgtgttgcgtgaagaaaaaaatttgttcctatttttagataatatgtgttgaatgttctcgtagtcattgccctgtacaacgtggttatcacacacaagatacaatgtcttgtgctcagggatgtttattacgtttctgtctactttaaaatgcttaacttcccggattcttatccccattaaatgttgcttttaggtattttagttgtttttaattccatacacgtgtactttataaaatatgttggatgagcatttgtaatgagaaattagagtcccagatttttaatgaatagttttgttctgtctactaaaagtctgacttcttccatcttcaggcatctgtcctaaacacagtgaggttgtggagtagcactccctcccatctttgacacagatacttccccgcaatcccaactcccaaagtggatgttgcctggggtaggtaaggatcagggagagtatagatcattctgtatctgctctacgtcttatgaaggctcttgagaacacatagtccacagtgcttcaaattcaaagaaatgttaaatctgaaagagcccatagcaagttatcaagactatcagactacttcctgtttcctgaatgtgctgtgcacttttacatgtccatgcccttgcttgttttggagcatctttgctcctcaggctgccttgtaaaatgcagcttgtcctccagcaacttaagctctgaattaatcattctgtcatcagtgatagcatggcattataagaaactattaatatataatttctcccatcttatgtttgagtgccctacaacgtatttcatagtatagtgtttagtttgtgttatttttctactttaagttttaaatgtttacttgagcagatagggttatattatagtaagaatggtgtatgtatatatttcctgggataaataagaaagtagaaggtaaaacacttaaatgactttcatttctagcgtttttgataggaaatgaattcactcacacttttaggtttctcatggaagtcattga

SEQ ID NO: 138560 - DNA, 1051 bp, Homo sapiens
aggaggaaagctactcagagacatagctccagaaatctgcatagatgttccccttatctctggctgaatatgaatctgtgcatgtatcaagggcaacactgtgaggctgggcagaaaacaactgctcaggagctataagctgaaaacttaccagagctcatacagacctgagagatatatgagttcctacagcaagagttgtgagcccttgttgaacacccagggcattccagagagactccagaagggtcatactttagtagtaaaggctacattaaagtaaaggactttaaataattatccacaaataatttaactgcatgacaaaatgaacttcaacagtctttgaagagaggacagcaaattccaaacactcaacaatataatgattataatatctggcatacaaaaaattactagacatttcaagagggaatacaatgtgacccataaccagaaggaagccaatccgtagaaacagaaccagaaatgatggttatagaattagcagacaaggactttaaaacagctattaaaatgtgttgaaggattgaaaggaaaacatgaatatagtgagtaaagaagtgaaagacatataaagaaccaaatggaacttctggagctgaaaagtatactataaaaaatgaaaaattcattgaagaaataaatagcaaattagatgctgcagaggaaaatatcaatgaatttgtatccataacaatagaaattatccaatctgaaacagaatagaaaaaatggaaggaaaaaagcctcagtgaactgtgagacaatatcaagcagattaacctacttgcaactggagtcccataaggaaaggagagagagaaataggcagaaaaaaaattgaagaaataatggctagaaattttccaaatatgatgaaaatgtaaatccataaatctaagaagctcaatgtatccaaaacagaaaaaccacactaaagcaattataattttttaattatttatttatttatttatttttgagacggagtttcactcttgttgcccaggctggaatgcaatggcac

SEQ ID NO: 138561 - DNA, 1543 bp, Homo sapiens
atttaatgccaagaaggagtgtgagaagtagtccctgtgggaaattgtgttttctttggtctttggttctacagctatgtagaaattctggattgagtatgaagtttatttatacatgtacatgtacatttatctgtgggatttatctaagaagcagtggtttggggtattgttcttgctggtgaaagaagtggactgggtggaactctagagaaaaatttgcttttagggataaacatgttcaatagctcaggtggcaaattttgctttcttgtattgatgtgataagctgagtgggtcactgccatttccagaccatatacaccacctttggctgatttgtcttctgtcatgtacctagcagttcagctggaggctttttaaaccaaagtatttaaatatacataggaagttgttgtactggtgcttattggtggctactgtgttctttcttatcttcctagggagtgtggtccttttgtttagcttctgtttcatttgtttacaaagttataggctttgaagtaggcagttatatataggattgcctaaagagacgtggaaagtgagaagtctgctttataagtaagcaattatccttatttcactgccttattacctcagtttctcagccagtgtctttcatgaatttggcttttctcataggcttgacattggcttacttactgctatcctaatttttttgtggaaacttacttagttttgtgtctcccagattagatactagctcagtttactttctgaacatttaactatcaaagctttgcctgatgtgttagtgaggaatttttaaaaaataatttttgataatttaatgatacacatcacattattttttctatttgttccatcataaaagaaattttcatatctggtttccttaatgtagggttcctggccttaggtgactgtccttctatagatatggcattgttattacaagatttgtactggtaagactatgataaatttagtgttttctaggacagtagtgaggtaaatagctgtgctgtaagattgtttaaatcatcatagctgaaaaaataggcctttaaaaatagcgataacagaatacacatacattagacataatgcatgactattaatgacttcctcaagatcttttaggagttatgaataaggtcattcagattgcactttttttaaactcatggagagagtataagaggagtgagctatttttggcatgggcttaaagaaggaaatatcagtgtgactggtaactgacatgtttgtcaagttcagtttctacctgagtgctttaatttcttttaaatttcattactttggactttagagttctcagtatgaaattttttaagagtgacttgtctaacctttgggttctgagtagtgtgttgcccctgaaattggttgagtcattttatattcttctaagagttcaccacctgtcaaagctgaagagatctgtcccttttgccctttatttcctgaaccatttttctttttttattattattatactttaagttctagggta

SEQ ID NO: 138562 - DNA, 1548 bp, Homo sapiens
aaaaatgataatctcagagtatccctacttcttcaaggtatccaagaaaggaaattaacaattttgggcgtctacctagtagaggtctcattgacccaaaatgatgatagcattaataattatacctttattgacagaattataatacttagcagtttccaggaactttttaatggatagcgtccttggattcctgtagcagttcatcaagtaggcagtccccatcttgcatatctgtgtccaaggatgaagggaataggatgattccttcatggtcttttgactgatggatagtggagctgagctttgggcctaagtcttctgacacccctcctttccctgccctattccagcacttttatccaactatgccacatttttttttttaatctgaggttctggtacatgatttctcaaattactagaattctaagacaaaatgtttcttaggtttcacctcattttatctctgagatgtttatgttcctaagagatagttcttacgtgtgggagttttaaactctacctagaggtcagagaaagctgtttatgcctttgatgtaaattttgtgcaccatacttagactatactacacattccaaaacagtatttcttgggcctagacttgtaacaaaactctctagtgtgatgtattctcattcactcttttatattaacctattttattctttcagcaaacatatttagcccttactatgtgtcaggggataggaataggaccgtgcaaaaagacaacctctgttttcttggagcttacgctgtagtggataggaaataagcaaatgggtagtgatgtgtactgtgaagaaaaataaagcacttttaaattttcgcccaagccatgagattactaaattgtggtatctatcagtgaccccttgtagaccttatagaccttctaaaaagttagttattgagaagatggcccaggaaaggaacattgtctctgacatccctgtgcagtttctaccttcttttccattatttgaactaagatcttgctttcttgtatggttgtgagcaaccctgatcgagtggagtgtaagggcatggccaaacaaagacagattggagaggaagcctgttaggaataaagcaccttcggagaaacagtctcacaacaaatactgttagagttgtatttgtcatttatcctttaaatgtaatgtgttgccttatagagtgtcacatcaagaacactgaaaagagatgtatttcaaaatatgtatttagctatacaatggttaacaaaacacagcataaaaagcagcctccttaaatgcttctagttttatggtgtactactgtagaatgagttctttttgactgaagtgttttaaaagttttgaagaaccagggagtctgcaagttggaaagaagccattcttaccatgaggcaaatatacttgagtttaatttttaaactataactgctgtttgaccttaaattaagacagtctgttttcattgtggtgttttactggtttaacaatgagaacatttaaagcagctgccaccaattaaaa

SEQ ID NO: 138563 - DNA, 1298 bp, Homo sapiens
gaactatcatgatttcttgccttcagagttttagttctgaagtttgatgccttactctttttttcccccctctggttctgtcctaccatgacttaaccagcttttcctttgaatccctcctgcctctggagccatttccttgctgtctagtttcattttattttttatttttatttttatttttgagacagagtctcactctgtcacccaggctggagtgcagtggcaagatctcagctcaccgcaaccgccgcctcctgggttcatgcgattgattctcctgcctcagcctcctgagtagctgggattacaggcctgtgccaccacgcccagctaatttttgtatttttagtagagatggggtttcaccatgttggtcaggctggtctcaaactcctgacttcaagtgatccaccctcctcggcctcccaaagtattgggattacaggtgtgagccactgcacccagcctcattttattttaattaaatattttctctggtattctgttcctttggaggaaaagagacccttaccaggtgctacggtatgaatatttgtgacctcccaccagatttatatgttgaattctaatctccaagatgatgctattaggaggtggggttatttgggaggtgattagatcacaaaggtggggccctcatgaatgggattggtgcccttttataaaagaggcccaagggagctcattcatccttcccactgtgtgagacacagcaagatgttgttgtttatgaggaatgggcccgcatcagacactgagtctgctggctccttaatcttggacttcctggcctccagaactatgagaaataaatttgttatttgtgagctacccattttatggtattgtaaatagtccaaacagactaagacaacagatatttctctaggtattttcaggcagagcatttcacttggcctaggtgtatgtatttttggatagcagacttccttagtcttctctcaataaattcctgaaccagagaaggggaatatgagtaattgacttttctggttgccaaagatgtctttagtttacatgaaaaatgttttgaacagttatccagtgcatgcttaaatgggctgtctcttataacacatctgcacatacaggccagatttaactaccttacccagattgaaaatttccttttccttgtggactcagaagtttcttcctgctagtctggttcctgatggtatacagtggataaacattttttttttgttaacccatatatcaaccataagaatgactgaaataaaaaaggaaat

SEQ ID NO: 138564 - DNA, 1073 bp, Homo sapiens
aagaatgctgtaacatgcaggatgttttcttgagcgttttcatgattaaagattaatttcttcctgaatttggcttgatagatttgtattgaagagcactgtcaactaccatttgagtgccatctgtgtatttgacagtatactgtggactaataggaatttaacgaataaaatagtgcatttttggtttggcaggatttcttacagagataaataggctgggcacatttgccttgtaggtatgtgtgtttatgtacatatatgtttcatatcaacgttggcctgtaaacttccagtataaatagaataatttaccaacttgttcttccactgggacataatgtaagtaaactatcttttctagctaactaagcaggtggctatttctatgactagtatgtttcaaattttaatatacattgatgtaattaaattttgtgtgtgtctatgagtataatcatctctcattatctctgcttctgtgggggatcctaatgtaaatagtgtaaaatagtaatatccttgcctccttttcttgactttttccctcattctgtgaactggctttatgtgccttctgtaccttgctccagtgccttaagtggtcagaagtgggtgactaaaagaggtagaaattgccacatgtggataatggggagttgggtatttatgataatacatgggaatgagggagacatattaataattttgaagttaatggacttatttgttgagggaaggattcatggacagttttgaattatgtttcaaatatggatttagaattttatttagggggagaggactagacattctagtcagtgaggatcataaacagagctgagtaagtagttttgtttagagagctgttgggaaataagtatatttgagaattcttgaatcaagagagagaagagtggagtggcttaaaattaaagcatctgtttattcattttgacttgattttctaacctatgtgggaatgctgtagaagttatatggttgaataagtgagggattagacacatttaaatcagagtcattattgaagaaaatatcagaatagtttagtc

SEQ ID NO: 138565 - DNA, 1425 bp, Homo sapiens
tgtgtagactttttagattgacttcttttacttggcaatatgcatttaagtttcttctccatcttttcatggcttgatatttcatttctttttagtgctgagtaatattccattgtctagatgtactatagtttgtttattcattcacctactgaaggatatgttggttgtttccaggttttagcaatcacaagtaaagttgttataaacaccatttttctgtgggttttgtgtggacataaggtttcagctcctttgggtaaatacgaaggagcatgattgctggagtgtatggtaaaagtatgtttagttttgtaagaaactctcaaactgtcttccaaagtggttgtaccattttgcattcccaccagcaataaacaagagctgctattgctgcacatccttggagatacttctgtatcagcacacctgcaacttcctggttcttttctttttaaaaactatttattttgaaataattacaggctcacaagaagttacaaaaatagtgcagcaaaatcctgtgtacccatcactcagcttcccactggtgatatataattatagtgtattatcaatactaaaaaattgattgtcacaatgtaatcaactagacagcagtacctgtttctttttaatgcctacaagacattccattctatgggtgttttatttaaccagtcctttattgctgggcattaaaattgtagtattgctggtatagggaaagataggagaaaataaagtctgtgtattcggggccactgctggcatttacattgcttttatgtgaattagaaaagagttccctctctgggtggatgtagtcccataggcacatggcttgggaaactagaatataacctagataaatgtttttagcacctctgcatatatatctctttgaacttaagtgggaatacatatgcaggataatggactgtcatttaaattctgcaatataacatcagtgttccaatgtgaaacttcgaagctgtccctttcagatttagcatgtgctcccatcctcctacctgtaaccgtcatcacctctcccaagtaccttaggtcttgtatattttgtgttattattattattaagacagagtctcactctgtcgcccaggctggagtgcaatggcacgatctctgctcactgcgacctctgccttccagtttcaagtgattctcctgcctcagcctcctgagtagctaggactacaggtgcgcaccaccacgccggctaattttttaaaatacttttactagagatggggtttcaccatgttggccaggctggtcttgaactcctgaccccaagtgatctgcccacctcagcctccccatgtgttgggattaccagcatgagccaccacgcccggcttgtattttctattatttatgtacatgtctaccttacattgg

SEQ ID NO: 138566 - DNA, 1037 bp, Homo sapiens
gtggtgatgggtgtgataatttgattgtgataatacacagtgtgtatacatataacaaattatgttgtacaccttgatctataaaatctttacttttcaattaaatatttttaaaagggaatacctttcttgttttgaaaatgcttgatgtgtcttttctcacattaatgtaatttagaggaagagaaacagatttgaagaagcctgagccaagggattataagttatccttgaaagcacaaatactatttatcatgcagtttccctcatgaaatgttttacggcagacctgtttatctcatagatctgagtcaaagctgaatttaacacgttaaactttaacttatccagaattagtatcttttgtctaagaaccaacactaaaatatttccttatgttaatcaccaacactagaaatttgcttaattttttttcaaaaacaaaattttgtatcactttttgagttactgcatagtttataatgcaaagaaaacatccaagcttagtgaaatgataggataattactaacttagcaattcattcacacatattaactttaaagtacacaagattcaaattcttcaaattaatttctcaattaaatgaaatacaatgaaatgtaaataaaataattaaatgaaaattaattaaggaccttaatggttgcttataaattcctgaaattgcggattgtatgtccatggagtctgaagatccatagtaattaaaacgtattgtgttatatatgtttatagtatgctcatgctgttttttaaaatatgtatagaacattgaactccacataattgatagcatcataaatatcattgagactactgttgttgattttcatgagtgatttcctctatattatctgctctgtttaagttgattttccaagaagaggtcttaatgactttgtaatcactcttacagtgttttattcattgtgattgactatcagtatttttcctcttgcagcctgactcctaaacccagagtctcatatacaattgtaggtgctacgttaagaga

SEQ ID NO: 138567 - DNA, 1003 bp, Homo sapiens
tgtttaaaatgtctagttttcaaccaaaaaaattaaaatacaaccaacagtaaactatggcacttaattcagggacgtaagcaatcaataagaactgtcactgaggaagcctagatgtgcttactagatgaaactttaaatcagttgttgtaaacctcttcaaagaactgaaggaaatcatggctaaataaaagaaagtatgagaatattagacatattaggaaagaaagaagcatttatctaaacatattggaaactatagctatgtggtggtgtgctagaggataaatgaagccacagggtaaacatgatgtctcttcttcgaatgtcagttttccagaattaaaactgagagcataaatttgatattgaaacaaatataggtatgttatagtgtagaatgtaaaattcacaaaaataaagcattatgaaatttgccatttgtgatgggccacttacggcaactctcaattcctactcatttcacacctttaatttattttgcctatgatgtacgtcagttgaaaagtttgagaagtctaatctaatgatctgttgcttcagtgattgtggaccaatgacaatcctatgttagaaacaaatgggcatgtcacagataagagataactgtaatagaaaaccgatttccacagtatactcactaattgaccattgtgttattttcacacttggaatatcctacctttgatgaacaaaaggaatacctttacacctgaattgacatttctccaaaaaagacatgcagatagctaataggtacaggaaaaggtgctcaacatcactaatcatcagggaaatgcaagtcaaaaccacaataagctatcacctcacacctgttaaggatggctgttatcaaaaagacaagagaacacaggtgttggcaaggatatggacaaaagggaacctttgtacactgttggttggaatgtaaattggcatagccattatggaaaacagtatagaggttcctcagaaaattgga

SEQ ID NO: 138568 - DNA, 1055 bp, Homo sapiens
tgaggctctctatcattagctggggtgtagacgttttaaaaataatatcactgaattgtaatgcatcaatttgggttttggagcagtatctaacttgttccatttagaggtggctttgcagttctaaacaagaaagtagaatttttactatgattatccctttgcttacaggcttttaaaatgaatatttgttgaagtctcaagtcttttttgccagtattatcttaagactgtgtttgacatcaatacctatctcttattctatgcaagtactgctcttaatattatgactggttctaatatttcatttcaacaagtaatacagctgttctgggtagaacactatgctagacccctttatgagtatgggtgagaaatctataaaataggcataaaccatgcttcatgtccttaaaaagcttgcagtcatactgaaaagacaagattcatgaaacaaataatgaagtcacatatgattcaacagctaaatgagtgatggagacagtgatgtctgtaggactcattgtttgggtagactaatgtgggctaagattgtacaggagagctttacagacaaaataggatttaggctaggtagaactttcatagatggaaaaagcagtctaggcagagaaacatcttagacataggtcaggatgagcattatacagtggtcagtgggtaccaatcaaaagtaggttgaagtgggggagaacctagcaagaaaggggacctgtaaggagactagctataacaagcattgggaaatgaaggtctaacagttgacaattttaaaattttaatggcctgtgagtggcctctttcttggtaaaatttctctttgtctgtttaattatgtctcaccagcacctttaatgttgtgaatgtcatgaaaccttgacaagagactaggaaataacacaagcagtagtctgctctgtagacaaagtgctttcattcttcagtacgcattcagcttaagtcagttagattaacattggttatgtcacactgcctgagtgccttctatgttcagtgatcttttttcttctgaa

SEQ ID NO: 138569 - DNA, 1047 bp, Homo sapiens
gtcccagctacttgggaggctgaggcaggaggattgcttgaacccaggaggtcgagggtgcagtgagccgtgatcacaccactgcactccagcttgggcgacagagtcagaccatgtctcaaaaaaaaaaaaaaaaaaaaaaagaaaaaaaaaagtttctagcagaagcaaatgcatatcatgaagtttcataatatgaggacctgctatgggtccttttaatacttataagagaccatattgaaaaccatttgtacagtgtcttcagaatgaggcctctacataactctggaagctatgggacaagtagctttacccaaaacagcataaatgtagccactctcctgtaattatccttacttatttttcttgacttgtctatgcacatagctataaatcctcaggtattcagacatatcttctttttaggcctgtatatttatattaatagcctctacttagatgtgtgaagtttgtttcatgtagtttgctcacagttattatctataacaaagattatggaacaggcactattaaatgatagacccaggtataatttctgactggctgcagaatacagtcatacaaaggtacatacctatctcttttgtactttatcttagaaggacctactatggtcaatttaatttgtaaattacattctcacagataactggagtgtcagccattttttgtttatcagtttatcttttatcatatacatgtaggctgatggtagtttactttttttttttttttttggagacagaatcttgctccatcacccaggctagagtgcaatggtatgatttcggctcactgcaacctccgcctcccgggttcaagtgatttctcccgcctcagcctcccaagtagctggaattacaggcacctgccatcatgcccagctaatttttgtatttttgtatttttgtagagacggggtttcaccatgtttgccaggctggtcttgaacacctgacctcaggtgatctgcccgcctctgcctactgaagtgctgggcttacaagtgtgagccaccgtgcc

SEQ ID NO: 138570 - DNA, 1093 bp, Homo sapiens
tatcatagtacagccttgagcaagataaagcctcgtggcaggccatctcaggaattcataatttcagaactaaagggaaatttttgaaggactagaagtgcctttggtacaagattctaggttgtgtgtcctaaagcttagaaagtaaaatagattgaatcaagctggatctgttttgtggctttgctcaatgatgaaggatggatgttatgaactgatgggatcagccatattgctttaggatctttgcgatcttcagtggatgggcaaaagtgaaaagttctgcttgagtaaagacctactaatactagtttttttcaataaagtctgtgatagtcttgatgattcttgccttttccctatctgtttcattttacagataatccacattgttacccaaagccacatgcagtgccgggagagcacagttgactgttttatgcagtatcctgccagaagatgctgaccagttctctagtaatagaaagtagtgagattgaattaagagcctatatagttcaccttgccattcgatatactttcactgtgatctgtaagcatattacatacaactttagtaacatattttctagtgagatcttggattgctgcaaggtggtaacagattctctgctttgcttcaggtgttagtggatctttgagtaattcctatggaatggagtctctgaaaaattggttttgatgctgttagcctaggggtcccacagcactgtatctgcctcaaataaatgcttatgtactagttacattagtgtgtttcttttctgtgatatcattatcgcttatagtagcctagcaaccacacggttaggtttaggtggtttggggtgcaaataaattatatagctggtaaaacttgggcctcagtacataattcattgtagcaaggcaaacactttgtgctgattttgaacaaaagtgaagtgtttagattgacgggtgcttttttacctccttttttatatggtaagtagaagatggcattggtgatttattcaataaagaagaatctcatgaagtctttgccttttttccatgttagagtaggtattctcaacacaattcatgtgtt

SEQ ID NO: 138571 - DNA, 1339 bp, Homo sapiens
gttgggtggagcatgttttatgttcagtccaactataagtggcatcttttgtatcaagtgtgggtgtattttctacagctcttaatgtttcagacattgaaacttgctcaaagttaaaaatgttagtgttgaatagctgagtggaaattatatgtcattggaaaaaaaaaccctgtttttgtaaaaaatatacattatcctgagtttcatggttggaaaccagaaaaatagaaggaatagtcctatcctcacagagcttacagtcctgttcaagatatgatactattatcaaagttgcttgaaatacttacaaagcaatatatacatgattgtagattaataaaatacacataaaatgcatacacatggaaatgacatggaataaaggagtggtcagggagaaggctatagggagggaataactggaaccaagttttgaaatggaggaggtacagaaattattggtagagtctgtttgaccagtagatcttgaagtcttacttggttgttcttaaacccgttgctgtcaccaccacaccccttgccacagtacttggggattcccagcagctgtcttcagtcagcaacttgcactctcagcattcttcatatcactccccttgctctggtctctaagatcataaaacttcaaggaaattaaaagtggcctttgtgttgagaatcctctggggaggctggataagagatcttgtatctgcttatagtttcttgtattaggaagagaacaggatttgcagaagagtcctctagagtatcagatgaattgggagaagagtctcaagataggggagactaactaggcttaaggttatgagggcagtaggaaaactggcattggaaagtgggaaagccaccccaggggcagagtttgtgaatataggaatgttgcaaaattgagaattggaagaagttatcagcatatgcaagggttcatactctagggccaggttttgtgtaggagtggaaagattgtagctcacctgtttttggcttccatcattgcctcttcttttcttggctctgtgcctagctattcttgtgctcagaaaaagtttgttaaacagctctgttgaaatggctatgaaatttgatcacaggcataagaactctcctcccctttccctcttcacctattcccagctgtatctaatttgggagaaaggatgagaggacacatcggtttatagaatttgtatcaaatataaagatagctggaatagcttttggatgaggacctgtgattaggtgactacatgtgcatggagaggcactgcaggaaaaaaaaaaacaaattctggttgcttggcagaagtaaaag

SEQ ID NO: 138572 - DNA, 1027 bp, Homo sapiens
cagtgtgcttgggaggaattgggttgtgttggggagtaggcattttgtttcaacagaactgtggcaatcctattgcattatcaaaaagatgatttgatagtgctgctcaggttaaaatgatattaaatttgtattttaaatataagccattatatttctgttatatgttttctgatgaagattgaccagaatagccagaagatgtatctgtctatcgcagatgatgccatgaggccatgacagatttccttatccacactaacataacggtactaacttgcattctctggtcataatgtatagtttttcttataaaagcaaaacactgtctgaacaattgagtcattttgaaggtataatatggttgtttttttttaacaatgttgattcccattggaagacaatctgatgtcgtatcttatggatagaaaagaaggcaggcatgtccccagttgtcagttgttctgtaaaagccatcagtgactgagctagaaggatggagaaatataaatcacaaaattgtttttatatccatgcataaaggtgtatgtgggacaaggtatatttagttaaaaagaaaatgcttattttgctttctcccccatatggccaaagggagtgataatttagcccataatttttcttgcttatgaattatgtttgtgctatactcaggtttcagttagcgggtggcagccaagtaggaatctctgctgaaatctctcagtccaatgggaagaaagaccactactgaaaaagtaaaaaatggtctgttaacccatgcatgagttgtttttctaagtatgtatttctcaggcacatgctaacatgtgtgttgttgtctttttaaaaactgtatgctttttgaaaccaaatttgtgttataaatactaaaaccttagctgtagtggattatatttttgaagtgaattgcatttcctatttatagacagttttactttttgagaatttatgtgtgaaacactaaaacttgtgtaatgagattagtcagttcccaagttttcct

SEQ ID NO: 138573 - DNA, 1050 bp, Homo sapiens
ctaatttaattggacttgaatggggtcttggatggggcctgggaatcaggattagtaaaagctcaccaggtgagtttaatgtgcagccaaggtggcgaaccactggttatagtctactgaatctttctcttgagatttggataatttgggctagggtagtgccttggaatctgaattttatgagcaccctaaatttcagtaaacaaccgatttgagaaactcttgcattgtggtctgcagaagacatcacctgggaaatcattacaaatataggctctcaggccccgcctcagacctgctgaattagagtctgcagtttaacaagctcctcaggtgattcttacgcacattaaagtttgagaaggactggttctcatactttggagtacatcataatctatagtgcttgttaaaacacaaattgttgggccccattcccggagtttctgattcagttggtgtggggtgggactgtgaatttgcatttctaacaagttccctggtgatgctgatgctacagttcccagggccacacgttgagaacctctggagagagaattgaggacctgaataagtacttgagcgactgtaatggaatggcaattttcaaggccagttttcagtataaaacttcctgcttctgtgtcactatgctttagcatgttcattctaacctagcacccaggagattgagtgctgccgagagtataagagtctgaggttcttgggatggttttagttgaggggtgagggtgactcttggaaacctgtggtatgattttaggtcctttttcagaaattgttaaatgtaagggatacattttaggagttaaaagcattacaaatatgataccttaaggtgaattatattgattttaataagtaaagccccctttgttcccataaaatgctcttatgattctttcactaaagtattgtgaaaagattttaaaagcttttacttatgcctatggttgctggatttcattttaagactttccctctgtaacaaaaatatgaaaggattctgctaaggcactgggattgttc

SEQ ID NO: 138574 - DNA, 1093 bp, Homo sapiens
tcttggatgtctgtgatgtattaaagctagtcctgggatgatacttaggttggctctgcaaagtcatgggactgcaaaaattcactcctgtttagttcttgagctgttaacatgagtttggcaaaggctgctttagtattcacgctccattgctccaaagcatatgagaacacactttcaggaggtgctattttcacacattttacagtgagtttgggttaactcaatgactataacaagaattttaaaaggaaagtgagcttgaccagttcatacagaaaatgcttttgaaaatatcattttaacagtagccactttgcacacgtatttagatattattctattcaaacaccccagcccctggatttctttttcatggaattaagcagatgataggacacactttgaccactgtggatatgttgaaacggtggtggaagaataataactattatcatctagcagaccttgaatgtgtcatgtattctataaaacaactaatgtagagtagacactaaacatgaccaagtggagaatgaaagttcacttaagtggaaaatggactgtcttatttccatttatcttcaactcatttttgaggtgtactgtggaaaattcaggaaaacttcctgattatgggagggacataactaagcatttcaacagtgccttagtaactaccacacatttgtctttctgttttacatatttaacagcattgtgtacttattagtgttgctttatcctaagtgccataagacataaacagacatattgggatttttttttctcatagttattatcatgtcatgagcagtgtgtttcaggtcatgtctctgcccaccagatgttgtgcttttgacagttttaacttctcatacgtaaacgcacactcttttcatcctttcccaggacttttctctcagaatgtctgtaactggtgaaatcctcgttttatgggtttagaagctgtagatccatcagttagttatccttccactcagtattgaggggatgtcaatatatgaacaagctgtatggatacaaattcttcactgttgcccccatgttttgattacctacccaattgcag

SEQ ID NO: 138575 - DNA, 1501 bp, Homo sapiens
ttcctaattaaagcaattactttccaccacccctccaacctggaatcaccaacttggttagagaaactgatttttcttttttctttttttttttcccaaaagagtacatctgatcattttagcctgcaactaatgatagagatattagggctagttaaccacagttttacaagactcctctccccgcgtgtgggccattgtcatgctggtgggcgtcccgcccacctgaaaggtctccccgccccgactggggtttgttgttgaagaaggagaatccccggaaaggctgagtctccagctcaaggtcaaaacgtccaaggccgaaagccctccagtttcccctggacaccttgctcctgcttctgctacgaccttctggggaacgcgaatttctcattttcttcttaaattgccattttcgctttaggagatgaatgttttcctttggctgttttggcaatgactctgaattaaagcgatgctaacgcctcttttccccctaattgttaaaagctatggactgcaggaagatggtccgcttctcttacagtgtgatttggatcatggccatttctaaagcctttgaactgggattagttgccgggctgggccatcaggaatttgctcgtccatctcggggagacctggccttcagagatgacagcatttggccccaggaggagcctgcaattcggcctcggtcttcccagcgtgtgctgcccatgggaatacagcacagtaaggagctaaacagaacctgctgcctgaatgggggaacctgcatgctggagtccttttgtgcctgccctccctccttctacggacggaactgtgagcacgatgtgcgcaaagagaactgtgggtctgtgccccatgacacctggctgcccaagaagtgttccctgtgtaaatgctggcacggtcagctccgctgctttcctcaggcatttctacccggctgtgatggccttgtgatggatgagcacctcgtggcttccaggactccagaactaccaccgtctgcacgtactaccacttttatgctagctggcatctgcctttctatacaaagctactattaatcgacattgacctatttccagaaatacaattttagatattatgcaaatttcatgacccgtaaaggctgctgctacaatgtcctaactgaaagatgatcatttgttagttgccttaaaataatgaatacatttccaaaacggtctctaacatttccttacagaactaactacttcttacctctttgccctgccctctcccaaaaaactacttcttttttcaaaagaaagtcagccatatctccattgtgcccaagtccagtgtttcttttttttttttgagacggagtctcactctgtcacccaggctggactgcaatgacgcgatctcggttcactgcaacctccgcatccggggttcaagccattctcctgcctcagcctcccaagtagctgggattacaggcatgtgtcaccatgcc

SEQ ID NO: 138576 - DNA, 1054 bp, Homo sapiens
ttctgagctccaacactccagtgaggtgaggtacagcaaaaaccagaggccagtatattctttaaaaatatcaaggtcatgaaagataagaaaaactgagaaactgtttccaattaaaggagactgaagagatatggaaactaaagttaagaattcattcatatttggatcttttactaaataatttttgaccttttgttctaaaggttgacattgggataattggtgacatttgaaagaggtttttagattagatcataatgttgcatgaatattaatttcctgattttgataattgtggttatgtaagagaatgctcttgatttttagaaacatgaactaaagtatttaaagataaaggggcatgatctccatcttactctcaaatgattgagaaaaaatagtgtgtgtgtgtgtgtgtgtgtgtgtgtacagaaaaagagaaaaggataaagaaaatgttgcaaaggttaacatttggggaatctgagtgaggagtacgtggaaattccttgtacttacatttatcctttctactaacagagcttcagatgaaaatcacaaccctggccaacaccttgatttcaatgcaatgagaccctaagtagaagattcaggcatactgtgcctgtacttctgacccacagaaactgtacaaaaataaatttgtgtgttttttaaaagtgaggccaatggtgtgtaagaagaatttgaagtgggaaaaaagggtagattcaggagacattatggagagaaaattgccacaatatggtgttttccttggctagatatgggtagagagagaagagttggggatgattctgaagttgggagcctagaaattgggataatgctggcagaaagaggcaaatagagggagagctgggtgggagaaaaaaaatgatgttttagaaattctgagcttgagtgaacagaggacatgagtaaaagggaaccatctagtggaaaggaattggttaaggattgaagctgaacagagaggtcagggctgcagccagaggtttgggaggcatcaccattgttttggatgtat

SEQ ID NO: 138577 - DNA, 1090 bp, Homo sapiens
aataacaagctaaacccaaagctagcagaggaaagagaccaataaagattggaacagagataaataaaaatagtgaatagaaaataaaataaataaaatagaataaaatagagaacagcaatgaatccaagagatgtctctttgaaaagatcaacaaaattgacagagtttatagctagatcgactaagcaaaaaaaagagaagcctcaagtaactaaaatcagaaatgaaagcacagacattaccaaaaatgttaaaggaataaaaagattataagggagtacaatgaagaatggcatgttaacaaatgtggtaacctagataaaatggacaaatttgtagaaacatacagcctaccaatattgaattatgaagaaatagacaatgccaatacacctataactagtaaggtgatgaaatcagtaatcaaaataatttaaaggaagaaaagccaagatccaatgggttcacctctaatttccacaaaacatttaagagtaattaacatcaatttgtttcaaactcttaaaaaattaaagaaaagagaatatttcctaacttactctatgaagccagcattaccctgatatcaagctagaaagagacactgcaagagaactacagaccaatataccttatgaatattgatgcaaatatcctcagcaaaatactagcaaatagaattcaatagcatattaaaagggttatatgccttgagtaagtgggatttattcctcaaatgcattgatgggtcaacattaaaaaaatcaatcaatattatacaccacattaacagcatgaaggggaaaaccacatgaccatctcaagttacacagaaagagcattttacaaaattcaacacctttttgtgatttttaaaaagaactcaataaactaaaaatagaagaaaactacctcaacataataaggccatatatgaaaaacctacagctaacatcatgcttaatggtaaaagactgaaagcttttactcaatgatcagaacaagacaaggatgtcagctttttggcacctctattgaacatagtattagaatgcctagacagacagcaattaggcaagaaaaataa

SEQ ID NO: 138578 - DNA, 1110 bp, Homo sapiens
agtgattttatccagttccatactttaaaaaaagtctgcctgttgatgatgctcatattcatatcttcagctctcacctctccactgagcttcaaacttatatattctcctatctacctaacatctccacttaggggtctaatagcatctcaaattttatcatggccaaaaacaccctcttgatctgtgcacttaccacatctgcaccaaattatttctactgcaggcttccccttataagtaaatggtaccatttgtccaagaccataacctaagcctcattcttgatcctattttctcccacccaacacatcctcttcatctatctattaacaagttctattggctccccctcaaaaacgtataaaaatccatccatgttgtctatctccactgctcccacctggcccaagccaccaccatcttttgcctagaccactacaattgtctcttaactggtttgcacacttctactcttgctcttctatatttttactactaattatggggcctacagtgaattcttcacaaaaccttcaaagtgaggttttaaaaacataaatcagatcatgtcactcatctgcttgaaaccatccaatagcttcctgttgcaattaaaattcaaactccttccgatggtttacaagggccctgcgggatttggccactgcatgtctcttcagcctcatcttgtgccacactccctcttgctcactatgttttagtcttactgtctttctgttctgttaacaagccaattaaggcctctgcactgctcttttctcttcttggaatgttcttcccctagatctttacatgtgacaggcttcttcttgccctttaggtctcagcatagatgtcacttcacctcagaaagagttttcttcaccatgtaaagtagcctcccttccttgccatcacttcctaatacatcagcctgttttattattgttatagtatttatttatgtcaaatcatcttatttatgtgtttattacccaatccccacacacaactaggatgtaagcaccattagagcaggaaccttttctgtcctattcacccttgtatctcccatgcctggaacagtgcctggtatgtagtagacac

SEQ ID NO: 138579 - DNA, 1049 bp, Homo sapiens
atcattagccaggaaaatccagttatatttttctatttcttaaaaaaggttcttgtttaacccaaataaatgcattttacaaatcagagatgttaacattgaataaattacattcattttgatttgtgatttttttagattatttttaccatggtgtagaaaaaaaccagtgggatgtggttgctttttttttttaactccaaagttagttaaaaagatatctgtaaaatcactggagtcagaaccatcctgattccaacttattaatgaaggatttgagaaagagtgttgtatatttttgcattaaagacaaccacgacaccaaaaaagctatttttaaaaatgcctgattttttaaaaatgccaatcttatatagtctgtttcttttaaagcaagtatgtattttaacaaaaccagtaataccacatttaattcttagcagtagtaaactgtatcatattagaaaaagcatggactttggactcatttcgatacaaatcccagctctaccactttctacaatgttaatgtaatactcatatatgcattaatatatatattttgaatttaggaaaataaaatgcaaactgacccttaaaaatggtctggattacatcgtttacttagtctttgcctccctctttcttgttttggcatagagtggatcattgttgttgtttttctcaattccctgtatcatcacaatttaaaatgaatcagtccaaaagaggcatcccattcttcaactgcctgagatgttttgtctggcgaatctgtagctctttttttttttttttttttttttttggagacggagttttgctcttgttgcccagactggagtgcagtggcgcaatctcggctcactgcaacctccacctcctgggttcaagtgattctcctgtctcagcctcccaagtagctgggattacaggcgcatgccaccatgcccagttaatttttgtatttttagtagagacggggtttcatcatattggtcagactggtcttgaactcctgacctcaggtgatccgcccgcctgggctt

SEQ ID NO: 138580 - DNA, 1095 bp, Homo sapiens
agacagggaaagagagaggtaatctctcctagtactctgaagaaaaggggtatttaggctctttgcctatcatgaaacaagaggcttatgtcttattgctgatgaattgcaagtgtaattacagagcattgctaaaccacattaagtcccaagggctgaataaaaaaatatacaccatctacaaaagccatttaaattatctctgaaaaacctagtagtcaagtatgaaatcagtctgtgagcagatataaaccattgctggttatccattaaaattagctccacaatgctaagggccagtctctaaaagaaaaatgaatggcctgtggctatatctaatgtgctactcacaagtttctgtactgttacagaaatgaacaacaacagttgaactttaaagataaacagttttttttatcggattcctagagaataatggtgcttatgtacaattcttgaaatagagcctacagccgcccaaaataaaatagtctctttcaagatcttggaaataatgacatcataggcagattgaaccagcaatccattaatagtatcctttatagaaagctgtctcaggggaacacatggctaagtagattggcattgtttataaacataacataataaaatccctttttaaatatgtttgtggaatagtaggagatacttcccacttgggaaacaaatactttaaccacaaggattccttgcaggtccctaccctttctccattggtcttctaaaagtgtgcttagaggcacttgatttgaaggtgagttaaaataccaaggacctcctgtactattctttcaacagcaaagcagaattatctggaatcattagcagaggatgattggttgtgccttgtaatgggtagtaaagaaccaaagtaatatcaagataattaaaacaaaaccatatctgaactgtctaggaaaatggtttggttcaagctttattaagttcctagtgtggacctggacataggttcttcagtttcacttgtgtctttgtaaaaggtgtattccagctcctcttatgatgccttgattagttgaatgacattgaaacacttccagtttggtgggcaat

SEQ ID NO: 138581 - DNA, 1694 bp, Homo sapiens
gccaatgcacaaatctgggctgcattctgactttgagcacagatttaatttattagctatctcagtttaaaagttagatataacagaatctggagcatgtttttaactgcttatataccactcagaaaagagttgtgcctactttttatgtgcctagctctgtgctgattattgtgagggatactacatatgagacaaggttccctatcctcaggtaattttcaacatagttgcagaaatcatacacacacacacacgccgagtttgtgggaaatgtccagtaagtgatcttagagaaaacagatacagtggtggggaggtcctccccattccactcccaccattcattcttcttttccacctgagtgaaacagcaaccatctggaagcctgcccccaccatggcatgtgtacctttagcagcacacagctatctagcttgtcttctcacacctttttttgttgtgtcattcaactattcaaaaacctttctcagcatattttgtattactacctccgatttcatctttcttcccttcctgatttccaaggctacaccctacttatttattgtgtcttctcatttcctcatcaacatgcaatatgcatccctacttccaaccttttacctctactgttcttcctcgttgagatgacttacccttgcatctaggtatccagtctttaaggcccatttctcaaaacatacctcctccagtaagccctgactgtccaccacagatttctgtgatcttttcttttgacatgctactatcctatattctgcccaacttagcacctaattttctttggtagtttctgttgctatttcttgtttattaaggttatttccccagttagatttcaagttcagaatattactgaagtttctaatgaatcacccagaataacctgtcactacagtgatccacaattcaatatagttgctaactgactcactgattcaaaggaaaggaagctgggacagtagcaggaggaagttgtgttttagagccaaggttgtaaaatgcttgcctcatagaactagtcaaactatgtgtttatttttctttagaaaaattatttctgcagtaaaaatgctttatatgatattttgcttttagctttctgtattaacaaggcttcaaatgttgcttttaaaattatgacatgtaccataatattttgcatgcttttcattgcttttaaaaagatgattattgttttgtgcttttaggctaaatttatgtaggaaagcatttccctatgtctgtcttctgccatcctttttcttttcctgcatgctctgttttcaagaagctagaaagagttctaaaaaataaatctgaaaatgaccatatgacatccagtgaataggcccaacaaaacttccaggaattttaggggaagataacaaatggaactcctacaacaaggaagactcaggtgagagctttctaaattgctttcagaaggcagccatagcaccatccagggatttcatcttgggggagaattggttgctttgctcaaccttgaaccatgcccagctatgttaccatatatgcctttggccccaaagtggtacctggcaagaggtgtgcctgaatgaatagagtcatccccactgttgggggaaaaacagcaacaatgccaccaaaaacaacttcaactacaaaaacaactgtaaaatat

SEQ ID NO: 138582 - DNA, 1083 bp, Homo sapiens
ctacatttcaggactctgtctataggatggattttaaggagctcatcctatggttaagggagtcagaaggatctacatttaaatcatagacccattgctattagctgtgtcacctagggccagttatttaaattttctgggcctccattttctcatctaaaaagtggggataatgataatataaaaacctcagcagcagtatcaggcacatcataggggctcaataagtggtaattgttattacatgggtataaagccttcataagataatacaatgggtcaagctttgaaataagtcatcactgggtctgagtcatagacttatactagctgtatgtccttagtcaagtcacttaacatctctgaacataattttcttcatctgaaagatggagataataattgtacccatataataggggttgtgtgaggactaaataagttaaagtatataagacatctagcacaataaacagtaatataaaattgttattatgctatttttacagagtgagagtgatcatatttttcagcataaaaatgggggtttggggtcttacagtgtgacagaatgattgaaaccaggaataatcccaggtgtatgattactgtacagaagccatcaagtatcttggactcaaaggccacattggagcttggggaaaaagtagagcagcctgtgctgagaggcaaaagagaggaaaaagggaaacaggcaggcagaaagatggccaatatcccataccagagtggacctcataagcatggtgaagagtagatggcagcctctactaaaccatccttaccttcagtgtcaggggtccagttactaagaggtgggcagcccagaccacagagctattcatcttccatgcagatgctgattgtggtggccagagcaagaggtcattattgggtgaaatgaacaggtcatctttcagttttacacagacaaatagcctgggtctggcttgttcattgtggtctgtctagatctgttgaaaaatacagaaacaagaacagaaaaccaaacactgcatgttctcactcgtaagtgggagttgaacaatgagaacacatgga

SEQ ID NO: 138583 - DNA, 1036 bp, Homo sapiens
cttctaacttccacctctgggattcaggggattctcttgcctcagcctctcgagtaactgggattacaggcgtgtgtcaccatgcccggctaattttgtatttttagtagatacggggtttcaccatgttggccaggctggtcttgaactcctgacctcaagtgatccacccacctcagcctcccaaagtgctgggattacatatgagagccaccatgcctggccagatgcttgcttttttaattgccagctttcattgtaaagagttagcatggagttacatacgaaagtgttcaatgaggggtattttgatatttttagtagggaaattttattaagtatctttataaagtcttacaattttacattgtcaatatgtttcactgagttgcatctattattgtttatggtggtcaaactattccatctttagctaatgggagaccctttcactgcattagttttgacagaggtcttttaatagcttgtttacgacatccaacacttgcagttatgtggtcataccctccaaaataacttattcacatcctttctttgtaattctgacaggtactctctatgagcatccaaaactagcattaattgagaagatatcaacctaatatgtcctttccaaactgtattttatagttaaaaataaatgaatatggataagtaccaatcacatgaaagatttttataagaacttgcatataaggcagctccatttttatgaggaaaaattgggaggagaaaacccttatcttgtatttgggtatatatggtgcatttctgtgcatgcatgtatgtttgttgtaggtatatttttagcacaagtggtaacatactatatatctccttttttattgtgtttctgtgttttagagatggttctatgcttgtacctcatactttttaaacagatgcagtgctttgttatttgaatagtaccataatttattgaactaggccctaaatggacatagacatttaatttgtttttgatgttttgctattataaacaaggcttctgtga

SEQ ID NO: 138584 - DNA, 1470 bp, Homo sapiens
ccaggaggcattacttttataaatttgtattcatgtaaattttcaaatgagaacagcttctaaagccccttccctgtattggagagttatgtatatttctaataagtattagaaagaagctgtttctcatgccacagtgatgctgaaggattcacatttggtacaatcgagtaacttgaacgccagattgttaacagtttattctctttccctggatttttaagctcatcttgacacaggtgagtctatccaaatctttgatgttgctagtgtgccctgagataacgagggcacatctttcaatgttgattccaaaatgtcctgagttaggaatagggcagtgggaaagtcagggaagggtgagaagcacagtagagattatttatttaaaaaaggaaagaacgttaatgttgttagcaaggatccagtgcgttgtcataatcccatgaggattttcagatgacacaatcccctcaaatcagtcaccatgttgggtaatgacttcgttcttgctgatctcgtgtgtgtgtcattgtaaatatttgtgtgtccatgttccattttggctactggatggccaagccatgtaagaagatttaactcaagtatttattctttatgttattcagatttctttcaggcttgtgaactgcaccccaatgtttgagtttaaccacctgatccttacatctatccctccccggtgaagcacattccattgctaaaagaaaaagaaacacgaaattgcttcctgttgtctgtataactgttttgatagtttgagatatttgtctataaatgatatttctcagctcaaagatcgtgtaaataattatattcctttgctcaatgggtttatttctaatgaggctgccagttctgagagattctataatatcacttttaaataacataaacagggattacaactatgtaaaaagaaatgcatatggacaaagactgggaacacagataattgaaatcagttgtgttagggtggtggaattatgtgaatttttttttctttttaaaattttatttgatattgttataatattgctttacaataaataaacagcagaaagggaactatagacacatagaaaagatgccagaagcagatgccttctggccagagcgcagagcatgcagggcagagatatttgctagttacaattattccataggctttatgcttgcctgggtgctgaggttggcacacgctcgggtatggcacacgctttcttaggagactattatctataagttaaagctagggagatgtcactattagaactccaaacacactcttctgctttaaaacaggttgtctgccctctgctttggtatggcattcgggtgtctgttttgtggttgctttagattggaggggtgaccattttattagcccccttgataacatctgttgcagatattgcctttctggaacgttttaacagactctcaggt

SEQ ID NO: 138585 - DNA, 1129 bp, Homo sapiens
gcaattaaatatttttggcattgaaaacaatgaagtacccttttttgcgttctctttccctctcccaacatggcggcctcagcaaaaaagaagaataagaaggggaagactatctccctaacagactttctggctgaggatgggggtactggtggaggaagcacctatgtttccaaaccagtcagctgggctgatgaaacgatgacctggaaggagatgtttcgacaacttggcacagtaacaatgacgatgtgtatagggtgcctccaattgaccgttccatccttcccactgctccacgggctgctcgggaacccaatatcgaccggagccgtcttcccaaatcgccaccctacactgcttttctaggaaacctaccctatgatgttacagaagagtcaattaaggaattctttcgaggattaaatatcagtgcagtgcgtttaccacgtgaacccagcaatccagagaggttgaaaggttttggttatgctgaatttgaggacctggattccctgctcagtgccctgagtctcaatgaagagtctctaggtaacaggagaattcgagtggatgttgctgatcaagcacaggataaagacagggatgatcgttcttttggccgtgatagaaatcgggattctgacaaaacagatacggactggagggcttgtcctgctacagacagctttgatgactagaagaggtgatgatagctttggagacaagtatcgggatcgttatgattcagaccggtatcgggatgggtatcgggatggcccacgccgggatatggatggatatggtggccgggatcgctatgatgaccaaggcagcagagactatgatagaggctatgattcccggataggcagtggcagaagagcatttggcagcgggtatcgcagggatgatgactacagaggaggcggggaccgctatgaagactgatatgacagacgggatgatcggtcgtggagctccagagatgattactctcgggatgattataggtgtgatgatagacgtcccccccaaagacccaaactgaatctaaagccttggagtactcttaagcaagatgattcctctgctagtacctcccagtccactcgagctgcttctatct

SEQ ID NO: 138586 - DNA, 5932 bp, Homo sapiens
gtagcttgggattacagccactgtgcctggtaaggcacttttatttttcatatccccttagccaactcgaagtaaaaccatctctcaaatgtatcttgacaaaacctggcagcaaacaaaaaaatctcaaacttgtctgtcattaaaagattgtggtacccacgcaacgacaccaactcaatgcttagggtatgatgttttttttttttacccatcagttttgaaaaagttaattacatttggcaattccccattcccttatagtgaggggtctcaagagctggctcctacacataaagggcttagaacagtggctggtacctaggccaccaatagtcttttgccccacccaaccggtgacacagcccggggccccgccgccccctggcggccattacggatttccgcctccctcacagaaggcagtcactgcaacgtgcgtggcctcagttgcgtcatatccggcccttgcgatcagggcttgaggaacccgcgccatgaagtgcgtgtttgttaccgtagggaccaccagctttgacgacctcattgcgtgtgtgtcggcgcccgacagtctgcaagtgagtgagggaggcgagcaggcggcggcttggctcgccacccgccatctccggccatactgccagccgcgttagccttgcctgaccgtcgcgctcggaaagaaacccccgcaactctaccacaggtgccgctgccccttagctggcttctgcccacgcccggcggggcccttctccggctacccggccactcggggttgcctgtttcctcttcccattattccggccgctcctctccctcatttcttcagctccttttccggtctgcccccgcgctctattctccgcctccgcgtcctccgcccctccttccaacggctccgcccctccgagctcgggttttccaccgggctcggcagtttttcctcaggcccccctgtggaccgcacgtcggcgccggcgtctgagccagccgagctcgcctcagagcccggctccttcccctcagcacttggccggagcccgcgcggttcctctcctcagcgcgcgtcgtcccctcagggctcccggttctcgcagttgatcaagtgaggcagaacgggtagtgcctgggttccccccgagtttgcgactccttttccaaagtcttttcctgctgtggctttcgcgggactctgcgagctgggtcgcttagattcatgagtgcttgggaggttcctcgtcgggccccggaccagaaaatagttttgaaaactaagtgaaatcggccacagataggctttttggcggccgtgctccgatgttaacgtcaaactttagtagtggtggtggttcctgctctgttttacatagccagtttaaaaggccctcacattctgatttcctctttcagaaaatcgagagccttggttacaaccgacttatcctgcaaattggtagaggaacggtggtacctgaacccttcagtactgagtcgtttactctggatgtttacaggtacaaggattccttgaaagaagacattcagaaagcagatcttgttattagtcacgcaggtaaaggtgcctaagaatctcagggttgggtcttttaattttaattttttttaagttctggggtattctgggggtacatgtgcaggatgtgcgggcttgttacaaaggtaaacgtgtgccatgcatcacctaggtattaagcccagcatccattagctttttatcctgatgctctccctccaataaggaactgacacttgaaccttttcgaggtaaaataaaatcgctagctgaactcactgtagccctttttgaatacacaacttatttgaatatgacaattgagaactttactggagagaacttagtattttggggtgagagaagaatgggaaattaaccactgtagtccacctttacaataaaaaaccctaaacacagaggagcaaaataatttacccggggaagtgtaataaattgtcaacttgacattagtacttgggcttagatctaaaggagtgttctgcctgctgattggttggattggtcatggagaaattggaattgtaagattgtttacatttctgttgaatgtgagtgaaatgaatccagtcaaaaataataacagctacatactgtgtaaattgtttcctcttcagaggaccgccctgatggtctagttaattagacttctagtgcattcagaagaactgcttttggggagcaatgcagttttgactgttgtgaagaaaggtgtttcgttttttcctttcttttttttttttaaagtctagtttgaggagagaaaagtctttagaaatagacattaccaacagattcgtgattaaaaatgtatctcctaggaggtaacagagcctttggcactgctctgaatgctttgtgtatattaactttacttttttaaacaatcctgtgaactaagtactgttagtatctccattttacacatgaggaaactgagacacaagagtggttaagtaatttgtccagccgggaagtggtggacagataacaatctggtgctggagtttatgttctttttttcttttcttttcctttcctttctttctatttttttttttttttttttctgggacggagtttcactctgtcacccaggctggaatgcagtgatgctatctcggctcactgcaacctccacctcccgggttcaagcgattctcctgtctcagcctccccagtagctgagattacaggtgcacactaccacgccccggctaattttttttttctttgtattttagtagagacggggtttcaccgtgttgcccaggctggtctcaaactcctgagctcaggcaatccacctgcctcggcctctcaaagtgctaggattacaggcatgatccactgcacccctccggagttaatgttgttaactaaccaccctagcataagatacccaaaaaggacttatctactcacttatcaatctccttgctctcatttaaaatagttagatgattttacatttcaaaattgaattgatcctaatattctatatttgcatattcatggagatctatccttgactatttctgggatagcacctcacatgtaaacccataagaagtggtcagggtttttcattattgatgcctgtctgtctctattgtaggcttgcttttctacttggggttgaatagaaatgaagtatagtttcacatacagtatgtcaaacctggatcttatttggattcaaggccatgcccaaagcatactccagatggcccatcgtacaatggtttcacttagagtttttcaactttatggtggtgtgaaagcaatacgcatacacattcagtagaaaccgctcttcgagtacccatataaccattctgttttacacttggagtatttaataaatggcatgagatagtcaacactttatcataaaataggttttgtgttagatgattttgcccaaccacaggctaatgtaagtgtgttctgagcatgtttaaggtaggctaggctaagctgtgatgtgtggtgggttaggtgtattaaatgcattttctatttagaatattttcaactgcttttttttttcctttttttttgaggtgagttctcactctgtcacccaagacagggtgcagtggtgcaatcatagctcacttcaagctccaactcttgggctcaagcagtccttccgcctcaggctccccagtagctgggaccacaaccaccatgccttattgtttttgtttttattttgattttttagtagagacaaggtctctctatgttgcagagagtggtcttgaactcctgggctcaagcgatcctcccacctcagcctcccaaagcgttgggattgtaggcataagccactgcacctagcctgttttcaacttatgatggggttataccccgtcacaaggctataccccatcgtaagttgagggtcattggtactagagagcaagtagcatagcactgaatcataggccataatgtcatcatcagtgataaagtaatgtatttttcaaataaagtttctagcactttttattagagagcaactgataactatactcttgtcattttgaatgtataattgaaagacctagtttgtagttctgtcaacttaagttttttaacttttgatttctagctataaagcttcgtggggaccttaacttatttcaaattgtgttgaacaaatttgatttatatttgtaggtgcaggaagctgtttggagactctggaaaaaggaaagccactcgtagtggttataaacgaaaagttgatgaacaatcatcagctggaactggcaaagcagctacacaaagagggtcatctcttctattgtacctgcaggtatgctagagactgattattattatctcttgccttaattcgtcccttgcacttcctcttatccacctacctaacccatctgtctcttctgcctcttaccttctcccagttaccaaaccttttgattttctcagctgtaaaatcctcccatttgtttgtctcccattttgcaatctctgtgttgtatttctatgtgtatctgtggctgtttctttgcatatgtgaatatctgagagagtgtgtgtatgtgtgtttatttaggcgtgcatgtctccaagacactaattttggagttctaaattttgagttcattatttagattttcattattcaaggaagacaatttgctcattttagttaaaagttttgcctatagtaaatccactaaaatccctaaattatatttactctttcatttattcagttacacccaatatataaaaggcactgttttaggtgctgtggatacagtagtaaacatgagataaagtccctgttcttatggtgcttacattctagtggtggaaaattgataataagttcacaaataaatgatcaaggtatttcatgtggtgaaatgtactatgaagaaagtaagacagggtgatgtggtagctggggtgaagactgattagaattgtcagagaaggcttggcagagtacctaacattttgatctgagacccgaaatacaaggaagagccagtcatgtgaagatttggaggcagaaggaacagcaagtgcaaaagcctaagtaaggaatgaacttggagcttggtgtgtttgaggaacagagggaagattagtgttgcaggagcatagtgagcaagggaatataatagaagatgaagttgggtgggggtagcttatgtaagagttctgattttattcatgtttattgagaagccattgaagtattttaagcagagaaattatggtaaggagtattattttctacaagtatattagaattcaacaggaactgatcatcgtaatagaaggatgaagaaaattacttgtttgttttctattagttcttccttgagacactagaagcttgccaaagggccaggtcagtaattcccacttgtttgactttaaaacctatcctagtttgatgttgcaagaagtaaatgcctcatagaattactatatatgtgtatatatatatttatttacattatagtaaaatgaaattaattttaaaataaaaaacctgagaagaaactggctggagcataatttttcttttagttttactgcttctgtctcttaggcactcagtaaatacttattcattcattaaatatttattgagtaccttctatgtgccaggcattgttctaggcacttggtatacatcagtgaacaaaacaaagactcctgttcttaactgagaggaggcagattcattgattatttcaggagtgaaattgttggtgtccttatcactataatgttggagaagagggaatgtcagggtggctgtgtaacatagaagccagtcttgaactatttagtgagtcaggagagaagctagattaaagagga

SEQ ID NO: 138587 - DNA, 2651 bp, Homo sapiens
gggattacaggcatgcaccaccatgcctggcctaattttgtatatttagtagagacggggtttctccatgttggtcaggctgatctcaaactcctgaccttaggtgatccgcctgccttggcctcccaaagtgctgggattacaggcatgagccaccacacccagccaataattggttatattttcattttaggtaaatcatttattttccccagacctaggctggggggtagtatgtttgttctaatttaagcgattggtttaaataaatttccgatgtaatggttctatgtttaaaaccttatttccagcatacatggtggtgtggtatattgtttaattgtatatgaagttatgatagtaaattactggcaaagattatttcacagtcttcatgcatggtctagtagtttccccagcttattatcttgtctggcagctattacttttggtttcaatttttaaattctgttttcatgaatgaattgtgcttcagtttaaatatgcccagtcctgagaagtattacaaagccatgtgaagacatttttcatgaaatatcatttctgaaatatatcagttgacataggagataaggtatctgctgaatttatattgacattttatagtactctttgtattgctttaataatcctagtatgtatacttattaaaatatataaaaattcacatgtgcagtttttagaagtaccactatattcttggaagttagattcagtcatcagtgggcagcagatgaagtatggaattttctcccatgttacctaatatttttcttcttttgttttagcacgcttcctgggctgttacagtcaatggacttatcaacactgaaatgttatcctcctggccagccagaaaaattttctgcatttttggataaagttgttggattacaaaaataaacactaaactctcaacactttaaaagcaacccccaaattcaacctatgtaatgtgattaaatcaaattaaatacataatatatatttacaaaataatataattaataaacttcctacatctatagaatgtataggaaattttatgttgtgcacatttgcattgggtccaaatcctaattgcagtttagtgaaattactagatttttttctaatcttcagtatgtagtgagcattcacaggttttctcctagaatctcaagtggaattggaatcataaaaatgaatgagatttgaaaactttcacaaagattataaatgtagttagtttgatactccttagaataaaaaaatgaaacagtaacaacttttatgtaaaaaaattttacataagagttagcatctttagctttataatctaaggaaccaaatttaaaaaatgatggattatgctctgtgaaatgaaaagttcaatcattgcctaaaaaagatgatcaagttagttgatctcttgtacttggaaaagctacttttttcctaaagaacagagtggagtggatatattcactttttttttctaaaacatacaaagtgataaaataatcgtgcctaatgtcaaaactttactggtttgagaagaataatcaaaaaggacttataccaataggacttactattgttttttaaggatctcctctcacagtggtaatgaaacattaactgtaacagaaatttacaatttatgtgcttataaaattagttttatgaatgaacaataaactgatgcatataatggcttaaatatatggttttaaaattgacttaacttgagcaagatacattatgaagttctttctgattagagtgtgtggtctcaagacctttacagtagattatccttaagtgtccatagctctctggtacaatgtttagatatagtttatctatcaaaatagaacattcactataaagacctctcttccattccaatcatattatcccaacatgctaaatgttccaaacattttatttggaatgcattttatcatgtttttataggtttatttttctgattgtgttttatttaggctaatattaaaaaaatgcttactagtggtagaaggtggtgacaaagaaatactctgggtagcaggaggaagccaacttggattaaaattttgctgagaataatctaaaaagtgagtaatctggttgagaattcacagcaccataatcataattgtatatcaatgttatgttttaggaaaggtcctattcaaatccagggagagaatctttagtgttttctgggccctcataaatacgtttttctcatttgagaaaattgtgactttatgttggtcacttagtttttatagtttatgatgaagaattaaagagaaacaaatgaaaggcaaggtctactcaaatatcagacaactaaaaggctatacagcccctaaatcctttgctatctacttccccagaataatgcataacctaaattccattatttcatttagcagaggtttaagccgttgttgtcaattgtgtgcagtaacgcctctgacttcccttttgtggaattttgtatcgattttggatttttaagtcaaaggagactttaaaatcattttgatttggcacggattcttgagattatctagtccaattccatcatattcagattttaccatttgcttaaagtatagcttttggcagaactgccc

SEQ ID NO: 138588 - DNA, 6455 bp, Homo sapiens
taaacaaaaacttgcatgtgaatatttatggaaatattattcataatagcccaaaagtggaaacaacccaaatttctatcaactaatgaatggataaacaaattttggtttatgcaggggattgaactatgtagtgatgcaccatgctccaacatgggtggactttgaaaaccttatgctaagtaaaagaagcgagtgacacaagaccacatactttatgatcccatttgtttgaaatgttcagaatatggaaatctatagattcaggaagtagattagtggttgtctggggttggtggggatagagggattagaggttgacagctacaggatgcagagttttattttgggataaagagaatgttctaaagttgattatggtgatggatgcacaactctatacaacaaaccattgaattgtatactttaagtgggtgaattatatggtatgtgacatatctgaaagctgttaaatttaccagttttaagagtacaatttaatttttagtgaatatacagaattgtgcacatatcaccacaaaatagttttagaagatttttattattccagaaagattctttgtgcttatttgtagtcaatgcctatttccactccagccccgggcaaccacttcatctgctttctgtctctagatttacccttttggcatatttcatataaatggaatcatattccttttgaaatcatacagtttttgcttccatcttcttaggaccagtttctccaatccttgttaatgcttgttactgtctgtattgtttattacagctatcctggtaggtatgtaatgatgtcttattgtggttctaattttcattttcctaaagatcaatgattttgaatatctttttatgtgctcattagtcattcttatatctttggtgaaatgtgtattcaaatcttttgtctatttaagaaattggattttttttattgttgacttttcagagttctttatatattttggtacaaagtttttctggttagatatgtgatgtaaaaatattttattccagtctatggcttgtattttcattctcctaacaatgtcatttgcagagcaaaagtttttaattttgataaaatcgagttaatttttttttctattatgtatctgagaactcactgcctaacccaggatcttaaagattttctcctatgttttattttttaaaattttgaagttttattttacatttataccactttgagttaattatagtacaaggtgtgaggtataggttgaggatccttttttttgcatgtggatggtcaattgttctggcaccacttgatgaaaatgctatcttttttctattcaactgattttgcacctttgtcaaaaatcaatggaccatatttgtgtggatctacttctgtgtgcttccctgtgtgttaacttttctcttgctctgtctccttttgtcttcctgtccctacttgtgtttttttttcagttttctattacttttctgattctctccctccttctcctgattttcccttcccccattcccttcctcaaaatgaagcatttagattgcattgttttatatatcatacttatttttagtttaaaaagcagatgtgaagcatttgtgtttttctttacaagtacaatatgctggaaacaaattaacttttaaattataatccctttttttttttttgagacggagtctcgctctgttgcccaggctggagtgcagtggtgtgatctcggctcatgccattctcctgcctcagcctcccaagtagctgggactacaggcgcccaccaccacgcccagctaattttttgtatttttagtagagatggggtttcaccgtgttaggcaggatagtctcgatctcctgacctcgtgatctgcctgccttggcctcccaaagggctgggatcacaggcgtgagccattgtgcctgaccaaattataacccttaattaatttttctcagtgaattagtgaccttaacgaaagatggcaatctctcttcccaaactgtgtgtttcagaacttctgcaaaaggcatcacttctccagtgttacagtttctttaaaaaagaaattagtggctggacatggtggctcatgcctctaattccagcacattgtgaagctgaggtgggaggatagctttaacccaggagttcgagaccagctgggcaatgtggcaagaccccatctctacagaaaatagaaaaattagctgggtgtggtggtggcatgcacctgtggtcttagctacttgggaggctgaggcaggaggattgtttgagcccaggaggttgaggctgcagtcagctgtgttcacaccactgcacttgcacttcagcctgggtgacagagtgagacactttaaaaaaataaaaagaaattaaggtaatttcaaattggcatgcaaaggaagtcaagatttattccttttttaccatgtcaaacattatttcattcccaaattataaaatattgctgcttttcctagagggagcagtcatgattactactggatccacagatacaaaaaaaaaaaaaaaaggaaaaaacaattttgaaagcagcttaatgttgtgccttctctaaagccagcttttgacctatttatttttaatacttaaaaaatgtaagaaaggaattggatttttgcatttaaataaaaataaaagacactagatagtatagataataggaacaaataaaacaagcaattgggcctgcctttggcacttagtattttctttggttttctcagaatccagagtaatgtgtctggaaaagtacactagtaaaacattgaaacacatctctcattgtccaactcatctcatactctaccataccatttcaaatgtagtctatccatttgtggatattttcatgctgcttccatttaaatttttatttccatttttaaagaaacacacttttttgcatttttcttttttattggtgccatatagtagtttggaggcattagtcaagaattgtataaagtttccctagcatggctaataagatttagtttctgtgatcctggcagagattattatctagaattaaatgagaagattacttcaaccctatatctgaaatatccaggtaatagccttggcacttagcttgaactgtgccctctgccgctatagattaagggaagttccttctccttttttgtgtttattaaaaaggtattaatgcaaatgcttactggttaactaggttcatgaagattctgtccctccatgtttccctgaaactatgaaaggagcagggaatttggggagagactgtagttgaaaattcagctagagatcttaaagcaattcttcaagcaatgtaatgtggaccaggctgcatcctacacacctgagccttattgtagtcccttttcagcctcgtgcagcagttgccccgagttaagctgcaaagtcagtttccttctagacccaaagctcagctgcttatgcatacttttctcaaccttggtctgattgggttagattgggttaattccactctttcccaaggaggtaactctaagtactttctccctccctcccatgtctcctgcttagtctgagttccctattcctaggaggattggctcttcctcttcttttcacagggtcctgacttgtcctgggcaagccaagtccattgcttctgctcctgggaagtgccaagattctgcagcgctgacttcaactgccttttcaggcctagactttgggctgctttccggatacctgcataagcaagcccttgttactgctacccatcctacctgcaccctgctttttccctcttgccacgctttttttcctctccctcttacccccaccctgtacaaaatgcataaaggatggaaaaactactgcagccagaagtctttgaatgaggcatcaatggatgaatatttaggcagcttagggctgtttcgaaagctgactgccaaggatgcctcttgcctctttcgggccatttcggagcaggtaaaaggaaaacatatcttccctgtactgagttttcagagtttgagacatgggatggtcctgtagtttgccagaagaaacaaaaaaattcccctgctttctagtgaaaacatcgggcctgtcaaggtcctagagagaagctgcctgctcttattagcttggtgcatgcctttgctgaatagtctatattgctgaacctttgctatcttttctgtttttttaaatgccagtttgtaatgtaggaggggtaagataaggaggctaaagacaactttgaaatatatcttgatcctttgtaagcatcccctgcttcctctaattttaatgcctaagaaaaaaattataggctgtgcacataaggagtagaaaaggggatggggcatgacagtcatccttcccccatttcgttgaagatgatattaaaaaaacttttagtaagatgatttaatttcccaatttcctacatatgttctgaataaggaagccttaagtgtccagttcatagtcttgatttagaagtgcctattttaaatgactactgacagtgggctggtctttctcttctttttagttgttttgcagccaggtccatcatttggaaatcaggaaggcttgtgtctcatatatgagggaaaatcaacaaacttttgagtctgtaagtagaatacatacccaggggagaactggtagagtgtgtagcaggtggaaaaataattgtgagcacctaccaaaattaaactatatcatgctgtctcctcaatagcaaatatataattcccaactggctcccttcccagtagctaacatgcttcttgagcctctgctagaattaggttgtttaggactctaattaaaaatcaagaataatctacattttcccactacttacctcgtcctacgccaagaactccagaccctaaaaagttatgttttgattgctgttttatattatccatacagttttattgaacaattaataatagttcatgaaaggtttggctctgttaatattttgcaatgcatattttaaaatacgtaaaaatgggaaccccctctattttcttgcttaatcctgtgtacaataatcttcagccagtcaatttgaggaatcttgtaaaacttaattgtaagggaacaaatgagtctaagtatctagtctttccatgtcacaaattgtataattagagctctgccactaatgattaactttaggtaaaacaacttacagaagacatatttgtacaccttcatgtatttgaattcttgttaatgaaattggaggcttccttttcttttttttttttttaaacacttctggcccttgcagtgctatttgtttcttctgtttattgtgggtattcgcctgctgttcgagttttactcctaattttctcaactggtttcagtgaattttaaaactatgtgaagacttcttgacttaaaagcttgttaccttgaagttcattgtagtcttctctacacctggggaaaggattattagtaacattacttcaaatgcaaggccatagtgtaaagcagtgcgtctcaagtatttctgtgcatacaaatcacctggagatcttgttaaaatacaggttttcattcagtaggtctgagttggggcccgagatttctttttttttttttcttaccttgagacagggtcttctctgttgcccaggctggagtgcagtggcaggatcacggctcgctgcagcctctgcctacgaggctgaagcaatcctcccacctcagcctccaaagtaacttgggactacaggcacacgccacctcactgggctaagttttttgtgtttttagtagagatggggtttcgccatgttgcccagactggtctcagactcctgggctcaagtgatctgcccgccttggcctcccaaagtgctgggactacaagtgtgagccactgcgtgcagtggagatttctgcatttttaacgaactgaagtaatgcttgctattggtttgtggacaacattttgagtaacaaagatgtgtgtaaaattttaaaactacgtaaatgaatctcaattcagtactgagtgatagaaaccagaccccatgcaaagtttatactgtttgatttcccttatataaaactctagaaaaaatacaagccaatctgtagtgacagaaagcagatcagtggttatatgtcagttatagaggggcacaagggtacttacggaagtgatacattcaccatctcaattgtgatgatgatttcatgggtgtatacataagtcaaaatttgtactatttaaattgtgcagtttattgtatgtcatttatttattttttgagatggagtcttgctctttcacccaggctggagtgcagtggcacgatctcggctcactgtaagctccgcctcctgggttcatgccattctcctgcctcagcctcccaagtagctgggact

SEQ ID NO: 138589 - DNA, 2778 bp, Homo sapiens
taccatttttagttttggagatgatatgcaatcatggaactaccactgcagtcaagatatagaatgtttccgtcacccctaaaaggttcgcttgtcccatggtctttttagaaactaatgaaattctctttaaagttcctcagtttaattttgtaaatgcatgttttgtcaaatttgaaatccttagaaatactggtcttgcttgatttatgaaaattgtcattacttaaattggcatttcaaatgaaactcgaaagcataccatttgatgaaatgcactggtatgtggatatgccaggaccaattcctaagatacttttatactccagcttttctccactcatgacttttgtgtatgtgcaaatcttcttgaggtgctgtgcaaagtagatacttacaccataattgttgagctgagcaaaaaacgcattgcaggataatgtagaatataatcagatttcagtaatgctgtgtatttggttaagttgagtttgttttatttttgaagtatgtggagggatcttttgagaaatacctggaacggttgggagatcccaaggtaagatcaaatatgggggtttaatcttttcagagttatttggaatagtaatgtaaatttattcattcaactgtattattttagccagaccccaaatattttatttagtagccagctgtgttgaatccaatagttctcacataagtttagaggctggcaattgaccaattgttttgtgttgaatattgataattgtgtgttaatcccatcaaccatagactagcaaaagagtatacactacttggaaacaggacaagcttaagccttttcactttaacgggggaggagggtggtaatgaattttaccaagaggtcattattttgttattaaacaattcccctgatttgtagttgtcttcctcttatgtgggagtaaaattcataaattcatgctttatttagaaataatttttatgtgataaagttaattccatagttctggacttaaaaaagcacatttactaaatccctactgcctttttattatactagttccatttttattgtgtttttaaaatctctcctattaactgtccttattacttaatggctaagtagggctttagatccttctttcaggataagtttatgttaataagtagctatcacagtattccaagccttaaaacaggttatagtgtgttctacaaattcttcatctaaaacagtgctaagcagctaaaaatttgttgtgcttgaaaaaactacctcctagctacagaatgttttttaaaactcaatacactatttatgtttaggaaagtgctggccagctggaaataagagctctttctctaatttataagtaagttatatcctcttttctttgagagtgggtatgtgcatgcatgtgtgtataagatctcaacggtctcttcaggattggggaaatttgagatttgatgtattgatacctagaatgaagaaagctaagaaaaagtgttaaaatattttaaatggttgaaaagtcaaaagaagaatgtttcatgggatggaaaaattatataaaattcagatttcagtgtctgtaaagctttgttggaacacagttatgctcattcacttacgcattgtctgtggctgctttcatgctaccaaagcaaagttgaataaaccatatagtctgcaaaagctgaaatgcctattttctagccttttgccaaaaaaattgccaacctctgctttaaataaaggagagcaccatcccccaactcacagacatacatacaattgataattggttgtctttaccccttctcctcccaaattaagatacataaaaaaaaatccataggactttaggggcaattagctgtctaccttgaattaacatcatttagcccttttgggttattttaaagccaaacattaaaccggatatttatattactttatatgaataaggtaggcaacttaaaagcacaaatagttgttcctataactatctcttacgtatgccaaattatgtcttcccacttacctttgttttccccatatagtcgggatttcattctttatcgctttcctggaaaacctccaacttatgtcacagataatggctatgaagacaaggtaagaagatgagtgaatgttgacttatataaaagaagttgaatgatgcttctggcttgcctggatattaaatcatttttaacctaattaatgaaaagcatagtctgaatgacaggtttctctgttactagcattttcctctctagtcagttaatctcagtgttgttagccctctaaacagacctgatcgtcatttctctgtgataggaaaaaagccaccccaaaccctaattggcttctcaatgactaaaaaggataaggttcaaactttgaagctaggcattcagcatcctgaaaggtcccaaaccagcttcattttcttccatccttattatgccatgcttccaggtattctgcttttcatactttgtgtctttgtatttgaaactttcccaatgcccctggagtcattttctcactttgtgctcccttagcagctcccaagtaattgtagtgtttattatattgtgtttgttttcatatgtatttctttcattatctgaaagtttcttgagggaagtgacagtgtctactactgcctggtaaagtacttgattgttagttgagaatactcagcagataaattgtttgtcagcatacagcttctccaaaaagtttataaaagaaaagccctttatcctgattat

SEQ ID NO: 138590 - DNA, 2316 bp, Homo sapiens
ttgacttcagtactttgaaatggattattactgaaatagaattgtgatttccaaaaagacaagtgaagaataatagacctgggatcaaataactggattattgggagaagttagcccagggaagagtaggaagacagaaaaaaagaatgcttaggataatttttttttctgccaaggaggcttggtggcaacatctttccacagattgcagaatcattttgagtaactcaggttgctgataccttcaaaatggaagaaccttaatcactagggattatatcccttatataagacatttttttttgttttttttttaagagatggggatctcactatgttgcctaggctggagtgtggtggctattcacaggtgagatcatagcacactatagcttcaaacccctgggctcaagtgaccctcctgctgtagtagctgagactataggcacacaccatcccacctggtgaagacagattttttcaacaaaaattcagaaaggttttggaacagttatataaacaaatttcatcacatgcaacattttgactgaaaaaattttgcttaacaagcatggcctttgaattgttttgggaaaaaaaaacctctagggattcagggaatcagctcagacgttaaactgtcatttttgtagcctgagatgtgccttaattcattgaggaagtctctctagcagtattggtgctatatagtgtattgatatattgctattcagttaaatggataactttcgaaataattgaataaaatccctttcctcccttagtctgagtttggagtatttgggtatttgacctaatttttccagtcattcttggaagttagctgggtcttttggcatctgttaggctttctgttatgttcaataactcaatttctaagtgttcctttttttttttttttttttagcaaatttgtaaatcaggacttgtttggtatattaatgtgattgaggctcacagtgtaaccttagtagtgattttaatcttggcatttaaaagtcactgccaagaaaatctctatgaggtacaggttgcatttccttatatttagattttaaaaatcactttaaaaaaattcagttagttatcagttactgactactgactcaatttcaagttaattatcatcttaatttcatggttttaagatgtgtaacattcacttaattgttctgtgtgtttttctttagattctactctgctactcaagtagtggtcactatgattctgtgtactcaaaacaatttcagtcaagtgcagctgtttgtcagggtatgtgaaggctttataaattgtgggtgtgatttcagatgacttgttttcactcagggacccaccatgaatagcccctttaaaaccttgttggtacctatttgcacgcaggattatgactattttcacatagttaatataaatcttattttgacaattggaattttgaccattttttcttcagctgtattgtacgaaattctctataaagatgtgtttgttgtggatgaagaagagttgaagactgcgattaaattgtttcgaagtggttctaagaagaacagaaataatgctgtaactggaagcgaggatgcccatactgattacaagagttcaaatcagaataggtaataaagggaaaggggatatcatgataattatgtttcatacttctgtgcataatcatttgaaagtggaaggggcctggcaagcttatgagttaggttacatattcacacgtacacatatgttaggatatatatttttaatggggggagagttttaccaaagagatgtgtcgtgagatgcccagacttgggggttttgttcaggtccgttttgtattgctagaagaaacttcagaactatctaattacatgattctcaaactttagttgtataagaattatagtgcttgttagaaaggcaggttcctgggcctactgtcacaaaatttgaggtcaggatgggaccaggaatctgttttttaaacaagtgtgcctaagcattctgatgtaggtaggctgtggatcatactttgagaaaatactgattctaaagtagcaccatcattttctaggtaataactgaggttagttgacacatccagccagtagaaaatttctcagtgtaagttttgggagtgttttagtgtctgcctttggtatgcactgtgagtgtgcctctgaggaaacaactgttgaacagctctagttgaacactttgggtttgaaataataaagtacatgtcttatatttcttcctaattcctagttctgcctgcaaattcagataggtttggtg

SEQ ID NO: 138591 - DNA, 1192 bp, Homo sapiens
tgtgtagcaatgttactacaaacttgccagcttaaaacagcacatttttctcacaatttatgtggattaggaatctggacacggcttagctagatcttctgctgagtgtctcataagactgtaatgaggatgttggtcaggactgagttcttatctggagctttgactggagaaaagtctacttccccactcatggttcttggcagcattcagttccttcgagctataggactgagagcttcaagtttttgctgtcagttggcagaagtaaccctcagctctgctacattgcagtggtgaatatggctgtttgcttccttataggcagcagaggagagagagagaccagtaaaatgaatgaggcagggatcatagggatcaccctaagagtgtgttctcacaggagttgtaaaatataggaggtaatctgctaagtatattgtagcacatacttataaaaacgaagcataaatgcaaatgttggaatgaaaaagcatttgccttatttttagaactgagttaatttaccactaggtggtggtgtagtcattaggcttaacataagtaaattcttcatttataaaaagctctttgctctaaatcttttgaattaggatggaagagtggggtgcctgctacaatgctgaaaatataccagagggctacaataaaggaacagaagaaacaaaggtttgatattttctaaggcaaagaattttcatagtcttggcttgcagcatcatgacttaaactagttaaagtcagatattatattctagttatatgggttgagggaggagttggtcattttcctttgtgaaagtcttacctatctttaaacttcaaatgcatacttaatgttctttgaattcttatttttacagaattttagatttttcagaacaaactgaacacttcagaaatttcaagagcaatatgtttttaagttaaatattacaaacccaatatttagtttgtaatcagtcttctgacgctaaggtttttttcattaaggaatacaatgcctatctttattttattcaaactaggtgataatcatggtttaaagttagagaaacagaaatttcaccatccgtataggactaaaatcaaataggccttcagtttgaggctagctaaataagtcaaatactattatagcaatctctgtgtatacctgaggtgcttataa

SEQ ID NO: 138592 - DNA, 4134 bp, Homo sapiens
aagaaacttaattcttccttcttcatagaaggaagaaacttaattcttccttcttcatagaaggaagaaacttaattcttccttcttcatagaaggaagaaacttaattcttccttcttcatagaaggaagaaacttaattcttccttcttcatagaaggaagaaacttaattcttccttcttcatagaaggaagaaacttaattcttccttcttcatagaaggaagaaacttaattcttccttcttcatagaaggaagaaacttaattcttccttcttcatagaaggaagaaacttaattcttccttcttcatagaaggaagaaacttaattcttccttcttcatagaaggaagaaacttaattcttccttcttcatagaaggaagaaacttaattcttccttcttcatagaaggaagaaacttaattcttccttcttcatagaaggaagactaaggattgtgagtttgtagcatgattatttttgttttagtctccagaaaatccatcaaagatgcccttcccctataaggtgctcaaagccctggatccagaaatctatcgtaatgtagaatttgatgtttggttggacagcagaaaaggtaaagaaatatcaacaggatacttttgaatcctgacaaatccaggagtataattttgcaaattatggtgaacatctcttataagaaatactgttataaaaaatagcctgatgctttttatcttactttatatatgatttaaatccaaaggagggaacatagctttagaagtgggagggatcttttaaagcctgatgtttgcctgggacttcaactttgcaaagactgtgtggagacaatttttagatagcattaagaaacttagtgactgaaaacaagctcatcttaaattccaggtgttaagaccaccttccttgataaatgagtaggttaggcctgtgggtcaaatctgacacaccaactgtttttatgtggtctatgagctaagaatggtctttaattcttaaatggcagaaaaaattaaaagaataatatatcgtgacacatgaaaattatataattcaaatttcagtgttcataacattttacagcagagtttgagtagttctgagagtcttatggcccaagaaactgaaaatactatctggctctttatggaaaaagtttaccaacccttgaaaataggtcattgtttctctccttataagataactaaagtgatcaacctaggccttaaagttttgccttcaagataagcctttagtatttcacattcaactccttgaaccctggtaaacctagctgtagttaacaatctagaatgaggttaagaccttgggaaacacagtaagttgttaaaaaaataataggttgatttgagaagctgaataatgttactttcaaattgtacctcgttagtgtttgactatctctgattacaaactcccaatttccacctatttgttttttaaagcacaaaattattctggcacgtctttttaaattgactgcagaaataactcatccagaatgatagaatcgccctttgggactttacccctattttcacttatagtggtagcgttgtcaaaggcactacggtaaaagtaaatgaggaaattaaatgatataggaaaggaaccagtttagttgagcttgaatcttcattttcttttaatagaacttcaaaaatctgattacatggagtatgctgggagacagtactatttgggagacaagtgtcaggttagttccttcttcaagaatcagtaatttttttaagaatgtgctttttgtcatgatatgagttgaacaagacttatttacaaagtactagaaactttttatttatatttttaaagagatagggtctagctctgttgcctaggctggagtgtagtggcatgatcctggctcactgcagcctcgaactcctgggctcaagtgatcctcctttcctcagcctctctagtggctgggactacaggcacataccaccatgcctggctaattttttttatttttatttatttatttatttatttttattttttttttgagacggagtcttgctctgtctcccaggctctggagtgcagtggcatgatctctgctcactgcaagctctgcctcccgggttcatgcctcagcctcccaagtagctgggactacaggcgcctgccaccatgcctaattttttgtatttttagtagagacgtggttccaccgtgttagccaggatggtcttgatctcctgacctcgtgatccacccatctcagcctcccaaagtgctgggattacaggtgtgagccagtgcacctggactatttttattttcttttatagaaacagggtcttactatgttgcccaggctggtctcattcctggcctcaagtgatcctcccaccttggcctcccaatgttgggattacaggcatgagccaccacacccagccgaaaaaaaaaatgtttctttaatgtctgtgttaaattttaattacaaatttagtgattagatgtaaggttctttcagtatgtgctgtctccattgatccagactggcagtgttgatacgaattactttaaaaagtagacactgaactccatttggggaaaagtggtattttgtttggcattagctgtatctgtcactagtcttgagactagaagtattctcttttcaggtttgcttggaatcagaaggaagatattataatgctcatatccaggaagttggaaatgagaacaattcagtaacagtcttcattgaagaattggcggaaaagtaggaatatgataatttgttgaattactgaaatctttggttcctggttccatttcgtaatattaaattgagaattaccaggatgctagtaagagaaccagaattgtatctactgttggcctaggatgacttatcttgaattataaaagcatgtgctgaagtatgaatcaatatagatattagatatgtataaaagttttcaaatcttaagacactagcctacttattagaaatattaagtacaacagaattctgatacaaaactgttcatagtaattgcaaagttgaattaataactgagcctctgccagcatgaagataagctaatctagtctttctcaaactttaccatgcaccagaattacctggagggcttgtgaaaacacaagattagtgagcccagtctctaaagtttctgattcagtaagtctgaggtggggcccatgaattttaattttggacaagtttccaggtgatgataatgctgctggtccactttgagaaccattaaatgaggctgtgctgctctaacaaccaaaacatttcagcagcttaaaacagtaaggtccttcctccttcatttagcatgtccatagtgggtcagcaaatgggatccggttcaacagagattctattttaacacgtgcatccatgatcatagggaataaaatgagaacaaaccacttgctgaatcttaaaatgtctcatactttattaaccagagtggtttacattcccaagcctcatgtcaatggggtggggaaatttaatcctccaaggaggcacagcaaatatttgtgaactaatacagtctaccacagtctttcttctgaaatgtcatcggtactagaaacagcagtgaaattgtacaaactactcttaagttttctaaactaataaaaaattaaacaaggaaactggtgtcaaccaggttttaatagaatacacttgaagtataaggggtgggatacgtgtattgaatgaaagttaagtctgtgttgcagtatcttcatggtgatacctttaacttttaaggcatgttgttccactggctaacttaaaaccagttacccaagtgatgtctgttcctgcctggaatgctatgcccagtcggaaaggaagaggttaccagaaaatgcctgggggttatgtcccggaaataggtttgtatgctaaaggttgttattttgtttttcccttcctgtacctgcttttacttacctgcattgtactattttttaaatgtatgtcatatgtcttgttgtagggtagggtttctcaactttagcattactgataatggaatggatactacttcactgtcgggggtttgtcctgtgcattg

SEQ ID NO: 138593 - DNA, 2580 bp, Homo sapiens
tgcgatcttggctcattgcaacctccacctttcgggctcaagcaattctcctgcctcagccttctgagtagctgggattacaggcgcacgttaccacgcctggctaattcttgcattttcagtagagacggtttcaccatgttaactaggctgtccttgaactcctgacctcaagtgatccacccacctcggccttccaaagtgctgggattacaggcgtgagccaccgtgcctggccatggatgactcagtgttttgatgacctatactaacctgcccatgctggggatagtgccgagatatacccattgatacagaaattacctgctggttttgtccttccaaataaaagatctagtatatccttcaaaaatacaaaaattccctccctatgtttatttggtttgttcctaggggaagcattggaaagtttaaggcagtgtggtggtgacagtacactgggccttttgctttgattatgaagcttatttgctacctctttgtttgcctgaaagttatatcagagatggacataaagcaacagaagaagatgttcaagaaaattcgagggaaagaagtttacatgactatggcttacggcaagggagaccccctcctcccacccaggctgcagcacagtatgcattatgggcacgatcctccaatgcactactcacagacagctggcaatgttatgtctaatgaacattttcatcctcagcatccatctccgagacaaggtcggggatatgggatgcccaggtaagacattgacagatttgtattttcatggtctagggaaatatgaagcaattgaagagatccaagaagatagaatgccatcaagatgagggtctctgtgacatacagactgtatttcattaataatagttagccctaatgccagtattgcagagagcagagctctttctagttgaatgtttttagaaagacagattagttctatttaactacagagactgactacttaggtattagtgaatagagagttctagtttcctttctctttattcttaggaattcatctcggtttataaacaggcacaacatgccgggccctaaagttgatttttacccaggcccaggtaaaaggtgctgccagagctatgataacttctcttatagatctcggtaagtattgtgttgaaagtcagagaaaattggtaagtctgatttcattgctgaacattaatgttttaaaaagtgtcaactttgagatatttgaactgttatttagaaattaggaacaagttactatatttcatcatttttacttttttattatttgaaccacttaagttcatttagacgtagtcaccgccagatgagttgtgtgaataaggagtcccagtatggatttaccccagggaatggacagatgcccaggggcttggaagaaactattactttttatgaagttgaagaaggggatgagactgcttatccaactttacctgtgagtggatcaatgctttactcaaaaagctgtttacttttttcatttatttttttgaagtaaaggcaatgtggataaattttagattttgtacaaataaccaaacaaagccttttctggaaaatgaaaatgagaaaagagacattttctcccagctgttcctagagaagggaatagaggtagacttgataatcttgcctatagagtatgggttaatattttctattttcttgatttttacttcatattttttgtattctaaactgcatggaaaacatttaattacagagttctcttacaatagcagttcacattgttaggctagtttttaaactgccttttaaaacatccctctagcttttttttctgactatatagtgagaactgcagtgtgtgtgtgtctctctgatacagaatcatggaggtccctctacaatggttcctgctacttcaggatactgtgttggaaggcggggacatagctcaggcaaacagactttgaatttagaggagggcaatggccagagtgaaaatggtgagtcaattacagttaaatattttttaaaagattcttgtggcattagcacatcaggccagtgaagtagaccaatttggttttggcgtctctctctgttccagtagcttagttctgaaagatttatataagttcttaatgcttgctgggtttttgaatatgtcctggtatttctcagaagagtagacttctatttcattaggctgctacattgttataacttgttttcagctctctgcataggtctttagtgagttttgacttggtgtcagatatcagtatggaaaacatctattcgttgttagtagggcactattgatagttgtcctcaccatttgtatatgttaggcttttcgtgtgactggctattattttttaagactactatgaagtaactattcgatagttacttcatactatgaagtctatttgatctataaacattactctttattgaaccctacgtgatacccactctactaagtcattatattcataatatagtccttcgtgtgctcttctgaggaatgtgctgtccctattttacatatgaggaaattgagattca

SEQ ID NO: 138594 - DNA, 1007 bp, Homo sapiens
ttttacagtgaagaattgaggcacagagattaaataacttgcctaaagtcatgtagttaatcagaattcaaatctaggcagtcctcactccagagcctatgtgcttaatcaccacactgtagcctcactggaaaaattggacacaactgagttttcacttctgcctgacctctaagagctaagtggattttcagaggagaaatttgtacagcttacagctagtctgtggcttcaatatctgttgactagtgtgaaagctcatatcacttttcaggatgtatgcattttagttttgaacatataaccataaaactggtggaaaaagcaagtgctggccatttggctctgctgagctaaaaagacctatataaacacatttcttctgtcttgtcttttttccccagggcgatatcatgaagaatatctttatcgtgcaggtcagtaagatctagaagtgatctggcattcatcattgtttatagaatttcaagctataaaataatgctcattttttactttggctatattctctagagccagactatgaaacttcaggtgtttatagcacaactgcatctacagcaaacttggtaggtatttaataatagcaaagagttatagctcctactatgtactagggcactgttaagagctatacatataaatgtatttaaatcagaacaaccctgtgaggcttagtatcattctcattttgaagatgaaattgagacagaaattaactcgtgttctggaactaatatatttagagatattctaacataggcagtaatgatcttttagaaggttttattatgatttttttattagaatggatgatacatctcactcaatataacaaaagtttgcttctcctttatgctacatgtctagtagaggtctgtagaagggcttgctcaggtacttaggctgatggaaattcatccacaattgccaaggcaggaaataaaattcggtaaatggtgcactggctcttagagtttccacta

SEQ ID NO: 138595 - DNA, 3703 bp, Homo sapiens
gatagaatgccttttttttttaagcaaaactattgttggtcctatggtgcttcaagcttttaaggcaaagatcactgaaagactgtttagatttcaattatcagttacattttagtatctacatcaggacttgagttagatgtgttgaggatttctgtagatatgtaacaaaacagtcacctacatcacattttagagtgataacttttagagctttgtcttaggagtcacttccaaatttgaattttttcaggactgatcactttcatatagttttaaaatatgttgaaacaaagttattgatgtgttgtttgtttttttatttaactatatttttgtattaaagtctcttcaggacagaaagtcatgttctatgtctcctcaggacacagttacctcatacaactacccccagaaggtaatcctcatagtgttattaagcagttacaatggcctgaacacagaaaaatgaatttcctcttttcatttaccttcatcatacttcaaagcaactgcttttgttcctttaggtattattgtaccttctggtgtctgacacagtgattagtaaattaattcaacaaattattgagcatctactgtgttccagacactgttctatgtgctggctttagattactcatagtctcctgtgagcctcttttatataaagagtgagttaatctaaattacccatcaattctgtctcattaactgaaacttaattttaaagctttcctgtagaatggagagtcagcattataaaaaggtagctgaaaccataggagtaaacaagatcatcctgggcaaaggaagagattgagaagggcatctagaacagagcccatggattatcaaattttagaaaatgggcagagaaggaccatccaagagggaggaaaagcacgagagaggaatattatggaagccctaggaagagaatgtttcaaggagcagccaggtgtcagttgctgccaagaggtcaagcaacataagacttaacaaaagtctactaagatttgttgacatagagaccactggtgactttgaatacagtttcagagaaccagtgtgggtagcagccacactgcagttgggtgggaagaaaatggagactcccagtgaggacagtatgttcaagaagaatctgttaccatttactgaatatctttctgtgcacagccctgtactgggtgctgtggaaaaatagtttattctcttaaggagctgtggcctaagcagaaaaaaaaaaatacagtcttacaatgttataaaaaatgcaaggcaccttttctctttaaaaaagagaaaagtgtaggccagatgcagtggctcatgcctgtaatcccaacactttgggatgctaaggcgggcaggttacttgagcccaggggttcaacaccagccttggcaacatgacaaaactgtctctactaaaaatataaaaaattagctgtgcgtggtggtgcgtgactgtagtcctaagctactcaggaggctgaggtgggagaatcacttgagcctggaaagttgaggctacagtgaatgaaatcatgccacttcactccagcctgggcgatgggagtgagaccctgtctcaaagaaaggtgtttgcttgtgtggggcaatatatatgcatgtaaaaatgaattacaaacctttggaataatatgcaggaagcccagaggttaactgtttggggagcgggcaactaggcagacaggacagggcttggagggaaactttccattgtatacgatttaatacttgattttcaaatcatattaatgtattacctttttagaaataaatgaattaaaaaattaaagctctcaagtgacctaagatcttctgaaagaaataaccttcctatataaggtttacataaagattgactttcagtgttttagttttctaaactaattactattttctgaagtttaggatcagataatctactgtttgaaaaaccaaacttaagagttttgaactttcttccacacttacagatgatgggaaatattgcagcagttgcagcttcctgtgccaataatgttccagctccagtcttatctaacggtgcagcggctaatcaagctattagtaccacttcagtttcctcacagaatgctatacagcctctctttgtatctccacctacacacggcaggccaggtaggttattagcagatgcttactttggaagcctcttttcctattcatgaacatgcacatccagctgttctggtaattacataccattactttaatttccagaattaaatttatttaacctacttaattatgttctgccattgaggaatccatgagatttgagagtcagggattcaagtttattcttgaaaatttcgtgctggtaagattttatacctttcattttgctacctgctgaattaggggacttgtactagtttctcaaactttgagttaagttttatcatataagagtgaagatagcgatgcttctcaccttatagcaaacttttcaggaatttattctataaaacacgttcctttgtaatgaataattgtcctgtaaatatcataataaaagatacaggctctggaatttaaaagatctgggttagaatcctggttttacaacttattgtgtaattttgcacaaattattgaagctttttatctgtggcttgggggcactgatagtaccaattcatgaagtggttgtggacttttcagtaagttaataaaattttaaattatcagcagacttctaggaaggtggtggcaacaacagcattagcttttctgagtctcaaaataaaaatggaaatagtgaagtcaaaacccatgacacctacaaaaatctaggtgacaaggtatccccatgaaccccaggatttaagcaggtagggacaaaccactagtcacaagacctgcatgctatcagggtctatgagggagcaagaacatagaagcattgaggatgttgtcttatgtacctgagaattccaatgaataagaattcactgaaaagtagggcagacaatttggaagcagcagccaaaactgggaagggatttggtctctctaatactaggtgagtgcatgaggcacatagtagaaggacttgaagggcttagaacagtttaacctctaactcttcaaaattgacctgccagagttcccttttaggacagtattcctcactgggaagaaactgctaagagtggaatctgaattgatcaggatagagaaaagagcaggtcagggaaaagaacaaaagaaaaggattaaggtcaaatgctacacaaatatatcttaaggaataaaaagcagaatatccctacagacaatgaaaacatgttagaaatgaaacactaaacagatctaaataaactaaaaactgtgacaaactatttcaaaatgagctaaagatattaataatacaaaacattaaagaataacataaatcagaattagaaaaactcacctgaggtgatagaactcaggaaagaattataaaggggagaaggtcattttagtaatggagactaaactgtaatgagcttgagcaaatacaggttgagtattctttattcaaagtgcttgggaccagaagtgttttggacttaggatttttttagattttggaatatttgcattatgcttgttgagcattcctaatctgaaaatccaaaattctccaataagcatttcc

SEQ ID NO: 138596 - DNA, 1948 bp, Homo sapiens
agtttgaatttcagattttcaaattagggatacccactctgtatgtacagcagataatgctttaagagaaataagagtgctttaggctttaaattttttttgtttgagacggggtattgctctgtcaccaaggctggagtgcagtgacatgatcatggctcactgcagcctggatctccaggtttcaagcagtcctgctgcctcagccccccagtacctgggactataggcacacgccaccacactcggctaattactgtgtttttgtagagacagggtcttgccatgttgcccaagctggtcttgaactcctaggcttaagtgatccacccacctcagcctcccaaagtgctgggattacaggcatgagccaccacacccggccataaactttagaaaaaaaaaaaaatgtaagaagagggaaatctaaaattgaaaaaaaaaaatgaagataaagatttaaaagcgacatatttgaagttaggcaaatgagatcaaacacagaagtctctgaaaaaaccaaagtaaaggaacaaaataatactaaaagctataatttagaaaactttgctgaagttttgtattaggttgttttcacactgctataaagaaatgcctgagactgggtaatatataaaagaaagaggtttaatttactcacagttctgcatggctgaggaggcctcaggaaacttgcaatcatggcggaaagtgaagggaaagcagacaccttctttacaaggcaccaggagagagagaaagaccaggagaaactgccatttataaaactatcagatctcatgagaatttactcactatcacaagaacagcataggggaaaccgctcccatgatccagccacctcccaccaggtctgtcccttgacacctggggattacaactcagtttacaattcaagatgagatttgggtggggacagagtcaaaccataagtttaaaaagttttaaaagtacatacttgaaacagcaccctgaatacctgagaatattgacccagagcaataaacagcagaatattctaataaagttgctagagttaaaaagtcctaagtatctaagagtctatggcatataagagaaatacaatgataatcatcaaactttgacagcattgctttatgctagaagacagtggaataacatttaagatactcaaggaaagaatatgtgaaccagcaattttgtatccagtcaaactgattttcaagcacaaagggcaacatgtgagaaaccaagaatattcttcccatgagcccttcctgatgaatctgtgagaactgtgctgtcaagcagggtaatcactagccacgtgtggaaactaaattaattacagttaaatagagtaaatctgtagttcctcagttgcattagccacatgtggctagtagctactgtattggacagcagagatatagaatatttctatcatcacaaaaagttgtattggacaacagtgtactagagaatgaactttgagttttaggctaccagaacaattagagacattgttctggtattgtgtaccagaacaattagaggcagaacaattagagacataagacgtgatggtaagtattaaatacatagttacctgtagaagtaagacaaatgagggctgagaagttgagactatactatgtaatagccttatgtttggagggtgtagatgtagttatttttttaaatgatagaattgagagaatatgggcaaagcattttttcatgctctcagtcacatcagattctttagtttagatgctcagaaagttattccgagactatgtaatgtgggctaaagcaaatgagtaatggtgggatattctaattttatcccgtgtccttgtgaaccaggattcttagtgtggaaaaaaggtaatgcagatgttatagaggttaattaaaagcttttatagtcttgaacttgaat

SEQ ID NO: 138597 - DNA, 1049 bp, Homo sapiens
cttctgaagtgtcctgaagcagactacagctacatggatgggggaaatcagcattctgaatgcattacgttgatttctactagtattttagaagacgtttctataattcttgagacatcccttgaagtgtatctgttaagcctgtggagctcttcttaagtctgaggatgagaagctcatgcatctctatagaaacttgaaattgtaaaagcttttacttagagggtttattgtaatactgtgcatttataaggaaggtgaattcagacaaagtaacctccaaattgtgtctactcttgattctttcaggcccgtgagaatgtatttagccacttctatgtcttggtttttacctagtgatcataatcacattctactatcttcagctaattgcctttctccatttgcttttttttaaaaaaatggcatgatacgttttcagtgctagtttaaaaggaataagagcagagctttgttggaggagccattttatttaaaaaaaatctgtatctagaacatttggggatattctgaaaattaagttcccctcccaaaactgtaaaagtagagatttcgaaatatatgacaaaactccaaaacagctagttgagcaagctttaaaaacttactgtttaatttagatacagtataattcatttttttggtgcccagttctgtgagctttgacaaatgcgtagagttgtgtaaccaccaccacaatcaagagataattgcatcactcctaaacagttgtttatcaagttttacatcacctgaagacacagacctattactgttagcctgtaaatgtacaaaagataagatgagtatattgttagtactggtcactaaatggaaacaatgtggattatgtcttgctaaaatatcagaataacaaattcagcttgtgtgaattgttcctatgctcctatgctaaactcagtgtgctaaaactctgactttaaacatttatagaatgataagactaaactttctatgtttctcagggttaaaatgataatgcagataacaaaatgatgaaattttgt

SEQ ID NO: 138598 - DNA, 2034 bp, Homo sapiens
tcttatgtcaaaaacttttaaatattgattatttctaagctatagtaacaggtatagaaagctaaagggataagatattgtatctaacctgtttttagattctgtacctccttagaaatggaacgttcatgatttaaagttccctatattcctgagatgctaccagtagaaaccttcaaggattgctaaaatctgtagtctgtgcactttaatccatctcttattagcttctgcattttgtgatttgactgagagtgacagattgctgaaaacattcttaaatttgcattgggtattaaactaagtaaaaattttgctttagttatgttttatttatgtacctgttagctaaatgttcaaagtctgatagtcaaagctctgcctcttccagttttttcccttttaatttccaatacttttcttaaatcaaaatgacctgttatgaactagttctccattggtatgtctaagagaatgtagacaattcactgtccaagttttttttatacccaaaccttaagaattaagagttctttgaccatactggagacaagaaaagtagatgagcctactgttcataaggtgttatagttgtgtattgctactttatgttttgtttctttgttagtgattgcctcaccatcctatccatgccattctgctattcctcatgctggtgcctctctaccaccaccaccaccaccaccaccaccaccaccaccaccaccacctcctcctcctcctcctcctcctcctcctcctcctcctgctcttgatgtgggagagacttcaaacttacaaccaccaccaccactaccacctccaccttattcctgtgatccaagcggcagtgatttgcctcaaggtaagtagattttgagacttaggtgagggatctgagacttaaaaaatattgttagagcatatctctctttggttgacctattggggaatggggaaccaaatgaaaattgacttgagaacacaatactggaagtgactaaggaaaggagcaattaaaagctgaaaactgagaatatcttctacataatcaacaagtggatggttgagttgacgtgtgctgctgttttgttttgttttgttttgttttggtagctacatgtctaccctgaagaagattctcaaatgaatatctttgcttttcttaactgtttttccttgcaaaacaggacttggtatcaaatttttctttatttcttaaattctttccataagtgcatgaattattgcagtcttttatatttagaatttcaactgaattttaaagatttgggggagtggggattaggagtcttatctgccttgaatttcagctgtgttttcttaaacatctaaggagagtagtttttcattggaagttctttattactcagtttggcatatttctcaagagaattatagttgagaattgtttgtagcttatactttcttgctataatattttcttggtttttctagctgcttctctatttttgcttttttttttccaacccctaatcaccaagattttctttaactcccttctgttttttccctacctttaaacttccctgttacttctgtgtagtttattcctaaatgtagctagccttggcatcagaagttttagtttcttgtctccagatacttgctagacattttcacttagctttttagttttcatttcaataatgaaattcctcatatttatcttttccccagaccacacaaaacattgacttttctccttggttttttattttgttaatagtggtatcatttccacctaattttcccaatatctaaaccctgatttctttactactctcccttcccttacctacctgtacccgagatgtacttagtcaccacataatgctgattttgtatttttccaatattttactatgacaatattcaaacattcatccaagttgaattttaaaatgaagtcatatctatcacttagattctatcattaacatttatactttatcacatatctatccatcttcccctccatccatctctatt

SEQ ID NO: 138599 - DNA, 1049 bp, Homo sapiens
tattatactcttaaaagactacagtatagtgtataagcataactttttttttttttttttttttgcaacggagtcttgctctgttgccaggctgaagtgcagtggcgcgagctcagctcacagaaacctccacctcccaggttcaagtgattctcctgcctcagcctcccgggtagctgggattacaggcacgtgccaccacacctggctaatttttgtatttttagtagagacggggtttcaccatgttggccagaatggtctcgatctcctgacctcatgatccatccaccttggcctcccaaagtgctggcattacaggcctgggccaccacgcccggccataagcataacgcccagtacataagcatatttactgggaaaccaaaaaattggtgtgactcacttccttgcaatattggctttatttttttctggaaccaaagccatgatatctccaaagtatgtctgtatcatattttatctattagttgaggaacatttgggttgcttttactttctggctattaatactgctacgtgcgtttgtgtatacaagttatttgatacatacatgtatcaagtagaatcccatgccactcatgaatttatttcctactatttttttaaaatattatgtagcttgagcattaggctttatgctgtgctcctatataatagtcaaaatacaagctgattttaaaaaaaaatggcaataaatgtatttgtatgtgtagggagtctccaacttaaagagggattttctaaaagttcatctgttagtggaactcaggttatattactttataaataaaaatatgtgtggatctcaggtcaaacaataaaaatacatttagaggtccaattggaatgctaagaacagtttttgttcatttatgaaatagtttagtttcataacgtcaagagaaattaccttgctcattgcccttctctttggagttctggtggtggtatgtcagtcatggtaaataaaaacaggatgaattgtttcatattgttctaattgtctcagcaggcatcactaatct

SEQ ID NO: 138600 - DNA, 1022 bp, Homo sapiens
tttttaaatcttttaacaatacaagcattttttctttaaatatttgacagcatgattttcgttgcctgtatagtatttcattacgggtatataatttatccagttccctgttgttaaatactatgtgcaatgttttttgcttttaaaaatactataaaagacacctttgtatacaggtcttttagattatttcctaaaagaattcttaggtttaaatatgagatacaaatgctgcaaaagatcctaaagttctaatagagaacagactgtcaagtttttaggtcaaaaaagtcattgctacctcacctgaaaatcgtggcccaattcttattttttttttttttttgtctgtggggaactgtattacattaagaatagagaagagtgaagtttcttatttttttgttgccctttcttgctcaagtgctattaccacagctactggcactccatggtctatgtgccacagatgcagcagcagcttcatgtagagaattatccagtctatactgagccacctctggtagatcaaaccgttcctcaatgctacagtgaggtgaggagagaagatggcatacaggcggaagcatcagcaaatggtgagtgtgtaatgagattgccagcaagaaagacagttggattttattgtgtgtaattcaataatagctttcatatatttcatcaggtccatgtactacaccagtgattctcaaagcatgatatgtggacctcttgtggtccctaagactctttcaagggattcatgaggtcagaagtgttcacaataatactaagagtttatttgcccctttcactggcttgcattttcattgaggacatagaaaccagtggtgggtaaaactgctgacacctaagcactagttggtactgaccccagactctgctagtaatcagtgtttttctcactgccacacacccatggtacaaaaatgccaatcttatgtttttttgtttaatcaaagacatttttactaaatttttatccttgaatagttgtattt

SEQ ID NO: 138601 - DNA, 1489 bp, Homo sapiens
gaaattaaaatgtgatcttaatgacattcaggagatgacacttttagggtgttcttcagagctatactttcaggtatagaccagaatgtctagacacctgagtttttcattgctaaatggttattcggatgatgtatactgtaaaactattggataactcaattgtgaccacctcttacaagaatttaattaactagaaggactctaaagaatatttatgtatttagcttgctgatacctaaatcatcccagaaagatagctgtctgtacattgaatagatttgacacatatatttcacagttttttaatttggaaattttcatattatctttactcattatttgtatttaaagtgctcctgctgcaattgctgtgatctttcttatagttagttttattttcacacataagaacatccatttatgttgcatggggttctgttttggtgaatttttgtatataaagtagactgtatacatcctttctttcagatacttttccgaatgctgattcttcatctgtccctcatggagcagtctattatccagtaatgtcagatccctatgggcagccacctttgccaggttttgactcctgccttccggttgtgccagattattcctgtgttcccccctggcatccagttggtacagcatatggtggttcttctcaaattcatggtgctataaatcctgggccaattggctgtattgctccatctcccccagcttctcattatgtacctcagggtatgtaagatccagcagtatgaagtattcttgcactgccattttcttgctgtttttgtttttaaaaagtattttatgttagtggttaaatgatttaggtgattagtgtttactattgtatttgtctttaaaattattttatcttttgatttaaaatagtactttaaaattaaggggtattattttgggctgtgactaaggaaattgagatggatgtacaactagccccatattgagcatacttcattgtattcagctgttttcctgtcagccatttgtcagctttatattagctgatggtaccaattgataaaatgaatataaagtatttcattggttcaaaaatcacacatcatattaaaccatgcagaattggagtaacttccacttttttctagaaagtaaaaccaagagcctttgcttctggataactcacttaatattaaattaaagagctcttcacgtttcttgagaattatctgaagccagttgcattctgtgatatcagttttgaaggcacatggttctctgctttagatttatcccatatgctattgtttaatactggatgtatgtaagtgttttactgcactgtattgaattggtgtcttttgcacagttagcagtaaataaaaattagcatttaaaattgccaaaacgagtgggattttttctttttgcattttcatgtcagcaaagagtaccggacatttgattgtttcaacatgttttttctctg

SEQ ID NO: 138602 - DNA, 1043 bp, Homo sapiens
caacaaggcttgtttgtattcttgccctctctgagcacacattccttccttctgggtgtgggacaggatcctctctggaatagggggtcttatgacagtcaaaccaggtaaatcagatagttttttatgaccagtttttacacagaaaggtggagtaatatctttaggttttagaaaagttagagtaatatttttaggttttatggctggctttcaggaaaaaggggttctggtttctatgacccaccttggggaagagggattctagtttctatggctagctttggggaagaaggagactgagagataggagggcaggagaaggtcagagaaaaacttgctactgaggccttcattcgggggtattgttttctgagtccagacattgtcacatcttaccatttttgtttttagacttaatcttgtatctctgaaggcctggcttggctttggctttggctttggcttgctgtgagacacatttcatcatccttttttgccttctccctttcatctatctgaagaccacaagatgttctgtattgatcagttcttctctgaggggcaaatcgtcctgaatgctttgctctgtctcacctgacaaacagctatttaaaaagtgttctttggttgccacaaaacctatttatatcgctttcttaaaaggttatttttgtgactcagtctctcctttccccctgtggctacaccttggccaaaaagaataatttgagacatcagggcttgaagtacttgaacagttgaaggtactggagtggaacattgcaaagaagatacatcttcaatgtactgttctcaagatgattgatattgatgagttctaaataagccaatgtactaaaggtttctgcttcataatagacagtaccgattggatttgtttttgtatccttgattttaagaaggccttgcactgtgagttagcatctgacaacttaaggtggatggtagtgcactaatgttttaataacaaccaactgtgtgtactagtgttttaacttctctgctaacctcctgggttc

SEQ ID NO: 138603 - DNA, 1064 bp, Homo sapiens
ctctgcttttaaccaaatttcagccatttagaattgtttggggaaggaaatacaaaggcactgtaatttgtttggaaccctttacttacagccccttcttgacataaatctggttacgctaaaggtaaaaagctggataatttctcatagccaggaaaaataattaaattcatttttatgctgtatatattctcaaaactgattgtggctttctgccttgattaagagcagatgaaaacattgagtcggttttactgttgaaatttaagacttatgaatttaaaacagctttcatttccttaaagcttataatcaaggcataacctttcaattagctttggatttaaaaggataaacaaatcatgggattttttatgtgaacaccagacattcagaacttagacaaatctccatagataatgaatgatatagtctattgggaagggtggagcataaacttaatctagacttttgtaaatctgggccaaatttagttcatttcatatgaaacctctttaaggccttttatatttacgtttataataaagaatttatataatttatataagaattcaagagaactaatacaggttgagcatccctaatctgaaaatccaaaatgctgcaaaatctgaaacttcttgagcactgacttgctgctcaaaatgttctttgtggcaatttggaatttcgaattaggaatgctcaaccagtaaatataaagcaaatattctcaaacctgaaaaattttgaaattccaaacacttctggtcccaaacatttcagaaaagggatactcaacctatgtagcaagagacaacctcttgtttccctccatcctacctagaatgttaagtttcagtaggagcaacttgatttagaacacttgtcttctctcctacctcaatgaccaaaggcagttttccctaaaatgcttttcagggacatggagggtgcctgtgtgtgggagatgtagcttcaggaaaggattgacctgagtttaggtaatgacctactgtgtgactaaaactgctttagagtgattatgggaagtgcttcaaagt

SEQ ID NO: 138604 - DNA, 1972 bp, Homo sapiens
aaatatattggactgtggaggtctcccattagtgtttctgctaggcaaattacattgtgaagtcttttgttcataaatgttaataataggtggctacgaatgattacactgaaaaagggaggaacataacaccttaaaatctgagttgtcacacatttcaggggaaaaaagtaaatactttattttgttgatactgaagctaaaaatacacaaaattattttattgtacaagattctttttaatacattaagattgacactgtgcacttacagaaagtgtttaaataaaagtgatagttattcaaagagatttccactttgaaaatagtcttcaaagccagtgtcatttacacagacacatttggaattttcccttttcatgattatgctcaagatgtatcattttaaactgaaatttgacacactttctatatggtgatatgtggttggggctgccaactaggcttagaaggtgaattacacatagctcgtattctctagtattctccttcctgctaccaaatgttagtttgtagctgcagactgcattcattgttttgagtagaaagaaactcccatccctaatttcaaccccatttttgagaaatatggaataaatagaatcctgtgaagagtttaactattgttctgttgaatagtacctctggtgtgcattcctattataagaaacaaactaaaatgtatttgcttgagaaggatgtgtttatccttatctgaagtgtcctggggaaggtctgtgtctttactgttgagataagatacagctttacttttactttgttaaggtagtaatttgaacacttaattttaaagttaatttatcgaattgaatttccttttacattaaaccacagactaatgtgttaaccctttgggtttagaggactcttcatgtgctcacataatattcattttggtgtcattggtcccacttatcctgttaagacacttgagaattctggctgcttctcctgcccacgtacactaagcacagttatcactgatttattggactacaggttactttgccttggatatttaaactgattgcttaatatgttttacaaggaggtcctacaaggtgtggccacaacatgatgaggctatactttaaataccatgactagatcttatacaggaaatacttaatctgaatatgtgactttcaaatgacctgaacacattcagctagctagctgccatcttcctattagagtttctttccattgcttctgccaccgtgggttcttatgagtccaaaatcctcccctctgttctctatggaggttagtggtttttctttactgtccctctccctgataacagcctagtcaccagagcctctgtgctatacaatgtcatttcttaaggatcaaataagtttgaggagtcaattctgagtttatttacagcataagccattggaactcaatgtattttactgtttaaacacaaagggttaatcattatggttgttcccaaatcagtgaagcttctctatctaaatatattgctctttaaagtgttctcttcaggaggctatgtgcttattcatgtaaggctaccactgctccaagcataattgaaactagattccaggatacaaaggagaacaagcattcttgagggggtgatggagatattctataacttgattttggctggtgcttccaggggtatatacaactctgaaaactcaccaatttgtacactttaaatgaatgcaggtaattgtacataaatcattcctcaataaagttaattaggggaaaaaaactagattcccaagaacagttccaggtcccttacaaatcccacaagagacaatctcattattttataattgcacctatcaaagtgcctattgtgtagtagcacttgaaaatgttttttgtttgttcgtttgtttgtttttaaccagagaaagtggtactcatcttgactaccacat

SEQ ID NO: 138605 - DNA, 1096 bp, Homo sapiens
ggggagaaattgatttgagtaaataaccacttcagatatgatcaaggaattattttcggacaacctcttgccaaatgggtcttgatgcagctttttcacttgatcactttttcctggatatgaggctttattcttcaaaacctcctcctatttctggcccctccccctccattttgctcttctccaggctagagacaaagatgggaatccattcaaataacagaaaccacacttatcaaaagctagtttggaggcatatttgcagttcgaaagttcctcatttctcttacttttatcagaaattacatacattaatctaaatggattcctattggtgttgacattaaaaaaaacagcgtgacacctattttacttttctgggctacacactatttatgtaatctctaggactcagacctagagttgtttcaggtcatatgttagagtctaaactgaggaaacctttgtgctaatgttggtaaaagccgtccttgctcagcaggttctcagtggttatcaggtctagaatgatgaccatatgcattatggactttattttttaacttgaaccactgtattctgatgaggtactcttaagctgtggaaaagaatttgtttggatgtataaatgtagctttcttggaagacagtagaatttggatcacgtttataattccatgaatccactagggttgttatgatatatatctaacataatttacacatgcaattccactgcccccaatgaatattaaaactgcaacctgaattaggttatctatacctaaagttgccatttttataaagcagttaattaaaatgaagatgctcttttctcatattttgacacttcagcaatatgccatttttctgataaaaatatttcaaattcaggcttttatcttagaaattatttgatagcaatgataattaaaactatcaacagtagaataggacccaacaaatatgacaactatttatcttgccaatgtatgagatgtagtgactattggttagagtgtagtagatgtttttaaaaaatagcacaaattctaaatactaattttgatactatcaaattttcaaatgtagtaag

SEQ ID NO: 138606 - DNA, 1078 bp, Homo sapiens
agatggtgcaaataagagtttcactctcctttctggggggcaggggcagtgagggaatcatattctgtgtcacctctgagagcaaggaaattacagatttctgttgagttccagaacagatgattagggcttgacttagaggcgagttgtaacttgttcttcctgtccatcaccccatttgtgcatgagcaagtcacaagcctctccccaagtttcaaatacatcctctgaggagtctaaaagtttagaatttgaggagcagatgctggatgcacagtgaagagagctggaacaggctagagggcattcactgctctgagcagcgccctggacttcacctaattctacctcactgaggttaatttcactttgagaacaggcctctgctttccctttctccatctgagaatatctgatgtcctgccacatacagtgctgctgaacaattccatcagaaattgtgtacattggctctgaactgggttcagacatatgaccattaaatttggagaataggagacccagtttcttgagagaaggacccatgaaggagcgtttgcttgatgactcagcttttgactttccttgggcaccactggaccttggcatggttctgatgagaggtggcccatggcaagtctttttcttgcagcctaaattaaaagagacactcttggatttggcccgagccccaccactgccatcattattatcgtctctctgagacagttcagtgctgctagtggaaaagctccttggatgttttctatttcccaagaggtcaagcacttcataccgaaagctggagatgtcttgctttaattcctgggaaaagagaggagacatattatgtcaagaagcttggtctttatttcaaagtaggcacattagatacctttggtatgttccaggtttttgcctagtagcaaatcacaaaacaccagaaaaatctgccattattcaaacacaagaaaaacatattaataattccatgggcagggctgggctggccattggcaaaattgtacaatgggtaaagttgattcaggattagctaacactttagcagggattagtc

SEQ ID NO: 138607 - DNA, 1891 bp, Homo sapiens
ccttctcaaaacttgttactaacttgtcactgactttaggaaaaagtagaaatgccataccatggactacaaggtttttcaaggcctagtacatgttgctttctccagtttcatctttctactcttttcctaggctctctgctgtccacctgtatggacatattctcccttgcctctgggcctttgcctatgctgttctctctgtctagaacattcttctccccaactcgcccttatctggctggctttgctttcaagcctcagcttaagcatcacttccattggaaagtctgtcttgactccccaagtcccagatgagcgtccctcctctctgtgtttccacagtgtcctgtgtttaacctgtcagaatataaaattgttcatcaccctttattattgtttgtcactccttgagagtaggagctggttagatcttgctcaccactgtaccagagcacttagcagagtgcttggaacatagcagaccctcagtagatgaattatgtctatgaattaggataatggactttctgtgtgccttagaaaatatagatgtgttcatggacactgggaggggaacatcacacacaggggcctgtcaggtggtgggggttaggggagggatagcattaggagaaatacctaatgtagatgatgggttgatgggtgcagcaaaccaccacggcacatgtatacctatgtaacaaacttgcatgttctgcacatgtatcccagaacttaaagtataataaaaaaattaaaaaatatatatatagatgtgttctaggataggatttctcaatcttggcactattgacatgttggactggataattcttgttgtgggagactgtactattcattgtaggatgcttagtagcaaccttgtctttactgtctagataccagtgtgacaaccaaaaatatctccagacattgccaaatgtggtcttggggacaaaattgcccctggttgaaaacggttgttttaggctaatgccactagtataattttaatgtttaatggtagagtttcttaagaccttagatttaataacagattttttgatcttatatcttttaagtaaagaagataattaagtctgcaggcatcttccctttgttatcttgtccctcaccaccatgcatccttgccacatcatttaaagcattcaatttccacactgagaaacactcagaatattaaaagaatgcatacagcagatttccttcattcctgacactgattgtggtgtgacatacattggtaaaatctctccgtctactggatgagagacaattctaagagaataagcattataactggctttgctatattgtaagcagatgaaattccatcaccagaaacctcacacactgtgaagattaaatgatgcttatgatatgtaaaatgaaaaaccacttcatgattaaattaccttaaaattttcttctgtaagtccctcatgtgttttggaatttcttatcatagcagccacatatcttttgactaaattcctgataacttcctggaattacaaaacatgaagaagcattcagtctccttctcaggctctcagtacagtaagaaacttacataggaaataaaacatgcttagaccttctttgcagtagaaaatcctcataggatccagccttttattgtaaaaatgagttaagtccattggctaaacaactattgtgtctctgaatttagtggcagaatcaaattaaccctaaaggaaaattttttacccaagcataaggtaaacatgtatttccagtggaataattcttgcatggtcatatagttaatatccttttcctttaggatggattacacgttaacactcatagtaaaacgagagttttattctccttttataaaatt

SEQ ID NO: 138608 - DNA, 1166 bp, Homo sapiens
gtaattttaatgacgtgttattttatccctgctagataatatatttcataagggcagaaagattgcatcttttttgttcatagtgatttttctagtatctagtgtagtattttatgtacagtaggtactctcatatttgactgactgaccaaccatatattctattttatgtaacttcaaggaagacagctttctaagtcatagttgttgctgatcaagccgaggcagtgcataagggccatgaacaggattataaagcaggtgattccacttggagaaggtacttcagcccttgataaattacagcctttccaagcctcctatcccagtcaaatgggatcgtgtccagacacagccagagtgaagtttgcttctcctccacagaaccagccaacaactattgtgcttcatccctgtgaggaagctttacctgataatgttgattttgtatcaggctgtcagcattgcgttcctataattgaaaatagacagagatgttacatcagcagtctcccagcaccctacccacccaaacatctgaatataattatttctatatattaggactagagaatgctacaggagctcctgcctgacaaatccccaaagcaaatgtatgttggaatgattttatgatgtttaaaacagtgagttggtcacaaaggagggacgggaggaaacagttttgtttaaaaagattcataatattggccaggtgcggtggctcatgcctgcaatcccagcactttgggaggccaaggcaggaggatcacgaggtcaggagttcaagaccagcctggccaacatagtgaaaccctgtctctactaaaaatacaaaaatgtgcccagcatggtggtgctcgtctgtaatcccagctacttgggaggctgaggcaggagaatcacttgaacctgggaggcagaggtggcagtgagctgacatggtgccactgcactccagcctggatgacagagcgagacgccatctcaaaaagtaataaatacaaaaaattagccaggtgtggtggcagacgcctgtaatcccagctactggggaggctgaggcatgagaattgcttgaacccaggcagcagaggttggcagtgacccgagaccgtgccactgcactccagcctgggtgacagagtgagactccatctcaattt

SEQ ID NO: 138609 - DNA, 1059 bp, Homo sapiens
aggcaactttttgtgtgtgtgcatagaatgctttctggtgcccctcattgcacccactccactgatatgaggatatgattttagctaagcattttgaaaagagcttgaggaccccaattgctcccattcctctggtgctcacgtgacctcacgttgggaattattatgcaataatttagcagagaaattattataaatactcttctaaacagtctttttccattcatttatcatgtatcaattcattatctaactatccatttatttttttgattcctgtgttgagcaactcccacattgcaagtgttctgtatagttctgggtataaagagatgattgtccagtggcggtgatgggaatgccacacagaatacaattggagtacagcggtattacctgaatcctaaagatcagcaactatagcccacctggaaggattggataaacacagtaagctgctaattgttgagtaaggtaagcattcatacattaattcattcaaaaatatgtgttgattgtctgccagatgctaggtggtgggattatagcagtgaataatatggatgacaaaatcacttggtatatagaaatctgttttatttataacccttgatttaaactgaattataacattatggatgtgcttttgtaatcatacttatctaaaactttccaagagatatcatccccaataaattttcatttattttcgtgggactagcctttcaccttatctgatagacaaattggacattggctgttcccttgtttactttcagtgtttggtagtgatgcccttttctactatctgtcctaccctctctacccaactatgactttggaacattttcccagatcagctcctggctgggtggttttgtgtaagagacaaactacaccaccatagacagtggtcctgccttttctccactttccacagtgtttaggacttttgtgcggctataatgtgcacctaacgacacatagccttacagatgtgttctaattcatgtgtgtgccctgcattgcctttcagattgtcagctcctgtagagcagg

SEQ ID NO: 138610 - DNA, 1042 bp, Homo sapiens
gggtttttgctgaaagcaagctcaaagtggatcagtagagtgacagagttggccagatactccagtcatcctgggggggcagggtgggcagaagcagaagtagattatctataattaaagacaagattactcttaggcccatgtatgttgctgcaaatggcttgcacataaaactggtgaaatctgaatgaggccactggattttatcagtgttgatttcctggttgtgataatgtactacagctatgcaagatgttatgcctgggaaaaatgggtgaaggatttacagatttctttctctattatttcttccgattacaatgtaactacaattatctccaaataaaaagcttaaaaagataggattgcttttggacgtcatctttgtcttttcactcaattgttcagtagccatgttgagcacctttatatcttaggcccctctatggcagatgcaaagcttactaagatgggagtctcagtctggtgggagagagaggcacagatgtctgaaatacaacagtttatgtaacataatggagatgtgtttagaatgccatgggaaacatgcattctagaagaagcctgcagctgagagtggggttagagtggataagaaaggctttagagcaggtagccctttggcagcagttggaaagatgggtatgagtttgccaggctggctaggtgaggatgggtattccattcagaggtaatggcatgcgatgtacaaaggtctgaagggctgagacactttcctgtagttggagaacagcaaaatgttgacaaaggaggagagcagtaaaagactggagaggcaagagtcagattaccaaggccctgtgtgttatggtaaaggggcaggattttatggagaagattcagatattctggcaggcatgaagccagtgggagccaggatgcaacaggtatttagaaagaaacttccgcacagcaagtaggagagtgtttggagagaagaccagattggaggcagagagaccagtcaagagtctgttgccacagtccttgggagaaatga

SEQ ID NO: 138611 - DNA, 1376 bp, Homo sapiens
aagctgctgttatacactcctggttggcttaaccaaaatagcactatctctttgtcaacccattttggaccccttctccttgcacattaatctggtttccacacccaagatttagccctgagtttcaggaagagagacaaggagcatggcctagtgcaggaggtttaatcatagattccattctcctgtctattaacatgccactgagctgtggtttgtgagaatccattttaggaaatgctgctagagacaaataacaagaatcagctagatagcactgttttgttttgttttgttttgtttttttctctatcactgcaacagtcctttttttctctggcctttgttatggagcacatttctagaatgtccaagtccactgaactgtgttggtttatggcgttataaggaaaaaattgtatcttagtttaatgactaagaatcttgtatgatcttggggtcattgctatgaatatccagtgatgagttgcactctcccgaagtaggggtggagatggacaagatgtagaacactgagttcagggtcagcccaggacagctcctaacagcctgacatgtacttatttgttttctcttgtctatttcccctggcattgatttatcagaaaataaaagccgttctgaaggcttgaaggtcccccaaaaagtaggtcttgacagtactaagcaaaggcacaggagttccatgtgttcagaggcagtggactcgtggacagaatcatgagttatctcttgtgtcctgagacatttccaattagtgctgggtgacacttggcccacctgaaaccttaaattaatgtaacaggagagtggattctagtcctaccttcagcctgtcccctctcgagattacacctatgaatgggggtgcattaagatatgtttgcatccttccttgattcacaatagtaaagttagctttggtagccactcgttcagaggaatagctttgctgtttcattaccttggtgccacatttcgagtgaggaattatctacctcaccccaattaattcttttaaaaatatgtaatgctaccaacatagttcagaaccaactctttagatgacttcctgggatctcatgtgtgtgcttgtttctttcctacctcacctaacttcacttcatcccctagtaccctgtagcaagagaagaacattcctccacctctgacccttcgggtggatccacagtgagcactgccttcacagtcaagtggcagtgatgaagctgtaggctgaaaacaggacaaaaatggagaaggcggaaaaaatggcaaaaaaaaaaataaataaataaaggaaaggggatcgtcttacgtggagaaggcattgttctgtttctcacatcggatcc

SEQ ID NO: 138612 - DNA, 1030 bp, Homo sapiens
ttacttgaggcctgtcctgactgatacttggctttgtctctagactaactgacagacagcttctctgtccttgaagatattaagttagcaaaagcaagccctaggtgtactgccaatctcaccatggaccagtgcccgggacagaaggaactacatttctgagactctcaacaaaggactaccacactgcatgggggtggggtgggggtgccctagttcagagctagtctgactgcctgttctagtagtttatttaaacaggaccatcaggcagtctggccataggtcctggtccctttgacttacctagaacccaaggcaatatcatccattccacgacagttgggggaggcccctgtacatgaaggtctgtcctgacaatgtgctgagaagccaggagaagcataaagaggaaggtcaaataggatgctgtgtggcagataaacttgataaagggtttcttgatgaacagcccaaggttgctcctgggtgagatcaggtaggctatagacagcatgggaaacaggaacccaatggtcatgcaggttagaagcttgactacccagtgtttccgccgccatccagggaagccatcataccacagggtggcaagcaactgttggcagttgggctgagcaacaaactgggaaaagaagaaaacaagttaggcatctggaatgtccaggagaaagtctactgtcataatacctttcctagtttacagtcagctctggcaaggagttacatggccaatccccagaagaggcctgttttctaggtgcctgtgaatgcatctaaccccggagacggctcttcatgtcaaactatgaaactagattttccttagtgttcattattttttaatatattaaaacaaaatcactctgtctggttcatgctttggcataccttcctattgtccctcccaccttgtcagagttgtgcttcctcaaacctggttttacatcagaatcatccagggaacattaaaaaatctaaatccccaggtccttccacagactgactaaat

SEQ ID NO: 138613 - DNA, 1015 bp, Homo sapiens
ctcagcctgcagaactgtgagctaaataaacctctattctttataaataacccagtctcagctattttttattagcaacacagaatgaactagaatacctagttcatgcctagacagagtttgcatgcatcagcactgtttccattatttgttcctctgaatgttttgagggtatgttctgtcatgccaattactggcttagaattctggaaaggagactgatagtggtggtagtaggcggtagggatggtgaggtaggggaggaataacgtgttggagaaatacatccaattgcagtcagtatggtcctcattgtatagtcagatcctacaaataagtctaacaaattccagagtgaacaaactgaattgttatacaagacacattttagagggttggagacaacttggtagataaaagagagaatttttcattgagaaagattggcaagtcaggattgcaggaggtatggctttttcagggctgactgacaagttgaggtatcttagggtatttttcaaagctgagatggaagattgcctaagcatggttttgattcaaagcaaaaagcttaccttcagaggacatgaacagacacttctcaaaagaaaacatacaagtggccaataaacatatgaaaaaaaaatgctcaacatcactaatcatcagagaaatgcaaatcaaagccacaatgaaataccatctcataccagtcagaatggcgattattaaaaagtcaaaaagcaacagatgttggtgaggctgtggagagaagtgaagacacacactattggtgggaatacaaattagttcagccactgtggaaagcagtttggagatttcttaaagaacataaaatagagctaccatttgaccaagcaatcccactactgggtgtatacccaaaggaaaataattcattctatcaaaaagatacctatacctgcatattaattgcagtgctgttcacaatagcaaagacatggaatcaacccaagtgcccatcagcagtgga

SEQ ID NO: 138614 - DNA, 1225 bp, Homo sapiens
tctttatttttattgagacataatttatgtaaaataaagtgcatgtattttaaatatatagttctatgtgtttatatgaatttatacacccagataactgccaccgtaattaagacatgagacatttccaccgcccctataaatttgcttatgcctctttccatcaattccttccaccacatagacagccattaatctgattttgccactgtagattagtttttcctgctctaaggatttgtataaatggaattatatagtctgtagtctttcatttttttttctttcactcaatgtttttgaaatctatccgtgttgttgagtatatctctagtttgctcctttttattgctgaaaagtattctcttgtataggagtcattacaaatcattacaacatgtggtgttttgtgtctagcttctcttactgattcgttctttgcagaaatggagagccaaaagaattagaaattgaaacttggggaaagaacttgggattccaaaatgggatagaggcagtgtaggttaggatcttggcagcagccaaagtggactattttgagatcaacagagtgatctgtgggaaccttcaaactgagacatatgctgagttgcagtgacagtatcaaaagatctctatatatgagggatatagaatagtcatcattaggagatccgggtcgtattaccatgtttcccttggaaggactggtcttgatgcctccccctggtaattgctgttgttaagcctcttgtgtttcctgaatgtgctcacagattgcattcttgagttttactccgtaattcttgaaccaaacctgcagtgccgttggatgtatgaccatttttgaagctgtttatttctgaaggcttgggttttggtatgggttcttattaaacaagatattcaacacttccacttgtttctcggtgaacataatactttcattgcttctggtgctagcctttaggaaggatctctgagcctgacatttagtttagatgtgttcctatgttcaagtccagtggcaagaagctagcagaatgttgaaaaagaacatcaagtaatttgttttctgtgtggagagataatagaccagatgttattaatgatggaagtaaagaaaaagaaacagtgaggtgattaaaggggtagaagctactcaaatttgttagttgagccatgtgtctggaatttcagttcaaggataagagcttcttcactc

SEQ ID NO: 138615 - DNA, 2208 bp, Homo sapiens
ttggaaatggattcttttggttccctcctggaggttcatacattcatatatatgctctggagtaatttatgcatttggataattaatatattgctttcagatgctgggagagtacattaactgagtgatgcgcaacttcctctctcttagggaattagaccatcagaggccttgatggagagttgcatggggtgctatatgcagacttccatggtttgtgtgtagccatgaacacagcttgcttgcatttagtaagaccaatcagcttagtgtttatttcttctacagcacagattcactggctgggtctccagtctcaaattgccaatcatttgcaaagtgaggaaggatctttgttgacaggttgaatgctttgaatttctggtgactactttgaaataacttgttttgtttgtcaaattctaagcatatgtcttaaaaggcatttttgactatcacctccaagggaatagcttgagaaacccaaagtactatgctgcagtcgggggagaggtggattgcagcagtatcctcaactacctcttctcactgtcagtgacaccatcttggaatacctttgggaagcagcaggaaatgtgcatgtgggtagagatcaaaggaggcaatggctccaagccttgccatagggctgcctccaaggacacagaaggatgccagttgccacaggtccctgccctgtgtcacctgtctgcccttcattaaggtgagaaatctgcagatagcatcattaagatcagttttaaggggtatagggagggtgagggaagtggggggtgttaggtaagggttgggggtagaggttttgggatgtcttagttagaaaccagattaatagaagagtaggcctgatatattacatcatgagccatagtggtgggaaagaactttagcaatatagccctacctcctcattttagtgatgaggaatctgagaactggagaggttcagtgactttttgaaagtcatacaacacagctaaccattatgccaatcaccatgcttattttgggaaactctttatcttttttaaattccattttatgaaaaggcatcttcatggtccagggaatatgtatcttgtaaaatgtacctggttggagtagcttgtccagtcttgacaaactactgaatttctgtcttgcctctccttcagtgccttttaaaaggttttcccttttctgatctgcatttcaacatagagtcacataaatgtccccctgagaaaccaatcccacttctttctaggagattgggtatcttagataatcttttggggttcctctgtgagtataggaatggtatccttcctaattatcttccaaaggaattattttgtgtgtgtgcctgtgtgtgtgtagagacataaaggagggtgatgtgattttcagctagtcctttcacattttcaataatgaggtaatcatgttacatacacattagtcctcagttataaagtgaatctcagatagaaattaaaagtgcagttgtgttaagactctttcatactaccctttagtcataaggagaaaaaaacactcaaatagtagaagcagcaagtagcaaacttcaggagagctactttctatccaaataatttaaaaaacacttttcacctactcctttcatggttataacacattggcagactttttgctggctctgggagccatgattttaatcacattctgcaaggtgacaaatgtcatacattccacattgtgtggtagccatctctttagactcatgtgttttggggaaaggaagaagttcttggctgagtactattttgaactttccagaaccctctcacaccagagacagttcttctctgttcagtttccaatccccgataatttgctaaaataacattgtacatccaagagagggaagaagagtatgtcagtatattatgcagaagatagatacagccttttcagaagatctccactagtttttgttccaaaaattcaagtttatgggagaaatctcaattagccaccttttcacagttgtgtggatataacatttgggggatctttctggactcctacctatctgtgcattttaccggcacctcaggaaaggagggtgaccaggttgtcttagcttgtactgcttggtgatctctgaggaccttctaattcagttgtaccccagtgttccatgtatagaaaaacttcattaga

SEQ ID NO: 138616 - DNA, 1050 bp, Homo sapiens
cagataatcagtgcagactggaaccaacatgtgaaagccctttgaatgctttggaatatctacatactatatatattattactaatattttcaaaattaagagttttcttcagaaattaaaatcctttataactatttataaaatttattctatcttaccatctcctctgaaggcagaaattgtctatttttttaacccgaggaaagaccatgacaccatgagttaattactaagcttatggttgaaggtggagatcctttcttgaaacttgtgtcatctgactgtgttatgcttgcctcctggccatctgtgagccctgggagaagctgtcagcgaggatttgcctgtttgttttcagaccattttccccatcaccctcctaccatcaccaccattgtctttttttgttgttaaggtggagacagaaatccagcgcgtctcggaggcatatgagaacctcgtgaagtcatcctccaaaagagaggccctagagaaagccatgagaaacaagctagagggcgagattcggaggatgcatgatttcaacagggatctgagaggtgagggaaccaacagacttgtctttgtacttctgaagcagctgcagggtggtgaagggaagggctgagcaggatccaactaggctctttggggttgtccaacccaccggtatgggcagtaaatggctgggcatgtgccaggctaattttttgtgactgcaatagtcctcagtcccaagcttgattgatcaaagtgtggatgtacctcactggtcttctgagcaatgagctgatgtgttaatcaggcaggatccctgctgggactcctggacccacctggcccacccccacaataggtgctgcctcttctttttaacaggttttacagaggcgtgccctttgactgcaagcttgaagtataatgtcctctcttatttccaggactgactgactccttttatttttgactttcacctgataatattgaagactttgggaaatatttctactttaaagtgccttcagcaccttcaaaactgctaaccttgg

SEQ ID NO: 138617 - DNA, 1050 bp, Homo sapiens
cctgggttctgttctgttcctagtcaatatggtccagccctctcttatgaccttagctgtcatccatatgctaatgactcccaaagatatatctcaacctatctttgatgtcaaattggtcatcacactccatgtcttctactcagcttataggtttttgatattttcctcctcttgggagctttttcaggtagcccagggttttttgcagagccctatgtgttgccggagctattagctcatacctctgttttcccgttgaattgggcctcctctgcctgactgggagctcctcaagtactgggctctctttttatttatttatttatttatttatttatttatttatttatttattgccaccctaggccttacctagcacaatgtctggctacagtaagtgctcagtaaaagtttatggaaaatttgctgtgataagtgtcatcatagagaattcattttccatgttgagcagagttgaggtcaggaatagatggagagggattagggaaaaatcttcaaagagaagatggacagcagaactgccttattttgagagttctggctaagaagtcacggaaggaatgcctgttgtgtccactgttgttaaaccaggggcatctctgacctattgcctcccctgctttaggaccggatgatttttatggtcaggtctgcaaatcaacctctgtctataatacattgaccatttaagacaggtgtcacttagtcatctagtattaaacagggctgaccttaaatgtgccaccttaactgaggctgaaaatagagctacacacacaggctcattgatcatgcctgcttagttctatacagcaaaatgtcccttaagatatattgaagattgggatctaaaaactgacaaattcaattctcagaatgtaagcaggttgggtcacaagaactgaatgtcttcaagctgactgtcagatctttccaagggcaaaaatgaaagatgatataagctattacaggccatgaacctgttttcacccacctgatgcttttactaattagcttcttggctgg

SEQ ID NO: 138618 - DNA, 1022 bp, Homo sapiens
gtagagtagtcagaaatgccaggagacatcttgtctttaaagcacttacatactctgcatacatgagcaaataagacaaaaactagatatggttgcaggtcacaggacagagaaaggcatctgtggggccctagaaattacctactccatcacagaaaactgaagtcagctttaaagcaagaaaatggcctgtcttatctttgtattttcccagggcttagcatagtgcctggcacatgttagttattcggtaaatgtcttttggattcccaagtaagggctggtattagttttctagcgctgccataactaagtgagacaaactgggtggtttaaagcaacagaaattattttgtcacagttctagaggcccgaagccccaaatcaaggtgctggcagggccaggttctctctgaagctcctaggggaggattcttccttggttcttctagctacaagtaaccccagatattccttggcttgtggcaggatcactccaatgtctgcctccatctttacatggctgtcttccttctgtgtgtctctgtgtctctgcatgggattctcctctctgtgtctctctctgtttcttctcctcttcttaaaaggacattagtcatatttggattagggcttaccccagtgacctcatcttaacttgattacatctgcaaagaccctattttcaaaataggtcatgttcacaggtactgggattaggatttcaacacatctttttagtgacacaatttaacccacagggtccaaatgaacccaggctcctaacagcattttttggttattaagtttagggaacaatctttttccagacctagctttgggcttgatctctattatagtcaagctctcactttttctgtctaactttctttgtacaatctttgtttgaatggtcatgttttcaatatcttaatttacttggacaaatggcataccctccccattgtttaaggtttgtttactttctttgtgcaagtgttctttgttcaaattctttcggt

SEQ ID NO: 138619 - DNA, 1648 bp, Homo sapiens
tattacacttctaaaaaatgaatgttcaaatatctcttttttttctccaggaaagactttgtttgcctcatcatattttggaagaacgaggacttgtgaaagttggtgtcacagttcaggcgctccttgaattaccaacaaccaaggcatctcagctttctgtggcttaatataacattttaaaattctaagtgtatagtttcatttatttgaagtgatttcaaatatttcaaattcatgaataagaatattccgtcaaaaatagtttgccttaggtcacgccttaggattttaaaaaaattacattgaaacatcaaacttaaacattgaattgcccgaacttctttgggggaaaactggattaacttaataagagtatttgataaactcaaattctctttttactaagtcagttgataatcttgattatttttcagaaagcagactgatactaaatttaaaatgtagtttcaatttaataatcacattaggtttaatttttttacatcatagcatattagtaaacatctggataaaggtaattttttttagcaatttagagcaattctatatttgagttatttaatacacttctaattctagtttatacacaatttcttcaatctttggtcttagttttctagaaaaaaggagtagaaaaaacaattctggctttatattaaattcttttagtattataggttggtgccaaaatattttcagttgtactgtagattgtttacatgtgaagtgcctgtgtaattgatgactcttacatagtcttaagcatttttgcaattttttaaatgtattaatagagtcaatggaactttaaaatattttagtagattttgtaaagtcagtaatatgtgaggatttaaatgagcctcacattgtgacatttgtggttttttagttagtccattgcagtttcccttaaattggttatttcatgttgtcaaaaataccaatgttaatatgattaatttatgctatttaattttgtgaaacttaatcatcttttaaaatgtattatttgaagagtattttatttctgtattgaaaatgttacacaaagcagtaaagtttttgagaactagtgaagtactaattatcaaggacattttgataaaactgccaaagtttgggtttatatcttccctttgagcagcattctatcagtgctgcctttagctatactcagagagcagcagttgaggaataggtttttactcaaaatctggccatttgtgaatcctgtaaaccttgtgatcttcaattactttgatgttaaattaaacacagactcttctataaatattttcatgagatactgtgttacacaaagtccttgttttaacttaggtatgggtaaatttacattggtggtattgcaggaatttttcaaaaacattactgtaatgaataactgagtttcctatagaagaacctgaataattacttttgtagtaaccaagcaagcatcatatcttaagtatgtgatcatttgcacttgttacctcttaatatggatgcaacttattaaaaatgttggcctgggtatttcaaagggtatatataaaaggtaaaaaactagtgtgccaaatggtataggaacaactgtactttttttgatcagttggcatga

SEQ ID NO: 138620 - DNA, 1019 bp, Homo sapiens
aaagcagtaggtttcttaataatgaatgacatcttagaatggtgagattatagaccaggtgtaagataatgagggcctggaaaagggtggtagttgtgagaattccaaagaagtaagtctgagagagattaaaaaaagaatcgacttgatgacatattggatatagtgaattaagaaaaaggaaaattctaagacaaccctcagattgcacacctgaatgaatgggaaatagcttggcttaagaaagaaatgttacttgatctgtataaagtacttataacaatgccttgcacatggaaagcattatttttgttagttattagtagtaggactatttacacctgttatatacttaaatttgttatcaggtaatgtaataaagctaccaaaatatgaaagaaccttgtacataatttactagtagagaatttatatgttcaagggaaaataaattatgtgttttaaatatttttcagtataaatcaatgaggaagagttcaagtggcaatgaaaatgatgaggtgagaaaagataatattaataattatttgaaatgtttacttatcatatgaagttggctcagtgagagtaaaatgtaatccatttttcagtttctttgttattgatttaatgcatggttttttttcaacaataaaaacatatgagcatcatcatacaattattaatttaatcatttaatttccatatgtcctttagaatggaattactaataattcagttttagaattttatcatcattcgtcttagacctgtcatatgtgagtgtgtgttgtctttcacatcttttatctttctaaatcagcctggtcgtcaattgagattttttttaggaactttgtttaggaactccttccacaaattctgcatgctattttaaaatttaaaattcgacttctacagtttgtgcattaccataaacctttctactgcacagtgtaaactatgcagcagcctatcattgttgaaaagatatattctcattaccataaatacttaag

SEQ ID NO: 138621 - DNA, 1032 bp, Homo sapiens
agttttttttagtctttgttaattattttaatataataaatatcctgtctgtcctttgacaatatatctttagatatttcacttattttagcttctgggaattccttagaatagacctatgcatagggcctacatagaataaacccattttgatatttcctgtagagcaacaggttttagaaacttaaatatatttctgtcaactttaagttttatgttgttaggccaaagtgtagacatgggtaaattctttacaatgtttttaaaaagataacatctaaggttcataatatatatttaaggatttattctaaatattttaacgtattaaggcatcttcaattttttagtgtctcagcagatgaagttaattcaccattatcacccctcacctggcaggtaagaagaaattaaattacaattatatctatcattttgttctcttttatttagttaaaataaattgtctcattatagcccttagaaaatcagaaggatcaaatagatgaacaaccgtggccagaatctcaccctataatctggcagagtgaagaaaggaggcggagcaaacagattagaaaagaatatttcaaggtactctatattaagtttttaaatttactttgtaattattagtttttattttgtcagttttgttttgagttaataaggtagactgtaactctctagttaaatgtagtaaatgtgttattttgatttctcacatatatggggtaatacaatctaattatatccataaggtttcagtaattgagaataattgagtagataaatataaattatgatttaccaaatactttgcaagatagacgaatgtttgctgcactgctagttgtagcaatatgtagtatgttttaaaagaattgtccaggaaaagtctttcattggatttgtttcaataaatatttgacacatatttacaattagcatttaactgttcctatgtaaataagtgttgtttatatagttctgaaaatgcttgagggcagatttttccatttttttcttctt

SEQ ID NO: 138622 - DNA, 1148 bp, Homo sapiens
gacagtaattcattacttttgactttgagattaatacttagaattatgtaacattatgtagaaatagttctctcttataatggttcatcattttctttctttggttttctttgaatggttttatttagttattaaaagtttaagaaacttgtgtttttttaaagaattggactggagcgctgattttgcatttagaattaaaatttttcatttggcaaaataactatgtattacataaacatacctcatatcatttgctgtgctgggaaaaataaatcagtcacgatggtacctctgtatctctttatcttctatctcagccaaaagttagatatgcaaagggcaataatagcatgggtagaagatatccaaactttgagaaagggtttataaacgaagatgcatggaaaagttgccgagcttcattttgttataaaatagtacacttatgggcatctgatctaaataatatttaaatattattttctagcaaagatcttcaaggaccagatgcagtttattttagagattttttttatatcatgtgatgtaatattcttaatagatttgggaattaatgtgttgatttacttctaggattcttaatcattcaacttctgtgatgagaaacaagccaaaacaaactgtggaatgtgaaaagaggtataaaaatatcttagtttttacatttaatattttataatgagtattgatcctttgacagtgatgtttttgtatataggctttaattaaataagtgatacagatttaatataactagataatttaaataggaaatgttttagaacatgagttaaatttacttttgatgtaagcaaaataaaaaatgctgatcttttttgctcatagatgcatttttgtcttgatagaatcatttatttgttcattcagtgaacatttattatattgctattcctgccaggaataatgtgtttctttatcattgattgtgtttattctctatgatactgtttatgttttcatttcttttcaattgggtggtactaaattcttctatgtgaatacatgatataaatccacatatatgaattcctgagaactagaagaccttgaaagtttctatttattctttttgatggtttgaatttagattagactcaactcct

SEQ ID NO: 138623 - DNA, 1080 bp, Homo sapiens
tgttaaatgttcttaccaaaataaaataaaattgacaaaagggagcatgttttttagaccaagaaaaatcaaggaaggaactgagaataaaatgatactattagaatattcttaatattaacttgataataaaaaaggaaattctgttgaaaaacaaaaaagttgatatgtattattaattattgagccagttttacaaatttccatgagtcttactcatttatgttagtgttgaaaaggtggctactgctctttttcttatactgattttctttgggggcgtaataagtagatgtttagctggcttcttaaattttgtttagttactattctaaagaaaggattaaaatatatgtgtgattttgcagtaaatagcttcatttaactggttcccattgcatgtttgttcctgctaacttacgctgtagtattttctgttgtgtctttccttttagtaattattttatttgcttttaggtgtgtcttgagagtttttctttattgtggaaagatgtgcttctaattactatgtgatacagctaaataacaaaaagcaattatgaaaagttataattaaagtataattaaggatcatggaaagcaaaactaggtttaggaagtttataattttgttttagaattatagaaattatggacattacctgttttattatgatttttccctgatcatgtgaacatttcaatttgaggagcatcatgttaacctctagcttgttataactaattaggtggatctctcagtccttgaaatctatgtattcttttgtttctgctttctttacaaatgactaccctgtctctccaaaaacatcttctcccatcttttggtttggttgatttatgtgaaatatgaatacagacagaggcctttaagttgtaggagcatcattcagtgataaactcttccagaggaccagagcagcaggacatgaatcaaggtatctagagtttgtggaagccttcaagtattatggggccaggttgacatagctgaattgtatagtcttttacttaaaataagtactagtaactggattagggaagtatgttaataatcta

SEQ ID NO: 138624 - DNA, 1031 bp, Homo sapiens
tcagccttcattctcaagtctcagaatcaaatagagagcagacatcaagaaatgacagtcacataataggaagtaagactgattctcagaaaggtaattcatatggtacctgctatttttgtttcatgtacatagcccacattaaaaatgggctttgaaaaattatattgtctttagcaaactcttacattgagaaaatacacatttttctaaggacagcagtgtcaagcatacagtttactatgtacattttctaataaatattaatctgtacctagaccaggaggtatatgattttgttgaccccaacacagaagatgtagcagttcctgaacagggaaatgcacatattggatcatttgtatcattctttaaggtaaataaaactttgaacaaatattaataacatgttctcttgatcttataaaagtggactatacaatttaaaatgtaactttcttttatataagggaaaagaaaaatgttctgaaaaatctcggaaaaatgaagaattaggagatgaaaaaaggtaagcacatatgaaaatgaaatgttatttataagcccttgagccattcattagatattcctacttgaaagagtacttgaaaaaaatataattttttgttcacttacctcttatgtttagatagttaatttataaatacttcacatctgtctgtattcctcaagtaaacacaaaattatagtaagcgtttgagtgtaggatgtgcactatttttacccctgaagtgtaatgatgacttctattattattattgaggaggactataccgtcatatacattgcttcatttgagctatttaacaaccataacaatagatggtattgacatcactttaccaattaagacactgaaaccaggagttttaaatggctggaactcagatgtattgtctcttgttctactatactttccatttggtcatgctgattatgacttttaagggtacttatgtccatattttattaaaataattgtgctttggatcttttttgaaccattcatc

SEQ ID NO: 138625 - DNA, 1045 bp, Homo sapiens
aacatgcaggtttgttacataggtatacatgtgccaattgagactgcataaaatgaccaaacttacaaattattggtattcctgagggatatgagagattaaaaggcttagaaagcctatttaacaaaataagaaacgaaacttttccaagtatagcaagatttagacatccagacacaggagactcagtgattcccaggaaaacacaatgcaaaaaggagtttgccacagcatattataatcagactgtctaaagtaaaaagaattctaaaatcagcaagacagcattccaccacagccaccattgcagagcagcagcaatggttctgtgctacactatggtcgtgggcctcaacaagggccacaagttgaccaagaatttgagcaagcccagacacagtcgtagccttgggcgcccgaccaaacacaccaagtgtgtgcggggcatgatccaagaggtatgtggcttcaccccatacgagcggtgcaccatggagttactgaaggtctccaaggacaaacaagccctcaagttcatcaagaaaagggtggggacacacatccacaccaagaggaagcgggaggagctgagcaatgtcctggccatcacgaggaaagttgctgctatgaaagactgagctccctgtcctgtcctctccctgaaataaagaacagcttcacagaaaaaataaaataaaataaaatcagcaagagaaaagcaccctgtcacctacataaggaaactccattagactaacatgagacttctcaccagaaaccttaaaagccagaagagaagggaatgacatattaaaaatgctgaaataaaaaaaaccaagactgccagccaagaactcaatatccagcaataagcttcataaataagaagaaatgaagtctttcagagacaagcaaatgctgaggaattcatcgccactaaactggccctacaagaaatgctcaaagaagtcctaaacgtggaagtaaaagcgatattcatcatcataaaaacacacaaaagtataaaactcactggtaaagtaat

SEQ ID NO: 138626 - DNA, 1066 bp, Homo sapiens
aaagtgaatttaattgttacccaaacaaatcctgaaaccttgcatagttgactctgtcaccagtgctacaaataagtggatatgtttcagcgtacttgctgctgctccctctgcttctttatacctgtttatgtacatgagcagtaggtctgtgaaacagatttaggaattcttacatcagattctgccgtgtcctggataatcacgtgttttcctgtaaaccaggagtcaactctagtatttcctacatgtgctggttcaccttttcaactgtagggcatggtgcattgtatcaggttgtaaaatggagccagataaacacagcatttgattttgtgaggtgaaggtcctctcagtgcatttagtggaatgagctcatgattgtgattttgtggccttattcaaatatctgccttgcttcatttaataaatgtcttcctgaaaaatcgaatgtgaagcacatttttgacagttgactcatattttaattgctatagattgaatctgaattactgaaccttgtactgatttattcagtgataagttctacagcatacttatcccttaatttctttcatttaaaataaaatgttatctttaattgaagggtacattcatcattaagataataccatttatacagctctttatacatttttaagtactttcatatatattatcctattgtatcctaataataaccctgtgagcttggcagagtacatagtaattgctcgttgtggttgagagacaggttaagtgatttgtccaaagttaaatggtgagtctggcagagtgtgtgggtcagagcctaggtttttcaactccagtgctatcctaatgttatttccagtgtaacacattctctctttataaaaaagcagttattaaacaccatgccaataaataggttatttattctgaaaattcaatgcttatttaacttcgtaggttatatactttttgtttgtggtatggtgtgttttgttttgtgtgtatttgcatagctatcatgcctctcttatggttttagaatagattcattaagcaagcatttattgaactc

SEQ ID NO: 138627 - DNA, 1070 bp, Homo sapiens
aaaggcatacgtgcctgaaagaatggcatatcctttttcagagtacagcagcaggattgccatggtttttctgtgtggtttaatcatcctacgatattcttggcttctttcttgtcacgtatgcctttaaagactgagatttttcattttcctggtgttgagaaggtagtggtggttaaattagtatttgctgcagtggtaaattaaatcatcaatcacttacatgtctgcttactagaagaaagctaatccttgttttgagttatcttagagtcttaatttttatagtagaaagccaacaattttaagggtatttttgagaaaaaattatctccattctttatggagttgtggattaaaggtttatcactttgggtgagaaattggctattgtaatgttcttcatatactctctggtagtctttgttgtggctggcattttttgttagggacacactctcttataaaccaatgctggattattttagatatgtcttgatttgatgaaaggtttttttttactttttataatctttaaatttgttatttatttctgttttcatctgctttgctgaaataaatctggacaaaattattttaatagatgtcgtcattttgaaacaatatagtaagtaaattcacccataatgaggagtagtaaaataccacttattttcaaaacaagacaatttcagatgtattcagtttttagatcttaaatcaaggtatttgtgttggaacaaagtggggagaggaggaaaacctaaaattgaagctttccacccagtgattcttttagcaatgatcctaagaactatgaatgtgtaatcgaccactgattttatattttgtaaagcatgttggagtatttactccttcactcagaacagatttcctaaataatatgttcacatattcatgactgttagcaagatattatgcaacttggtgtgttcttcaaaggcttcaagtaaaacagtttcagactgcatcattatagtgatttttttcttttcttcttcttcctcttttttttttttttcttattgttctttctaacctataaagga

SEQ ID NO: 138628 - DNA, 1080 bp, Homo sapiens
gtggttctttttggtgacactgagagggtacaagaagaaagtccatttgccattatcccatattctgttttaggcattatttctacttggattttcatgaaatgtactgacagtgttcttagcacatatgataaattcatgagtttgctgttgtgtttgatctagcataatctatgtggaatgtataagctgaactgtttcttttttgatgtttggtacagattatgaaagtagctggtataaaataaaatttgaaaatgaatatctctcaatacatgacaacaatggggtatctgtttttagaatcatgttgtctttggtcatatggcaatttttcttttggtgaagagtgatccagaaggcaaaatttttgatctgtgaaaataatacaactcatttagaagaagtcagctgggtcatgttttgagtctgtattattttagacagtgatataccatataatgtatattcagtgtgttggaggtttcaaagctttttggatacattacaatgttggaagatttttatataccagtggtcatgactagctgattttagttatgagagcgctttggttaaagttatggaaacagtctaatcgtgaaatgtcagtcttagaagatctgatcatacttgggccaatttattttagttacggaggtgagacaatttcagaagattcacgataaatttaataataccaaattttgccttagtcttgacacttggaagataaatattagtgagtataaactgttttagggatgaagaagtattgttagtatacaaaaatgaaaatactaattattttagcatgggtcttttagtcctttgcagtctggacagatagattatcttaagtaaatcattgaacttgccctcagaggaattagattctagatagtgctctgccattgactcataatttgaccttcggaaagtcatttaaaattattatattaataactaattgagtacatacatgtgccagacaccattcatgcttttgtttataaaaagagaggattgctcaagctttttggtttgctgggttttattttttcaaatattcataatctg

SEQ ID NO: 138629 - DNA, 1033 bp, Homo sapiens
attgtcacagaattcaaattgagcaggaatacgtaggatttcaaatctaacagttgtttcatttggtgggatagcatcaaagccatgtactgtgaccactgtatatggttttcttcaagagcagcaataaatttctgccatgtaccatgggaaagagctgtacttttagggagaaaggaaataagccctgagaaaaagccccattttcctagttcctttcacagttcacctggcacacaacgggtcttgatatttatatttgaaagagtgaaacatggatggccataaatgctccttgctgataacgattgaattgggaaaatctaatcaggaaatcagtgatttatgaattacattgcataaaatacataatgatgggagcctgtaagaagactaaacaaatggcttccttagtttatttttcctttaggttttagttgttttcagtgaatattatgagtgaatgttatcgatagtgttttcattgtgagaactgctaaactgtagagtcaaagaagaaattgggacatattaatattttgacttttatgccagctttattgagacataatatcatactttttttttttttgagacagagtttcgctcttgttgcccaggctggagtgcaatggcacgatctcggctcaccgtaacctccgcctcccagattcaagcgattctcctgcctcagcctccctagtagctgggattacaggcatgtgccaccacacctggctaattttgtatttttagtagagacagggtttctctatgttggtcaggctggtctcagactcccgacctcaggtaatccgcccacctcggcttcccaaagtactgggattataggcgtgagccaccgcgcccggccccataccatctatttttatagattttagtatattcacagataacatgcaaccttcaccagtcaattttcaaacattttcatcacctcagaaagaaaccccatacactttagctatcaccttccacagcactctacccctgcaaccctaagcaaccactg

SEQ ID NO: 138630 - DNA, 1035 bp, Homo sapiens
ggttgtttctacactatggctatcataaataatgggacatgcaaacattaagtgtctatccatgagtcccctaatgagttagaggtggtgctgacaagataacatttcacttattaccactctgctcttaatataaatccttgctttgattaagcactaccgatttttccatctaagtttttttgttattttttgttccttgagacggagtctggctctgctgcccaggctggagtgcagtggcaccatctcggctcactgcaagctccgcctcccgggttcacgccattctcctgcctcagcctcccaagtagctgggactacaggcgcccgccaccacacctggctaattttttgtatttttagtagagacggggtttcaccgtgttagccaggatggtctcaatctcctgacctcgtgatccacccgcctcggcctcccaaagtactgggattacaggcgtgagccaccgcgcctggcctctatctaagtttagctattttttttcttgtttcctgatgcttattggcttatcatcgacttgttctcaataacgttttccttagtagtatttatactggaataatagaaagcctgtaaatgctgtataatcatcttttctaaaacttattgtataataaacatttagcacagttttgtttaatcacattttttgaacactaaggagcaaaggcaagcagtattaaggagtacaaaagtacatgataaatgctttgaaatgcaatgggttcaatcaaccaaaagcattattgagcacagctaatatatttacttttaaatgtactattcaagtgtgaaatatatccatatagaacaaaattcaaaactcacaaagggccataatgataagtaaattagcctctaacacttaatatttttaagaagacattagtgttttacgtttaggtattttgacagtaagtttgagggagtctttatcttttgaccttttggggtgaatatgagaatgaaggaatataaaaagatgattaaaagaatcaccaggccggaaa

SEQ ID NO: 138631 - DNA, 1539 bp, Homo sapiens
gtctgcctcatcaaaagaattctgctaattgctttagccaatttctgaggtaataagctgggagagggaagaggttggttactcatgcataggtgactttttgctaacagtgtgatttttaggaagtgaagaccacaaaagctttttgacttgtggcagaattcattatgatgagactttagctgtaccaggtaacagattgccaaataaaacaccaaacaagcaagattggtcagttacaatccagtctgtagtagtctgatccagcatagtgttatgtttatggattcaattccctcctcgaagtcatacaattgaggcatctcagtagaaataaaacaaaataaacaaattttgtagggaagctcctatacatttgaatggtaagggcatataactattaatactttatgagaccatggtattttgcagccaatcttaaggataaatctacattgtgttcaggattctgtgttgggccagacttaacaatgaccattatgtgtagaaaatagcaaccattgttgctgaattaaactctctctggagatttaaacatttttttaaaaaattaagctaataggccaagcgtggtagctcacgcctgaatcccaacactttaggaggccgacgcgggcggatcacttgaggacaggagtttgagatcagcctgggcaacgtggcgaaagcccgtctctactaaaaacacaaaaagattagccaggcatggtggtatgcatctggtcccaggtactcgggaggccgaggtgataggatcacctgagcctgggggaggttcaggctgctgtaagctgtgattgcaccacggcactcagcctgagtgacagagggagactctgtctttaaaaaaaagaaaagaaaagaaaaagctaataaaaccttgatgacaacatagccaaagaaattaatcagagaagagtggtgattagaaacagaaagcatagtggaatagatgaattacacctggcaaaggaactctaaactatattatgtaaagctcaggacagtctacttgtctgaaaaagaaataccaaaagtatacacatgcaaaaatttggatttttcagctggactttttgtgaaaggttccctcccaccccaaattcaaaagaagtataaagcaggccattcatggcaaactcccaatgaaatggaattaatttgtattgtgttttgaaagtgtatatatgtgcttgcaggaattacatggaagaattatactgacatagagtggctctcaaagtgaataatggaatcttaaggatgttttattaaacagcgagtcaactatttttctccgtgaatgtgactccacaatgatagtggaagtcagaaaatatttcacatgcaaatatatctgaaattcttcatggatgtatttaacgctttgaagtgatggcaacatctggtagcaagtagaagccagcgtcttaaaagctatggcttcatgttactacttcatctgaattagtcatttaaaggggattttatatgtcttcctaaaaactgacgaggtta

SEQ ID NO: 138632 - DNA, 1055 bp, Homo sapiens
attattgtctatatttgtggtgggggtgggatttcaaatgcttttgatcccagttacatggtttttcaaaattctgtaaaatggaggttgaggtggctgtcatgacagaacatgtcacgattagattgatattatactcttcctacgtgagttaaatcaaacagttgtcttagtgtttataatttacaaaataataaacatcactggtgattaaattttgatggcgttattggtacttggcagcaatagtgatttctggtgctcacatacattaggattttccatcacatggttgtcatataagtttaatttccccatatttctggcaaagggaagtatagctagttatacagtcaatcctcactctgagttgagtcacctctcggactggttgtacttaatatgcgcatatgaagtaaaaagtgaagcatgaaacaaaacaaaccagttttttcaattaacaagtgctgtatttgctaacatataagcaaggtatataacactgcaagaggcattttcagtgacttgccgatagctttctgcttcgtgtatatagtgatttgagttgtaggtcacaatattttatggcatttttattttgaattgaagtgaagcatggtaactagtctgatcttgcctagcctctctctctctctctccctccctctctctctctctctctctctctcacacacacacacacacacacaccccacacacacatatccctgaaagttgcccttggcttcactcaaacatatgttaattttcataagaaaggaaactggtggaaatacttcttaggtatgaaaattaattaatttcattagcagcagatttattttcccataaattattcagattttgggggtagatgtaaaagtttacttaggcatggaagacattagaccttttaaaagcaaagtgggctatttcaatctaagaagttagttaatgtaccttagctttctgaagctaggggaaggagaggtgtctttttgttgtgtctttgggtttgaaatagtattcttcatcctaggaaaaagggcttttag

SEQ ID NO: 138633 - DNA, 1014 bp, Homo sapiens
aaaaggtgggacctccttttgcatggaatgtttataagatccgctcttcaggagattatcaggagattagcagtgtaaagattgcactggaggaagacagaacagcaggcagatctgataaaaaaaaaaaaaaacttttgtggggttgggggagggggaagggatagcattaggagatatacctaatgtagatgacgagttaatgggtgcagcacaccaacacgacacatgtatacatatgtaacaaccctgcacgttgtgcacatgtaccctagaacttaaagtataataaaaaaaatatataaaaagataaaaaaaaaacttgtggagtaggccagacatgaggtgataaacagatatgacggaagaatctcagatattgcaaggcaagaatccagagggatgggtggttgactgatcctccctttgttttttatggtcaaactgcagtctggagacagaggaaagtgggaaagttgaaaacgagacctgatttggcagaagaaagagttagaaaaaaacagggaaaataatgtggcagtaagttagattggagacacttagactttcctaacttgaatcgtcctcactgactttccttctcccttggccacttctaaattggaccctgatctgctgctgcgagtgtgtctgtcactaacacaaggcacaatacccttaccagtgatgtctctctgagaatgcccttactggggatgtctatctgagaaaatcctacttgcactcaaagacagagttcaagcctcacctcggaaaaaacttttctgacgcctaccatttagtatatatgactgtgatggcatgattgcactaatgttgtatctttgtttttccatctgtttcccccactagacagtaagctcttccagaaagaaggggatttggatcctaattgtctcttatctggagcacccaacacagtgcctggtacatactaagccttaagttaatgcttgattaatataaataaataagtgggtgagtgtggtagac

SEQ ID NO: 138634 - DNA, 1046 bp, Homo sapiens
tccacacgctatgattttgctgaatttctaaggagataatcaaggctattattgttaatagatggggaaaatcatctaatgatttccatattttgtcgcaattgaactgagacaaagtagtctttcctattctctgccaacccacccccacaaaaaggaaaaactgtccttcacaggataataagttatagagcttgtttttaaaataaagtgtccctgaattagaaaaaaaattctataacacctttgacggttgcctgagggttctgtaagtaacaacaacttaaaactacaaagattttttaaagaaaatcgaaagactcggctgggtccttaaatgagtttctaaaagatggagtgtacacacaagcttttattatgctgaaaaatatatataaattttatatgctacaatttaatggcaaaaacctttaataataaattccactgtaatgaaaatcttcacaacaaaggccctctgaatgtatggttgataatgacaaaaatcccagtacatcaaaaggctatgtatatagttccttgggtttcaatcaatgaaatatttactgagaacctaacatgtgtgcaacactatgctagatactgagtggagactacaaaagaataatattcacaataggcagaaattctggattccagaattctttacagcatatatagtaataagagcctgagtatgttaggaacatatgcctggcaggggctttggcaaactgtacgcctatcttaaactctacttaaacaatagctccacaatgaccttttcttgcagtcaaacttctcattgatcccttacttaatacaatttaactccttcctctatgaagataattggtcaatcctctttatgtcattaagcttttaagggacaatgaagttcttttactcgtcaaatgtattccaagtctcatcaggtaaacaatatctgaattaactttaatttttaaggaatattgcacgtaattatttccaagatgctgcacatgaggacaagacctgtattcagcatttacttgaggagatga

SEQ ID NO: 138635 - DNA, 1824 bp, Homo sapiens
caaactgctggaaattttgagtcagaaaaggactgataaacatttttgattgcctggtctcaccctctaaacttgtccagccttctgctgtacttgacctccatctttggaaatccactagtacagtgaattctaaagcagcaacctccagtctacccttagctggaactcattaaactgcctcttatatttgctgcagtgagctacctcaaaaggtataagctgtgagaagcaaaccccatgtttagctaagcatctggagatgtttagcagctgccttttctaaggatttaatgcctaatgaaagcttgatttcactgcttagatcttgggatggaatatagtttaaattcttctgcccaagtcttttgaccgagtcttttaagtcagtattttgtgagctttcatgggcattcaggattgtgtatgtgtgtaaacccattattgttagataaatagattccttttgtcatttctttagtgcagaaaatttgtagaatatgttggtcaaaccaaattgaacttttaaatccagcttttccaaaaggatatgcatctgcacttgctaggctttcttctttaagtcctaatgagcactgtcctgagtgggctaatagagaggtcgcatgtgtattccagatgagggcacacaatatgtgacctcttcataaagaaagacaccagatttagacagattcaaggatgtttaaagcaacacacacacacacacacgcatacacacacaacccgagcgtcaaagaaaatcctagtctttcttactgtcaaatttatgagacaaagtagcaccccaaaagacgcttttgaagtgatagattgcagcacgtaccacctggacatgggcagtgtaaaacagcagctaaaatcaaaaccacttggattctggcttagctttctccagacaagtacttaaaatagcttaaataacaggatgcaaggggagggaaaacatttccttttaaggatatgcattcttggtgtgattcaaacttctgcaggaacatggctgtgtaataagtttatttactttaaggtttacttaggggagggcggcgggggagttaaatagtatttaaaataatacttggtaaaagagaataatgagatttcctttaaaacaaaatgcagatgtgaacctacacgtgtcatcagagagagagagagagagagagagagagagagagagagagagaaaggaaacagtccttttaacagttgattcttttcttatgaattcagtcagtggccaatatgaaaaatgggcctgtctggtgcagcactgggagctgcgtagtgatttttttttaagtatcataattttcttcttttaaaaaaaaacgctttgtcaatttactcaaatttagccctttactttctgccagaattgtgttcagtgataaggtagagtttcctttatccagcttctccttaatgtccagccatactgaccatattttctaaaccaaaaggttgagaagtgctggcattgaaactgcactgcacaatataggcagtatggtaatttatgtctgctttatcagctggttggaaactatgatgctgaaacagaagagtcttcaaaacacagagcttttcccactccataccaatgtatagttaatgagaaaatggcaagtgagccaaaaaggtgttgcagagtattggcagcatgaatgagaaaataaaggactgccatcattcctggtggttgtgattttagtttccagttgttaaaacgacttccaatctaggtatgttattttgggtcagtttattattaagttctcatgtttatgtcaaaactca

SEQ ID NO: 138636 - DNA, 1048 bp, Homo sapiens
acctctcttgaacattaattagaagacagttcactgatgtgattaaaagatgccaggaagtagccaccctaaaacataattaacataaaataaccacatttggaaatttcattttgaagtaagggcagtagtaagaaatgcttttagaaagggacaggaaaattttaaaggaaattggaggaataagaatttgtcattacatgacaaacttccttattaggctgcaaatctcccgataaagattcttttaaatctttgtatctcccaccccaatatgtagcacaatcttttgtgtataataagcaatggaaaaaaattatttttgtagaatcactgattctcaggaattgaccaaagaaagaatgctctaatcctagatgagcattttagaaacaaaactaaacaacaatgacagaaatacagaaatagcactcaaagactgaatggcaattcatcgagaaaccaaaacttgacagaaatatcccttaaataacattcaatctcattccctttgttctaatcctgtccctacccagcagccttcagatctgtaatttggttttctaagtgaacacacccatcaaggagggcccaagtggaccaccagtgatagctctctggtcaggatctcttttgttccaaatgtagaaacctgctttggctttactgagaaaggagatgtgcacttgtttaggtatgagtcaccctccagagcaaactgagtacctaccctgtgggaagacacccactgggctacataccaaagatacagaaatgaatcaaacggaacccctgggtcttacttgaaactgtggctacaaaatccttgtaaaaattttgagtcacttcgaatacatatccttaggctttcctggatgacaagaatgtgcgtcgtcttctaaaagttttacctattctgccattttcccatagtttagcccccagtgttagtccaaattacactacctcccatgatcaaaggcattttagtgttagttagagtcaattttatcaagcctttcttagagctcttaaatcatatattttg

SEQ ID NO: 138637 - DNA, 1598 bp, Homo sapiens
ctgtgtttgcatgtttgatgggcaggggaatgaagagagtgtaaaataaccaatctgaataaaacagccatgctcccaggtgcatgattcgcaggtcagctatttccaggtgaagtgcttatggcttaaggaactcttggccattcaaaggacttttcattttgattaacaggactagcttatcatgagagccctcaggggaaagggtttaagaaaaacaactcctctttcccatagtcagagttgaatttgtcaggcacgcctgaaatgtgctcatagccaaaacattttactctctcctcctagaatgctgcccttgacatttcccattgctgtatgttatttcttgctctgttatcttttgccctcttagaatgtccctctcttgggacttgcttagatgatgggatatgaatattattagacagtaattttgctttccatccagtatgctagttcttattcgagaactatggtcagagcgtatttggatatgagtatcctttgcttatctttgtagtactgaaaatttgccgaagtaactggctgtgcagaatgtaatagaagcttttcttattcttttattcttaagatcagtatctttttacagtattctttctacatgatccttttttgtacatttaagaatattttgattatattaaacaagactgctgattttgctactttttttaaggggtcttcaagtaagtaaaacatacatcgtagctagaagaaaaatgtaccttaaatttgcatcttccctctcatacccaagctgtaaacaattgaaatattttgtcttaaatcacttggttcaatacatgcttatttgttttaaaacctgtatcatcaaactctctctctaaatttaaaatgctgttgaatatgatacttttgaggagagagtgtgctcagaacttagacgggatttggtaggccaagtatgctaagtgtacaatatattttttaattttacacctgaaacaaagaaatgtggtcactaaaaataaaagtatatatgtaggaattaatgtactcttgctttgtcaagctgtttgctatagtttccaaggtattatgttactctaactctgaaaagtgatgtaatctggtagcaatgtagtagttcaaataaaggcatttacataataattagtctgttcttcatgcttttgtctcttaggaagtatgccaatgtttgtcaggatttttttctttttgtttttctgatgtattctgtaaaatggtgtttgttaaatttgagttttgggagctgaattagaggtactgaattaaggacagtacaaatgaagtaaaaaggttttctccaatttaccaaaatttctttatccagttcctgcttttttctttcttttccacctccctcagtcttttcaatgttctatgatatacatatcctgaaacagtggggatctgaacagtcacagaggagaaatggttcatagtagatcttctcaatctcatccatatatgacatttttggctggataactctgttggggtggggagaaggggctaccctgtgcattgtaggaggtttagcagtattaccggcctctacccactagatgtca

SEQ ID NO: 138638 - DNA, 1008 bp, Homo sapiens
cttctttactccagaactctgttctttaaagaccaagattacattctcaattagaaaactgcaatttggttccaccacatcctgactactaccgtatagttttctctattctttcatttcccccttccctattcctttattgtacataaagtaactggtatatgtacacaagcatattgcattttttttaactaaacagccaatgatatgttttgattgacatcaagtggagatgggatggggaaaaatactgattctgtgaaaataccccctttctccattagtggcatgctcattcagctcttatctttatattccagtaagttattttgctctcactgttttaacaaaaacaacaacaacaacaacataaaaatccttgcatacctttttcaattggagaattttaatgattttcatttatcattgtaaaaccaaggacaattttataactttttcgtacatagctgctacatgtagggcaatctgtctttaagtagggataaattactctaaaacaaaaaagaatcctagatacttttcccttcaagtcaagcgtcttgtttaaataaactgcttgtttaaaatgaaaaaaaaaaagttaaatataggtttaccatgtgatccagcaattccactcctaagtatatacccgagagctaaaaacagatattcaaacaaaagttatgcatgaatgtttgtggcagcattattcataaaacccaaaaggagaaacaacccaaatgcccatgaactggtgaatgtttaaacaaatgtgctatatgcataccatggattattttagccataacatggaatgaagcacagatacataatacaatgcggatttaaccctaaaaatattataataaagaaccagacacaaaagaatgcagattgcatgatctcatttatatgaaatggccagaataggcaaatctaaacagacacaaagtagattagtggatgccaggggctggggaagggggaataaggaatgactactaa

SEQ ID NO: 138639 - DNA, 1017 bp, Homo sapiens
ttctccttttgggttttatgaataatgctgccacaaacattcatgcataacttttgtttgaatatctgtttttagctctcgggtatatacttaggagtggaattgctggatcacatggtaaacctatatttaactttttttttttcattttaaacaagcagtttatttaaacaagacgcttgacttgaagggaaaagtatctaggattcttttttgttttagagtaatttatccctacttaaagacagattgccctacatgtagcagctatgtacgaaaaagttataaaattgtccttggttttacaatgataaatgaaaatcattaaaattctccaattgaaaaaggtatgcaaggatttttatgttgttgttgttgttgtttttgttaaaacagtgagagcaaaataacttactggaatataaagataagagctgaatgagcatgccactaatggagaaagggggtattttcacagaatcagtatttttccccatcccatctccacttgatgtcaatcaaaacatatcattggctgtttagttaaaaaaaatgcaatatgcttgtgtacatataccagttactttatgtacaataaaggaatagggaagggggaaatgaaagaatagagaaaactatacggtagtagtcaggatgtggtggaaccaaattgcagttttctaattgagaatgtaatcttggtctttaaagaacagagttctggagtaaagaagcaggttcccttttcagtagacacctcccgtctgctgttggaacacatcaattgtatcttcatcctccatttccaactgtgcaggtgtgtctgtttcattgattggttgcccgtcgaatcggaatctgatctgcctcactgacaatccctgtcgttcacaataggctttcattagtttactaagtggtgtatgcctcttaatcttaaactgcaccacagaaccatcctgccccgccaccttcaaattaatatgatcgttgttctcagtcttgactccttccttg

SEQ ID NO: 138640 - DNA, 2365 bp, Homo sapiens
gaacagtattgataaggtatatgtcataatatgtgactaaaagttatctgtgacagagctcctttaattacttttgcatttctataattatttacttcaaaactattgttttcattctttaggaggaattactcatgatactttccaaaaggagctcatgtgctttgaccctgatactgacaaatggatccagaaggcgccaatgaccactgtcagaggtctgcattgcatgtgtacagtgggagaaaggctctatgtcattggtggcaatcacttcagaggaacaagtgattatgatgatgtcctaagctgtgaatactattcacctatccttgaccagtggaccccaattgctgccatgttaagagggcagagtgatgttggggtcgctgtcttcgaaaataaaatctatgtggttggggggtattcttggaataatcgttgtatggtagagatagtgcagaaatatgatccagataaagatgaatggcataaggtttttgatctgccagaatcccttggtggcattcgtgcttgcacactcacagtttttccaccagaagaaaccacaccatcaccttctagagagtcccctctttctgcaccttaagatcatctctacaactaagatgctgtagttctatctttgcaatgtgtcataaattctcttctttttcccccttaagtagtatatatgttaggattaccctctggtaattgatacagatattggaaaaaagacaacattgatgttatttgtgctctttgtttggcctagaatgtttataaagtggtaacacaaccattctggaaatgtatcccatagaagctgatgtttaacatatgaaaaaaaaagtattgtctataaaatgtttcttcagtactttttaaatgctgtgtattgggtgtaaggtatttgtcatcttacattagtaaacccaataagccaagttgaaggtggattatagtaaatgtacaactgtgctcactaggcttcaagtaaaaagttttcctttcatctttgactgtaagatgtcaaagggaggcagcctgcttgaacaggaaacaatacacaaaaggttgccaactcgcatgagctacctccctcttttcataaagtatttttgacatatctgtcaacccacttgactgtgtgggtgcattgagaacacaaagtttcctagacacacaggagaagtagcttaaattcactaatattaatttaaaaagcagcatgaaccctctacttataaacaagggtttggtgtttttaaagtgtgtatacatacatacacatacacacatgcacatatgtcaaatataatttttttaaaaattgagtggcacatcaaagaaatgtgaaattaaaaagaattcttccaaaaagcagcttccattaaaatgggaattcagtatgcacatactgaatgcatatatgtagaaccatacagaatttaggtggataagggctagaaattttgagcaacaaaatttgtcacttgaccagattttatcttcaaaaactgtattctactccttctcctttgctgttgaggtaacttgcatattatatgtattctgtatactcagttcataaggttatttagcacaaagtatagcagcttcacctggagagctgcttttgctcagtaaattcaacttccatgttttatctttttttgttcaataaaaacatttaatgtcattttggtctgagacatcccattattgtctgatttgacttcctttgattaaatatctatatttttggcatggcaaaatgtgatcagaatttacagctctgagcagcttggatgagtgaatatgcctttttattcaaggaaaaaaagaatttgacaaaatctaaccttattcatcaaaactcattgctggttgtgtttggggaattagattatggaagatgctaactggcttttcatcaccacagaagaactgccagccatatctaaaccagaagagcagttacaattccgagtttagtctccctgatcttcaagaggatccatcttgcctgatgagaagggattgtgtaaaattaccttagagatttgtcgacctgggatcccaaaggaaaaatgtttttgtgaaagattatttgagaattatattagcatcgtattgtgatcttctctactttatctgcagatgatcagattaaatctgagccaaaaatttagggctatgataatacaactagtgagattccaaatttctttaccattaggtaattagcagtgcagatgtcactgcatctatcttgagttaaataattaaggaaacaattttctcaataggaaaagcttggtatgaatttgaaaatccctcttgagcattattgttctta

SEQ ID NO: 138641 - DNA, 1387 bp, Homo sapiens
cagcttctctgccttttaaaaagtgattacattttccatctttcttggtgacattgttctgttcttgaggttataacagactgattgaaagatacttaagtgagttgaggtcacttctccaaaatacattatgttaaaagatgataaatacattactgacaggaagtattcttaataaagatcttcatattatgccgccaaccatcttcaggttaagagtagtactggctgcaatgatggtgggtatatacgaactattagctttaaagtataaatgtagagaaattattatcagtgtccattttgtagtctgtatatgaattaaagcagtgggcttcagaacataaaccaagaagtgtgtatattttcattctcaatgtaaaagtttgcttcttatgtattaacgtttgtttctatcaacatggggacccagaattgaggagtttttcatttcttttgatttttttcatcctttcttcctatgtttttagagcaaagaaaatggagaaatgtcaaattataaatatgtaagcagattacagaataaatcttagtgatttctgcaatgacagaaatttgttagattcttacactatctagtctaatgtaacatgtactaatggtttatattattaatatagtctcaataattactgtaagagctcccccaaagtcttacacatatctatcatagctataatagatatgtttcaagtgtttggatattattactgttccacttaagagaaaaataattaattgctaaatttgaagttaaaaataattttcttttctttttttttttaacagccacagtagaatgttacaatccaagaacaaatgaatggacctatgttgccaaaatgagtgagccccactatggccatgctggaactgtgtatggaggagtgatgtatatttcaggtaaacaagtatcatgtgaacacaatataatatataagcttttaactatatggttatctttccatatagtggtagtaataataataataattcaggcgtcaggagtttgagaccaggcgggccaacatggtgaaatcctgtctctattaaaaatacaaaaattaactgggtgtggtggtgcacgtctgtaatcccagctacttgggaggctgaggcaggagaatctcttgaacccagaagacggaggttgcagtgagccgagattgcgccactgtactccagcctgtgtgaaagagcgagactccatctcaaaaaaaaaaaaaatccagaaaaacggagaatcaaaatataatttatgttgattttagaaactatttttgtgtgtatttgcatatgaatgtcttgggcattctgtaaatttataagagtactagtaaaccaatcctgttgtaaggtataactt

SEQ ID NO: 138642 - DNA, 2625 bp, Homo sapiens
ttaaagtctaattaaaataatctatgaaaataacaatgtgtgtgtgttaaccttagagatttcagtgatattatatcctaactgggctgtcattttatgcggaggagtaatgtttttagctttgtttcagtttttaaagaaatgtcaacaggaggattattttattttctcttaaccatctgccaaatctgttaactatacaggtgtgaggttaacaatacattgataaagtttgtgtgatattgaggacacataacctgacaaaattttaaaaacaaccaaacatttaagtcttttgcctgtgatctgtgtctgtttgtatacatacacactggcattttttattgtaggcttgtttttgtggtttgttctttgtattatatttgctaatattatttttcctatttttcctttgatgagtcagttattagagcattgaaaagaggttctactgaggaaaggcctctctgtcacttctcttctttgtcagcttttcactttatggtatattttgctctatggtggggagatggttctgggctcatgttgacgccagagagaaacagaatgtgctgaaagtaagagtggctaaggaaagctgtgttgcccagatggaagcagtcatcacagataccaaaatctcatttacatgagagatttgttgtagatatacccctctgcccttaagaaagacatttccttgcttatatttccagataaataatgttgaaaattaatttgccctagggataattatcttattaaattattttcattatgagtgataactttgaaggaaccaaaatgaatgatagtaatgagtgatgcctatttacgtgaaagggaaatctagggtttgggtattagagcttttctgttcatggatctgctagctgtgtggtatttttaagaataatgactaagaagtggattgagatgaatcataatagaacaaccttctattttcccaagtttccatctggcaggaattttatcagtattttgggggtgggggtgggatacatttttgaggagagaagagtaactggtttggccatattccagttataacattgtttcttagagtagcttctaacttactgactttgatcattttcttttagtcagccttctagtggattaagtaaaggtggtttgcaaattatctgtttgtagatcattgatacatttagataagaatcctatttgtatctatttgaacattaaaagcataatttactcttattctagaacaggtatttgtgctatcaagatgtgattgccatgaaagtagtcatgttttaattttttttaattggcttaataggtcactttagacaactgtgttgaagttggacggattgccaacacctacaatctaaccgaagtggataaatacgttaacagtttcgtcttgaagaattttcctgcattgctgagcacaggggagttcttgaaactcccttttgagcgtcttgccttcgtgctttccagtaatagccttaagcactgtactgaacttgagctctttaaggctacctgtcgttggcttcgcctggaagagcctcggatggactttgctgcaaaattaatgaagaacatacgatttccactgatgacaccacaggagctcattaattacgtgcaaacggtggatttcatgagaactgacaatacttgtgtgaatttgcttttggaagccagcaattaccaaatgatgccatatatgcagccagttatgcagtcagacaggactgccattaggtctgacaccactcacttggttacactaggaggagtgctgaggcagcagctggttgtcagtaaggaattgcgcatgtatgatgaaaaggcccatgagtggaaatcgttagcccccatggatgccccaaggtaccagcatggcatcgccgtcattggaaattttctctatgtggttggcggacagagtaattatgatacaaaaggaaaaacggcagttgatacagtcttcagatttgatcctcgatacaataaatggatgcaagttgcatctttaaatgaaaagcgcaccttcttccacctaagtgccctcaaaggatatctgtatgcagttggtgggcgaaatgcagcaggtgaactgcgtaagtgcatttatattaagcatagagacaaatttcttcactcagaaattcttatcaaatcataaaataagcagtcctgtaaaatcagataaaaatgtagttagggttttattttaaaactatttttctgagaaaatattgaagaccatctttatgccttatctgggcatatatcgttggcaagggaacaaattgtacgttacaaatacatcagtatattgtagcatatttcacctgtgcagtatatatggtcttcatcttgaaggttcatctaaagagtatacttagctcatttaaattataataaggtcttggatagaagtttggcatgttttctcattttctgcttttaaaaggccatatgatattttactgaacaggttacaatccttcattacagaaaactttcattgtttcttcttttacaaaatatgttacctattagtggccacaaagataattttctttatagattaaatgtacaaagttcaacattatccaa

SEQ ID NO: 138643 - DNA, 2167 bp, Homo sapiens
agtcttattctgtggacatggtttcattctctgcattgattgtactagatatcaggctgtcattttaataaactagatagcaccaagtagaatttggcgcattgaatggctaaggagttccccaaatttttgccagatttcttagtctttgcatttcccttgagagtacaaaagcagatactggctggtccgagtgcagtggtgtttacaactaattgatcacaaccagttacagatttctttgttccttcttcactttgactgcttcactcggctagccagaaaaaaaaaaaaaaaagcagatacccatttttttctaaatgggaatttctttgtataaaacaccaatcttttaaaaaaagtcctagatttcagatgaaatcttccattaaaatagcaaattatgttaatgacagtgttttgggtacatcagttataatttgaatagtacagcagcagtgaggaccagtatgttattgagaataccacttgcaatattatgatgttggaagtgcctttaggatgactatgactgttgtttggttataaaagaataatttataataatttatatcaaagaaatgtaaatgagcagttgattattttaagaacaattttataggttcccacaggtgcttgaagagttttatccttttttgttgttcttttttttttttttcttttttttgatggagtcttgctctgtcaccaggctggagtgcagtggtgcggtcttggctcacagcaacctccgcctcccgggttcaagtgattctcctgcctcagcctcccaggtagctgggaatacaggcgtgtgccaccacgtccggctaatttttgtatttttagtagagatgggtttcaccatgtgggccaagatggtctcgatctcctgacctcatgatccacccaccaaggcctctcaaagtgctgggattacaggcgtgagccaccgcccccggccttgttgttctttttaaatgccaatgtagttatttggattaacttctgttataactctgtttttaagtgaaccttctttggaattgtggccaggttttcagatgaaataaaagatgaactcagatgaaatttctacttagaaatttttaaaataagctttaaacttcatattttatattttcaatgtgtattctattatatatgtaaattgcattataagtccaattatccatttatggatatccaattatccatttatccttttatgtatccagtggataaacaaacacatgtatccatttaaaaatactgtctaggcttaatgtttggagatttctagctgagtcacttttaagaatcatgatggagaagtggattaaaatgaaccataatagaatattatgtatttctctgggccattgtttactataattccatcagttttggtctatttatattgttaattattactgtagactttgcttctttaatttctatattctatgattaatttttaagctttgattacatatacttgctaagaattaatttcctattacatatttttcttgtctgtgtctcattttgaaattaataaggttttagtaatttgctacattaattcaacaggtatcctatttttaattgcatctatcatcgtatctttactttttatatttttgatacttgtagtatttagcctttgttgtatactcacagtatagtagctgttgtatatgagctatagaaaatacttagtcttgggtaccccataaatatatataccaactatgtgcctacaaaaattaaaaactgaaagaaataaaaaaagaaaatacttagttcttctgtcaagaagataacagttcggaaggttatggaatacctttctctggtgattttaaagaaaaaagtaggcagctatttgtattggttagatggtctgtcaaagtcttttctagtcttgtgtgtctgtatatatgaacgtattgatatacagaaggtattttccaaatgcctgtaaataaaatttaagtttctttctcatgttattctagcaatcgttttctcactggataaatttgaagagggaaaaggtgaaggaattaaataccttgatcccatttctgaattatacagtttggcttttaatctttaatcttgctctgttttacatgctataaatttagatttcagtttggtg

SEQ ID NO: 138644 - DNA, 1845 bp, Homo sapiens
aatacaattagtagaaagaactatcgtgtacttaatacagttgctctctacttttctttctcaacctcccccaaaacaaaacaaaaccaagatgcttcagtcaagcactataaaaggactattaaattatcgcgaaaaggaatgttaagacagtctaatactctcattctgcagatgggaaagtagaagtgcacattgtaattatttttcaaaataaggtaaaagctgataattgtgtaaataagcaaaagtatatactttttccttaatcgtttttaacctaaattagtcttaattttgtgttattcctacagtgaaagaaaacatgcattgtcacatatcaggaaagttgtgcagttattttttcttctcccgaatattctgttggctttatgttccacatatgttgcaccacattaatattcaaacaattttagcacacgaagatttgtaacctcattttaccttgattagtgactcaactcatgttcttgttgtagggctttgaccagcttcgacttgaaggattgctttgtgatgtgaccctgatgccaggtgacacagatgatgctttccctgtgcatagagtcatgatggcatctgctagtgattacttcaaggctatgttcacaggtagtttgccttttaaaactctgaaaccacattaaaacaatatgaaaaatccgtgtttaaatcttttttatttctaacatgaaatttggttcttttggaaacagcttcaaaagaagtacacaacagtatgtatggttttcggtggtgctgttttaacatggaaaattgatgcacttttttcatactgtccatctttatctcacagcttttctttttcaagcttatatctagtgggccatcagagactctgtgtcctcctagtacaatctctactctatgtcaaaaaataggaagtgagaacattttggaagcacttgcatcatatatgacctccattagtatagagattatcttttttaagtactttcttttaacagtaaaatgtgcagcagactgactctaatatgactgcttatataagataagactttcctttgattttattgcatctaattagcagcagaagtgagtttgaccataattatccaccttcatttaattgaatgtctttttatttaaggtggaatgaaagaacaagatttaatgtgcattaaacttcatggtgtgagcaaagtcggtctaaggaaaattattgatttcatttatactgcaaagctttctcttaatatggacaaccttcaagacacgctggaagctgccagtttcctacagattctgccagttttggacttctgtaaagtgtttctcatatctggggtaagatattttgaaatctgatttttcctgtggtagactctgatgtagcctgtttaggactcatgaaatctgctgtgcaggaatgtgaaacttgccattagacagatgtgtcttgttgtatgtggtctgtaagcaaggtgagattgaaacaggtgcatttttatgaaatagaatcatttaataaaagcctctgtgttggccgggcatcgtggctcacgcctgtaatcccagcactttgggaggccgaggcgggcagatcgtctaaggttgggagttcaagaccagcctgaccaacatggagaaagcccgtctctactaaaaatacaaaaattagctgtgcatggtggtgcatgcctgtaattccagctacttgggaggctgaggcaggagaatcgcttgaacctgggaggtggaggttgtggcgaactgagatcacgccattgcactccagcctgggcaacaagagtgagactccatctcaggaagaaaaaaaaa

SEQ ID NO: 138645 - DNA, 1064 bp, Homo sapiens
gaggtggaatttgggcaggtgtggtgactcacacctgtaatcccagcattttgggaggctgagacaggtggcggttggggggcatccttgaggccagcctgggtaacatgatgaaaccccttctctacaaaacaacaacaacaaaggaggtctaatttaagctagtctttgaaggaggaaggatattccaggtgaaaaaaaatttttatcaccaatgtgatcgtttggagaacaacctgataagacgggtcagagtatatagggaactaataaaaaataaggttgggatcagatcaaagaagtctctgcaaaccagaagttgtgctatattgcagtgatggaaagtctttacgtttttaaagtctaagcagtgttatataataatgagcacagagtttaaaattaatataaacatttatgtccagcctatatatttgttttaacttaagtgcatctgttcctttttctgtcctttgaataaaatgaagagcagcctcataaaaacatggctggtattgtttttatctaatacattacatttacataacactggagtaaggccatttcttaactttctttagttccttaatctttgttcatagaacatattttccattataattttaactactcttttcaggatgtgtttcgttttttctctacttaaaatgacaatgatcaaaactagatataatatgctagtaagtttgttctaatgtagaatttagttgaattatttgtttatcaaattccttttaaatacctgacagtatcaatgtagctttttttcacaatagcattatatttcacttgaaagctattgacatccaagtaatttttatacaaattattcatagcttgtctggtttccatgttataatcctgtaatatcaagtcatattctattctgttttaatatgatcattttaaaatttatcaaactcattagatgtttcagactttctttgtttcctggtattagatatgtacctctctctatttaatagaggttgaagttttgatacattgggtaagtttaatacagtgaagagaaaaaacatgtt

SEQ ID NO: 138646 - DNA, 1758 bp, Homo sapiens
cctgggccaaccactttaataagtggtttctgacccttctttagtctgtgtataaaattattggcaagtacctgctatataatgactattcaataaatggtagctatcatttttatcttttcaaaattaggtgttccaaattaattttaactatatgcagcataatttgatggcattgctatctaaatagtaacatatcaacagtaattactgtggcctttaaaaactctgtgactataattttgaaccaccttttaagttgatttctcagttatcatctgtatattctgtacttggaaaccattttacaaatatacatttcttctaagataaagagtggtacaagcgtataatatagtgaaacaatattcaccatattgcatggtcatatgattgcaatagtgactgattatttttctaaataatctcattgtaaattgtacaagttttaatttccccttctttcttatgtaaaaaaactttcagatctctcgtggaagaggaagaccaacacatgaaattgtcccttggaggcagcgaaatgggcctctcatcccatttgcagtcttccaaggcaggacctacacgcatctttaccagcaatacccacagttctgtggtgttacaggtaatttaagctgtctctttggtagtgtttacgtagctttaaaaaacccaccatggattttgtgatgcaggatgtcagtagtggaggaggttgtgggtgtgtatgtgtgaataggaaatgtatggtaactattttttgctcagttttgctgtgaacccaaaatggctctaaaaaatgaagtttattaagtaaagaaacaaaagacaaaaactaaccaggagagaaatcttgatggaggaatgcacacattcctgaggttaaaaaatcctcagaatcaattttttgtttggtttgtataaaggacattttgccagtatgccactttcttacagaataccatatctgatttcattccatagcaatcaaagtaagtattacaaggtccctacactgaattttcctagttcctcattcacagcctgttttactatcatctttgtaatggttctaaagattatatttatttggtgtcccaactcgcattggtagtagtaactgtgggagaagaggttaggactgctggatgcaaaccctctgatacatgtaataagtaataactaaaataaaagcaggggacagaaacacagtagaaagccaaaagaacatgaaacacagcaatctggagctatttagcacggggattagaagcttaagtacttctgacctttgtggacattttctgacttctgtgggcattgctgaattagagagcaatatggtactggatgtccattaatgtcttctaaagatagttaaattatattggtcctcttactacccttaataagataaggaaaatttgcctttctaaatgcatatttaaaagaaatctccccagatggatttcatgcatatccctgatcaagaaccattatagtaaagctgtatatagaatataatataatgagggacaaggtttatacttgctgtgcatcctctgtgtttaaatgtaatttcaccggatttcattttccttatctccaaaatgtgactcttgactagcatacctctaaatttcctgctagtttcaatctttgaattcagtaaaatcccatttccccagtatttccgtttctaattggagctggggtctatctaaggttcattgtcctgtgggtcatcaatagata

SEQ ID NO: 138647 - DNA, 1104 bp, Homo sapiens
tagaaataaaataattatctcattcagaaaatagaatggattcttacataccttatctacctaccattcatccatccatgtatccctttatccatccatccatccatccatccgtctacctatctaccaatctacccatctgcttatcttgctttcacacaaatataagaaatgtggagaatgagaaataatatataaactaagctttctaaatagaaaacatttttggtcaagatgaattggacatgatgcagtttaactggtatataaattttaaaagatgaagggacactaaagtcttgaaatatggtaagcagagggagcaaatattattttgaagttctttaaggacaagattgagatattcagtggaaatgccttttgatttgggtaattaactttcatcctgttatagttatctaatggaatatcatttgtctagcccaattcccttatctacgtcatagtgttatatctgttattgtgatggttggcattagagttcagaatgtgttcttttaaatgttgatatcagtatgtgaaattctccccaaatttcatctgagttattttctaggatttactacctccctaccccataagtgttgggagaatagcatgaaagatttttagtgttggtattgtttttatggaaatagaatggtaaaagtaagtgatcttcagattgaattaattaaaccagaaaattacttgcctataacagaatgtatctctctgatatcctccttgtgcttataaattaagcattgaaatgctaagtgacttatagcctctactgtctgctatttttaattttttaggcttggtataaatgggaacaatgtaggctctggattcagatgtgggttcaaatcatagttactagactcatggtgaggccttaaactctccgagcttcagttccctgtctttattttattttatttttttattttattttattactattatactttaagttttagggtacatgtgcacaatgtgcaggttagttacatatgtatacatgtgccatgctggtgcactgcacccattaactcgtcatttagcattaggtgtatctcctaatgctatccttccccc

SEQ ID NO: 138648 - DNA, 1653 bp, Homo sapiens
ttagaaatcactcttttggtcataccatttaccttgaaagagaatgtgatattaatgcttgatcacttttcctccatctgtgtacatttgtatttgatgatttaacccagtcttaatttatatttccttttaaaaataccatttcttcaactgcattaaaattaatattaaagaccagctctacaaaatcttaactaggtttctctttattaaatgtgattatatcagagctcttctcttgtctgacagtgaaacatgttcttaattaatagtctgatctagctttagtttgggtggacctacaaaatatttgaaatacaattttgaaaagtatatggatgacactaaattgtgaatcattgtccaatagataaccccttagcatcaccaaattgaagtgattttctcattcgttacgatcactttcctacagagggtgcgtgcatgcagtcatttctgaatgattcacagctaaacaaagttcgtgaaactggaaacaaaggtttggttttaagtagactggagacttggttcattaatatacttttcatagaaatgttgctgaagcatatagatagatacaattagagtgttttttttaaatgatgtgcagtactatcacatcatcaagagttttgactttcttccatataattaaaattgcagattatgtttttgaatagtgaatattgtgtgattgctgatccagccctgcagatagcctgatctggaacaaataaccctttaaaataatagtaaggaaagttgatattatttatttatttttatttggtgcttatatgctaaatatgaactgatacccttatggattagagaaaaaagttggcaatcgttttgttattgtggtttctatgaattatacaacatgatatttgttagtaaagagtggtaagcatttattataattttatatcatttaattatttggaaagtaattgttttttattatcatctcttagcaagcaagtatcctgactgctctttgttttattatcatctctttgcaagcaagtatcctgactgctctttgttttcctatcatctagtgtggtgcctggcacatagcagatgctcaataaatgtcgattttataaatgaatttagagaatagtttttaggtctgtacctctgtgcagatcacttcacatgaaagtgttaagtttattcatctgatatatgcagtaattgaatatagtagttgtcccttatgcatgatttccaactccttggaatgagttacccatggttaaccatggcatgaaaataggtgagtacagtatgataagatattttgagaaagagagagagaaaaagagcacattcacataacttttattaaagtatattgttataattgttctatttattactagttattgttgatatcttactgtacctaatttataaatcaggtagttatgtatgtataggaataaaacgtagtgtatatggaatttggtatatccatagtttcaaacatccactgggggtcttggaatgtatccaccgaataatgggggctattgtgtatcatggtcttgttagagaataagttatgactgtatttcctatgaaaagaactaatcaaaaatccagattctgttcattgttgctgagaaataccatgatact

SEQ ID NO: 138649 - DNA, 1025 bp, Homo sapiens
tgtccctacaaaggacatgaactcatcattttttatggctgcatagtattccatggtgtatatgtaatgctcatcatcactggccatcagagaaatgcaaatcaaaaccactatgagatatcatctcacaccagttagaatggcaatcattaaaaagtcaggaaacaacaggtgctggagaggatgtggagaaataggaacacttttacactgttggtgggactgtaaactagttcaaccattgtggaagtcagtgtggcgattcctcagggatctagaactagaaataccatttgacccagccatcccattactgggtatatacccaaaggactataaatcatgctgctataaagacacatgcacacgtatgtttattgcggcactattcacaatagcaaagacttggaaaatgaagcaatttatgtttaaagttcatagtgtctttttaaacaacaagaatggaatactattctttacattggacagggaataatttactgtttgtgtgctttatagcacacaagtttacatatattaccttccaagcagtaataatttgatctcaaactctaagattgaatcttagtttaaaataaaattatattgtgttttcaattatactaaaatatttttcccagcataacttactatgatgaggttatctgttgtttttacccatttcccccccacatttatgtcatgctaaggcaagaacatgcccagtttgttggagaggatttcttataatatagttcaatggagtaatgaagtaacttatcttcaataacaaaaaaataaaaacaagtttcagaactttagattaaattttaatctagcatgtataacagatattctaaacttcatgagacatattccaaatttttaaaatgtcctagtttagcatagttaaatgtaatacaatttattttcctctattatagaagtgctaagcacttaatttcattcctcccaaaaagccctgtaagtgtacatcctctcactattttacgaataaggacaca

SEQ ID NO: 138650 - DNA, 1049 bp, Homo sapiens
gggcctgagattatattattttttttaattataggattcacactgtcccctagtgaatttacagtttgcaaattgcctttttgaaggccttacaatcagattgcttgctcctcactgtctgtgtttattcttttagcttcttcagatcttttagtctgaggaagcctggcatgtgcaaatgaagttaacattttgttttaaagcctattgtgtattttttaaaaagacctcttgaaatcatttaatataacagaaaaatattgcacacaagacacttgcaagacaaagagctagtgttcctgtcactttcagatatttcaaagacattcactggtcaataatttatctagattcctttttttatacttagtgtatcttccaagtaatcgcttcccccattgcaaagaaaccactttctacagagggaagagaggcagaatttcatatctccataccatcatgggaagtacggagttactgagaatttcatacattctgcttgaaacttagaatatttagttgagacttaagtatggccaaacttggggagacggagcgatgagaaagaagtatgggataggcaagtatttgtgctaataacttgcagttgaagagttaagaattacaaacaacatacatgataaaattttagattgacatggctgccatgatgtattgctttatatcctcaagactttgagaaaggcggtataaacatgagattcttggggaatcagtacataaataagttactgagtaattcattttagaaaatgctcagttctggatattagccctttgtcagatgagtagattgcaaaaattttctcccattctgtaggtagcctgttcactctgatggtagtttcttttgctgtgcagaagctcttgagtttaattagatcccatttgtcaattttgtcttttgttgccattgcttttggtgtttcagacatgaagtctttgcccatgcctatgtcctgaatggtattgcctaggttttcttcaagggattttatggttttaggtctaacatttaagtcttcaat

SEQ ID NO: 138651 - DNA, 3418 bp, Homo sapiens
aggctagtttgtaaaaataaaccagctatatttgtttttcaaaaactgtttgtcaaaagcacaaattaatggaggtgacaagttaatggaggtgagaagttaatggagctctttcacataattcgagaaaataggatgcttcctgactttatgcatcttaactggcaagaaatgactaaagatttaccaaaagcaactttattataaaaacaaaacaaaacaaaacctcactaaaatcaggttacaattataatggttattaatgtttctaatattcctactatatttgattgtctaaaagatccaaattgcagcccttattgcccctgatttgtcgatttttagagatggtgaaataaatccccatgttttattaaattcatgccagccacaagctcagatacaactcaacacaacattttaaattaatcactttcttccttttaagtgcttacctctttgacctgatgatatgagtgaatcaatttagaagatagaacctacaaaatataatagatcttgcatgttgactgttggttgttggtagtacacataggtagaatggaaaaatatattcaaagagcttatggtaggctgaagtattttgacattgtaacagactattttgacattacaacactctatattattgaattggtcttaacttatttttctttttatgtatattaatacttaatagtaagtaaatatgcacagatagaaatttatgtgaaatgtagcaagactagcttggggagtttaaatcaggtttttaaatatgttgtttagtttttgaccattttagatcacagttcattgcctcacttggccaaaaataaaaacatcatgtttaacatgtttttctcatcagtacttctctatattcctcaacacatttacacacaaaatgatacttaagtatagcataattccacttcaaaaatgataaagactgaattagattactgggtcaagtaacattatatttgttctcacaattgtttggctggcaaacataggtttaaatggttacttgtgtcttttgggtctaaactctttgcactgaaatagaattgttcaattctgactcctcaataaatcgtgatatataggaaatttacctgtaaaataatgtataagtatttaaagtagtattttgaatatagaattcttcataggtgatataagatctttttgtacgtatgcttgtgtagcatcagtattggtttgtaatgttttatcattacttaccgtgctttgtcaaatatacattacgtggttttcattgaagacttgagtactttgtcaaagactgaaatttcaatatgaagtattttaggtagtagtaaaaatgtgttatagtgattgagcatgtgtgggaaaaatctaaacgctccatggtctctttctaaacccagtgtatgtgctgctttgctgtagctcttccattgatgctacagatagggcagtactgctgtgctagtgaaggctacaatagagaacattttacttactgcaaacatcgagcagcaagactattacttttttccttgtgggtttaaagtccatgtttgttttctttctgtttgtttagaacttgaatgacagttgaaatgtcccaacatttttaagttttctttatgatgaagactatagtatttgtggcaatattagtagaaatagcatcttatatagtataaagcacttaaaaaattttgctgtaatgtcatactagaaaagtgggatatcttaaatacgaaagattcaggaaaataatacttcagtctctagattgattgatgatcaaatagtctttattgggtagacatattctttcagctttagattttagcattgcagggtggtgtgccatctatgtggatttctgaagggattgtcttgatagaaatagagtgcttggtgacatgtgtttgctttgcactctgttcaacagtaggttgaagttcaaccttagcctgagggaggatctcctggccagtgtaaactgcattagtaaagactctgcccctgacaggtgcaaaccatataaattactctgtcatttagcctaaattaataaagctgaaagagcaatcacatctaagtgtttttatggtgtttaggtattcattgttttaaaacagcaaatggttccttcaggcaaatattatagggttaatgccttgttagatgctaaggacacactgaaatagaacaaaattagcactagtgatcctttcatcttttcttttccagcagcgagttttgacaataatagtgtggcaaggaggaaggcaattaggtaagaattaaccagtgaaatataacagtgaattctagcaagacagaccctgtgagttgttttccttagaatgttacctttctcaatctaaaagacaatgaatgttagtgaactagacttgttctcctttagtccctgcacttacattcagttagcttcctatttatgattttttgatatgtaaaaaatatttttatagtaaatgccaaaaaacacaacattctatagcaattgcctctgtaatgtcttcaataaaattcagtacctggcatttcctgagaaaatattgtgtatattgtataaatgctccttgtttgtaggtgattcacagcacagacataataaaaatatgaattttctaaatttgacatgtttctatcccctaagattgtcttttttttctaatttagtaaataaaagaaaactttgtggttacagaaatctttcttatctagcaaaatacttattaaattgataatcatttgtgattagagaaatctttcttttctagcaaaatacttattaaattgataatctcaaaatagaaaagaatgtttagttgctttgagaacataaacttttacttgctttgtgtctacttaattttgtttttattacttatgcacaatttaacaaaattatgtggaaaaataacacaactaacacctaagataaattttgtgttagtctgcaacttttgtggcatgttctttgggaatttgcattgtctgagcttgcagaaggactaggttgtcatttattaatggaaaatcatagagatagaagtgaccttaaaagtcatttagaaagtccaaaccccttttaacacaggaactcattccatgacacctctcgaagatggcattgcatgtccttcttgaacactgtcactgacaaagggctcactacctcaccaaggctgcaccctccattcatggacagcttttccttgcattgagcaaaatcagttccttgtatcttttctctcccgttcccaatgcagccttatagagctatatagaaaaaaaaaaattctattacatacacgcttaggcgtcttctcatgtgacatggttttcagacccttcactcttcctggttgtcctcacgtggatg

SEQ ID NO: 138652 - DNA, 2702 bp, Homo sapiens
ataatttattaaaggaaaagtaagaactgaatatatatacatctccaccatcagatataatgcttttagggttttaggtgttttagagtgctgaggatggggtgtagggaggcagccttactttcttttcatgctgaacaaatattaaaattattggggtaccacaaaaacaaatattaaatattaagtctgcaaggaatctagactgaaaaattgacctggaagattcatggtattagatagcttctttggagcccaatgaaattcgacaaaagtatgttgttttttttgaatcagttgattgtttatagaagaataataacttatagaaggatattcttatagaagaataataatctttacaataaaatgatcttcacttgtttgtggtggttccctttttgggaatttggaaaactctaccttaacttgcctgttttccactcatcaatgtttgagaagtcttcatagacagataaactcctggaaacacttcactaccatgttttttacacaggtttttggatcttcattctcagaaggtgaagtagaccaggcacggtggctcacgcctttaatcccagcactttgggaggccaagtcgggtggatcacctgaggtcaagagttcgagaccagcctgaccagtatggtgaaaccttgtctctactgaaaatacaaaaattagccaggcatggtggcaggtgcatgtaatcccagctactcaagaggctgaggcaggagaattgctgcaacctgaaaggcagaggttgcagtgagcctggattgtgccaccgcactccagcctaggtgacagagggagactccatctcaaaaaagcaaacaaacaaaaagattcataagctggaaaatgattgagtctcttttctaaaacatcacctccttactacataatatatagctgctttatgttttatatttttaaatgtttgcaaatgcttcgggttttgaaaatttgtttgaaactcactgtggaataagacatttcaaacttgatgtgttcatacatgtgtgtggctgtgtgtgtgtgtgtgtgtgtgtgtatgtatttctccttctttggatttcaaacaagttgcccctgctgattatacctgaggcctttttgctatataaccattaaggattattgcagaaagccttctaatgtaaaatattgactataatttatgtgtattaatggcaggttaaaaaaaacttttaaatatattttggccactagcgcattgataaatattcctttctctgactcatttgacaatttctgtgagtctgttttgtgtgcaagtactaaaaggagttggatatgtaatttaaccctttaaaatgcttgactgggtttttgggggctgtttcttttgtatgataggttgaataaaaattgtatgtaaggtaatgatggctgacataattttaatatttacaaagttcatatattacttgtcaatctttcaaaataagctttctctttccatatatgtatgtatgtgtatatgtacatactgcatgtacatatatgttttgtgcttcacaggaaaatagtagtttgtctttttgccttgatattggtctgtatcttaaaaggaaggcatttgtgattatgttagttgatttcatgctgtatttcttatatactaaatttggtattttggaatttttgaaaatagttccttactgtagaaacattcatgtgtgtttctaaaatacagatgaaaaagcctcttaggggactaaatctcaatctttaaaaactaggaataatttggaaagaatattcgaacgctaactatttaagttggaagcatgagtttattgtttggatacagacttgaaagtaaatatgagctttgttcctgcagtgattttttaaaaataggtagttgctttcatgtcaatcatgatctgcctttactaagcttgcattgatggaaatggataattctgtttttaggtagaagcagaagggtactatgattgtgaattgcctatatcagaagtaaaattcttcagcctgtaaataaacagttcagcataatactcatttaacctatattcactttttagaattgtgtagaaaatttgtgagtttgttttggtgctttaaacagaagcttaaaagtcactttcagggcatttacaacgctattttctggcagtattttgaaacaatatagatgagccctttatttgccattgctttcatgaaatacctcaagctgcctttgacagcagcttcaatttttgaacctccttgacaatcgctaatccctataggttaccggacccgctgttgagctttggagtggtccctgctggacacctgcttggccagcagtgttggtctttcctctaggcaatttgtgagctgtctgcgggggagggaggggaggagtggggggggtggtgaacaagaggggaaaggggagagaaggggagggcagtattgaattagattgttgatagcgtccctctgaggactgctattaagagcatgctactctgtacttcgctgctgcagaagagagagtgatatttgtgttactacagcatgttgtaaatgtgtgagattttgctcatctcagcttggaaataagaatagggaaaggagagcaacttgaatcagaagctactagaagaacctgcagagttctgaagcagtttatattcttcttacattttgcc

SEQ ID NO: 138653 - DNA, 2083 bp, Homo sapiens
tttagatcaactgccaatcattgttatgcttaatgcccatctttattccagactttctgagacattaagaaagcttctaaaaacaaataggatcttatggctttctagttaagggtttttaaaagttaatttacatagtttaaaattgttatgtgtggttttaactgttcaggatttataaatatggtttattaatttacagctaaaatgctgtcagggtatgctttgaaaaatttgaactaaatataataaaactacaattaaccaggtttctttttgcactccactttcaggagacggaggcaattgtcattaaaacaagccgatttcaaggatatattcaaaaaatcaacttcagggtatgtccaggggtctacatttttcctcacctttttttttttttcagtgcgaattggttttcatgaaagaccctgagaatactagaagacagttatcaagtatagttacagtaatggctagggcactgtgtttattaggaaaaaagtatgtaaatcatgctgttaaaaatgccacgcatcattgtattgtgccttatattttccaacatgctttcacaaacataaattactttggttttcacgacaacactgtgagacgggcaaggaaagcagcattttccctattttacagatgggggaagataacactggaggtcagaaagctaaccagggacacagctgcagttggaccacagatgcctagctctgtctcttctgccttcttcctcatggaaaaagtttgaaacaagtttttaactttttaatctgtattacacaatcaagataatttgttttctaattgttgtacctcacagtttcccacttcgcatctgtctgtctgcctctgtgcctgtctgccagctggagaccttactttcagactctcccagacctagaaggatctggagtgtgggagggcaagataatggatgtacagtttgctatgacaactggtgttgagcagccagtgttcatatgctaaggcaggccagggactgagaaagaagacaatcttactatagctaagagatattcagcaggaattagcaaccttgactttaaagcagtgtttctctaatagtttagtagacctggtgtgataatcagctgtagtacttgttgagaatgcagagtactgggccccaccttcagatatctacattttaaataatcacctcatgtgattcttatgcacactaatgtttgagcacatctgccttaaaggtaaagaacttttcttttggtatatgtattgcagcatagagaaaagaaccacttttctctcagcaacttctgtgttccatgtcaaaccatattaaccagggcagtggggagcaaggggcaagcaagagtgatgaatgacagatattatttgcacacattgctggatgtacatctgaagcatgtcacaatagctactgttcattgtggtgactttgacgtattttataaaggtttgtgtctattttagacatgaggggcagaaagatttctgccaaaaggtgaaaaataagtgagttttgatattttaataacatctcccagttgtttttattgtaaagtaatttaaaaaactgtatagaaaactaggctattcagggttctggtagttaagggtttactgtaacaatgtatttacactaatttgtgtttcctatgtgtatatctagtctgcctgattagattataatggtcttgtggccagggaacatgtgttcttttgtgtatttgtaacatctagcaaagtcataagttattgatacttattgatgactgaaataactcactgagcatgtatctcctttctaggggttttgggctaggcagagtaagttgattgatttcatttgtgaagttaaaggagacaatcttacactgtcagtaatggttaatatactaagaagttttcagttgaaataactgtattttagttgacagatgtgaaagtgtggtcctaattaataaatgtgctttttccctgtttagagtatccattcaagctcgatcttgcctcttcaccctttttggaatacatgttatgttgttctgtgctttacaaatct

SEQ ID NO: 138654 - DNA, 5380 bp, Homo sapiens
accccaaaaacacactggagatagtggttaatgatctgcatcagttagccctcagagctgcaggaacctccacacccactccctaacctatgcatgttaaaccatgttgtagataagctcttccctttggggaaccccattgtcttttattctttatattgttcattatgtaaatattcttgatatttctcctccaccagtctgcacaaaggagaagccagaaaatggggtgagaaagggatttgagacatttccttaagcctaaattataattctctcattggaacaggattcatagatctttaatcaaatatgtttatttttctctgttttgaacgttaaaagggcttgttcgcattgggccctcttgtgtgtcatttgtatattttgctcttgactgctcagcataccatttacattaccaggtattggtgatgtgcagtgacttgcttggttgaatttgctatttcatttttttgctccatgtagtggagcagtgattgttaaaattggattttgtggtttactctttcgtcatgacttgtagcaacagtaatttaataggatttaacagtccaaagaatatactttttgtccttttcatttaccagtccacaaaatgactgcttttaggagatattgtttcatttttcaatattccctggcctaggtggtaacaaactaataaaatgcattcatttgctttaccaatcctatcttgacttagaaagttgattactgacatttcccttccttatggtagttaagtgttttccttactcagttcagttcagcagtcacctattgatccattcacacccccatcctcattcttctatcataaagttattatatacctactatgctgggccccctgccaggcacacatagggtctgtcatgcaaacatcaaaaggagccatttaggtatgctatgtgcaattgtaacattttattttttcttatgattcaaatcttagttttgggaggaaaaggccctttaatgatttcttatttaattatcatcagaaaagtgtagttaggcatggaggagggaagaacctacctctgctggcttgatttcaccaaaatcgcctcctataattgggttactatgtgacaggcactgagttaggtataatacaaacataaggaaggcccaacctcagttctcaggaatttatagtctagggagacatagaagcagttttaacccaaagagagaggagctataatattcaaagtatcacaggaggatagcaaacccattacctgtatcttctaagggatgtgagggaaagtttcactgagggaggtttgcttgaacacttaagcatgactagaagtttgcttggtagagtagaagggcagggaattccaagtggaatcagatgtgaagtcactgaggcatgaaggagtatgacatatttgaaatgtatgccaagaaattgctaattactagatgaaagagaactctgtggaattggcattgggaagatatttctggtacaggtataggttgatcatttatgtaacttttgtcatatagctattctgtagcttccattaactattccttacttctcctctcctccagccatttatgtgaagactttttttttttttggaggggaggtgtttaggagtcatatttgtagtttttccttaaaatgaatattaatataaatattaatacaatacagaggtgactaataaacaccaaattaggtatcaggagacctggcttattgttttccacttctctcagcggctatgtcacttgagccaaggcatttaacagctctgtttcttcatgagtaaaatgggaatattaatgcctgcattgcctacctcaggatcaggttgaaaatgaaaatgaaactgttaaaaataaagaggtataataaactcttttacttggaattctgctggctgaggttaaactgacatttaaagcaagtaaaatactttgtggagtatctggatagaaaaattaggttggaaaataattcttacttcctcattaaccctctatgtctgccctttagtctttgaaatgtcatttagcttatttctatgtttccaaactaacatgataaaaattttaaacttcctaatgttctggcatgtatatcttggccctttcaaattctcagtgtaactattaaatagcaattgatttaagagttaggtgagtaaaatataagttggtatatttcgtagtcaatcttgaataattcatacctattaagtagtttgaattactaatgagatactgtctatcatttcttgttccatatggtggtaggacacaagttttgttccattttagaaatgtataagagggtcctgattcattcaattaggattgggaggttatgagactttggccttctgccttctttgccatttttcctaattcagtgacaatgcaggcagcagttattagtagcagcaaatgacatttccattcattttatttcctttgacccccatcttccccattagattgagtggtaatctactgaaatctgataaatcacttgaaacatgaacttctagactataggagcatgagcaattgcttccaatataaatactcctggctaacccttctttagatcagtggttctcaaaatctatcactatggatatttcagcaggacagaaaattctgtaaaccacttaagtcatcctgctctgaaccatcttacatacatcagaagaaagggaaagagtactgctatggatgagataacacaatggtattttacatggaatgtaactgaattatttatactagactagtattgatcctgtcatcataatcactattatatgacacttgtggaattccaagaggtagttacccctcctccctttctgcctttgcaacttagagatgaactagttatgtgaatttggataaaacacctattctaatcaaaatataatataaaatggttgttgagatttttctaccaggccctaaggaaataatctgtcaatttgtctgtttttcacaaaactaaatgaggaaatggtctggcttattttctctttgttttaaaatctatggtgccattgatacccagtttaaaaacattcttctgaaggtgctgttgattaaatcattttaatgtcccccaagtactgcctgtttttgaagattatttggaaaatgtggcacattcaccaactcacattctcctcttattctgtacttgctttttttccttataagttagtggaaaggcaactggtcagttttttcactcaataaaaaagaaggaaggtgtagacagcttttatctgggaatgctttaagtcattgagagaatatttttaagtgttaactactttttgaaattattggcagaatcttttaatccattttaacataaaacagttgactaagatggaaagatttttattgtttacataaaagaaatcaccatggtttttgcatcattgcataaatctaagagattgtgcatacataaaaaggatgagacaaagctgaatgttaagtgccaaaatcaacgaaagcttgcgtacttactgggtatttgacactgagcataatggaatgtggttccacagagagagaatactaaatatttagacccaaggacatgtttctctgatagcttcttatcctaatctcctagctaacattattaaccctttttgaaacacctctttcttacacttagatttcctcctattaaagctcacccttggagattctaaaccttctatacccaagcacctacactcacccactcatctctttctgagatcttcatgaattccttttgtttattatatggatctttgggtgaattatcttggtttactatgagtagtaaagcacaatcacaatttctctccacttacagctctatttttccaaaggtcacagctccatcattcagctcttctgtcggtatccctttctcatcgattccctggaatttttgaaccagggctgtgaggtatacagccagcaatgttgcatagtactttagagttgctgcccaacacaggtccatctctcttcacaattcatgtttgttccttttcaggctcagagtggtgaaggaagttactaagattagcgtgcactatgaagtctgggaggtgggctttcagggacctgcttacttactctgaggctctgacctttgccttagtgtgattttctcaccatcctcttttattttgtgggcaaaggatcaaaaagatttcttcaacattgagtgctaaacattagcaagaatgcgtggtttctggtccctgtaatgaaagaatatttttaaaaccatagactcaaattaccatgtaagatatcacagaagcaaatggaatttgagctggatctggaagaatgggttgagttcaggaaagtggagtttggaagagatttcatgcaagagggacctctggagcaaaggcgagaaagaacaaagaaagcttttgacatagagaactggaagttggtgttatgatttactacagtaaactggaagagtaggttggccggtatgtactgagttcttagtgctaggcttagttacttgattaattatttgattgatctactcattcaacagattgtttctcatagcccacaggataaaatccaaacctgttttctggcgtgcatggtcttctgtgatgtggtttctgcataccttaaaatctactccactcaacactatgtacccacttttcagtaatattgaactcttttcagtcatatcgaagaatttgctgatccctgcaacatgttgtattccttcacatgtttctttctttgcacaggctatttcttctagagttcacttgatgtatgcttcattcttcagcctcagttgcaacggaatttttgttattcctctgctgctgtagaatgctaggcttatattactaaagcttctacaccatattttgtattgtcagaatacatgcctgcttccctcactcagcttatgagcttcctgagggccagggattgtgtctggttcacctttacatccacaccacccaacatagtacctaacatgtagccaattcaataaatacatacttactgtaaaattattcattgatcatttactttacatcatgtgtagttttatttttaaaaagcgatctagatggaatgggattgacaaattgaagacgggcaatgcagggagatgagttatatgtatttttgaagtagctcatttgtttaaaaaaaacagtaggggctagattcctgggagattgataaagaaaaaaagataggacttaatgactggcaactatgggcaagagagagggaagaattaaagataataaaaaataaagataatacaacaaatagcaggata

SEQ ID NO: 138655 - DNA, 1056 bp, Homo sapiens
ttctcactttcaatgaaggtatcttttctgtgttttttgaagattaaaaacttgtgagggtctggttttatcatgggtgaagtaagcgtggcaataattgtaagccaaatctttggctagaagatctagccaataaaaataataagagggtaacacatgaaattctgagaccagttactttttatacattggaattattttggtttaaaaattctgtaggttttggttatccactattattgtcataagatcttatggtagacgcacatgaaatttatcaccatatttgttcctataactgaagagttgcatgttttcatacaaaggatatgggcttgttagtaatgttgcatgttttatatatttgaaggaattttccaggtcatagaaagtatatctgttcttggggagaataattgctactccaatttcagtcatcctacctatcttgagtgttgctgttcatatttacattcttcctgtgcaatctcatctaccgcaattatttcagtccttgcctacatactaaagacctttcatttatagctcgagtctcaattttttctgagtcccagactaaaagttgtttattttctccctccacaattttttgtttgtttgtttggactctacaagtaatacatatttattacagaacacttagaaaaatagaaaattatatatatgcagggtaaataatcacataagatagcctctgttaacacctcgatgtattttcactctagtcttctgatacatttttaaatgtaactaaggttttacttattgaatatgatctagttatagtagtgtggttaagggtgaggctctgaagtctgccaaatataggtgtcattcaaactctgctacttactagctgtgtgaaatttggaaagtgtcttaactcctatgagtccatttcctcatctgtaaaataaagtgatatcactgtgtgggattgttctgtggattaaataaaatgtttgtaatatggttaagttcctgtcatatggtaaatgctcagtaaatggaagcgcttactgttttattatacta

SEQ ID NO: 138656 - DNA, 1035 bp, Homo sapiens
actttcagttttttaaataagattcaatttcttaattttcttaagatgtaatatgaacattaagtacaggggcatacatttttcctttaattcaaccatgaaaagtataaaaatattataaaaacagaagttgaaaattccagtgttaatcttcatagtaaatattggcttcttttcctcctgaacaggtcattatccaacttttagaggtgatggatcatctgcatagaggggaattggttgctgcaatacttcgtaaccggtatatttatggaaatagtttaacttatataacgtctttcctatttatatacctaacatagcaggcattcaataaatatttgttgaatacttggtataaagtaagtatttactgtatgaatgagttagagaatgactaagtgacaaagaaattgaataaagaggatgttagtgacaatgtttcctgagataatgaaaaaatagagaatatatttagaaaatgtaattggtataaattatgagcacctggaatacaatcagtggagatatttatttgaatttttagttttaaaggcatatctgaataaatacaggtatccatagcttaagaatagaagtgccaacaacacatttttaaaaataggattgtcctgtgattgtatatatttatattatttaaaaatccagttaaaaccttttcagggagttactatgagatatttaaagcttcttctgacaaattaggattttaaatttattatttaaagaaaaatagccttgtttgcaggtgtgacagagtctgtcttattcccagtagcttgattgtacagtttggatgaaacatttggaatagtatgtttgagttgtctgtatcctggctctgatgcttactagtggtatagccttgggcaagtttcgtagtcattctatacctcaatttcctcacctatgaaatggtgttaataatagtacctacattgcagggttgttgtgaagattaaataagtgtgaaaggtggggcatgtatgaaagtgtgtgtgtgtgtgtgtgtgt

SEQ ID NO: 138657 - DNA, 1030 bp, Homo sapiens
agaaatccaggcacagtaggagggttggttgaaataagaagactgtgttattctgttttgtgctgctataacagagtacattataatttatatataacagattgatttacaatgagcagaaatttatttctcacagttctggaggctaggacgttcaagataaaagaggctggcatctgacaagggccttcttgctgtgtcatcccatggcagaagttggaagggcaaaaagaggcagagggagagagagaacacacaagaggaagatgaacttgaacttgtccttttataaggaacgcattcccatgataatggcattaatccttcatgagggtggtgcccccatggctaaacacctcctgttagaccccacctcccaacagtgttgcattgaggtcaagtttccaacacattcttttttgggggcacattcaaaccatagcagagattaagagaaaatttgcatacctaatttcaggacctgtatgtttcatcctagatgcaattagtgaaacagggcatgagttatttagttttacattatcagatttctagtagtaatctagatatagatttttcccttttcaacatcttctaaataattgtatagtctaaacataattaaaaaattttaacatctcaaattctctcatcactttaacatgttttagaaaaggtaaatcgaaggtcagttcatgtgagagtgtgtaaaatattaatttcatttaacctactcagtttctttacttgtaataacagaattataagcagaaaaatgattgtacaaataaacataaatgatgtcatttgatttatttgctttttagaattatgaaaacccaataaatagagttttttttcctcttctatttcttttccttaaattcaggggctggaagagggctgacgacaatgaagaatccctcctcctgcttgcttaattattttagatcttcacataacttcttttttctttttcttttcttttattattattattttttgagacagggtctcactctaccaccca

SEQ ID NO: 138658 - DNA, 1370 bp, Homo sapiens
tttcagtagatacggggtttcaccaggttagccaggatggtcttgatctcctgacctcgtgatctgcccacctcagcctcccaaagtgctgggattacaggtgtgagccaccgtacccggccataaattttatttttcatatgtctttcatacatcttttaaagcacatttgtaagttttttttttttttacaaactttgctgctctcaggtaggtggtattttttccagtacttatagaatatgatattggtggaatataagaaatccttgttttcatggacctgacattcttgtaatgggcctctcattgtgctaatttttcagttgatacttttgcattttccataaaccttatgttacctataaatcattaatttttagacaatcatttatgatcctgcagcagcaacattcctcaggaacttgttagcaatgcagattctctagaccgatcccacaccaactgaaggagaaactctttccagcaatttgtgcttcacatgtctccaaactctgatgtatgctcaagtttggagaccactgatgtaaataataattttatgctgtcttgctcatattttcatttctcacattttttaaattgcaagatgtgtgtgtatcagggctcagtggattacatagaatgagcactgactgaataggctgagacaaatcgttaacatccatgggtaagatgggaggggaatgatgagacatgaattattccttaatttcttaattccttaattaggtgaataaggaaaaagtaaatcagagagagagagagagaaggaaagaaagaaggaaattaagtatacaatttagggtgaggattttagtggttgacagagggaagtctgattcaaagatcactcctatagataagtaagaattgtaacattatgaaattgaaagaaataaagacagctaagcctaagcctggcatttgatacttaatgaatgtttgtaagatgaagttcagtctttgccatatgagggtcaccaccattagaaaatcatatagaattgcattaatacaaggataatactttcaatattggcaaaaaagccaattgcaatgatgagtcagatgataccatgagccaacaatatacctcaaaggcattcctaaagcctattatgaatgacaacatgagaagggactaccaagggatcttgtcaggaaagaaggaggccaggtgtggtggcttatgcccataatcccaacactttgggaggccgagacaggaggactgcttgaggccaagagtttgagacaagcctgagcaatatagtgagactctcctgtctaaaaagaaaaaaagaaagaaagaaaagacgggaggaatgatattaagcagtggaact

SEQ ID NO: 138659 - DNA, 1039 bp, Homo sapiens
gccaccctttgagaagtaggcgttgttatcctagaagcagtgaagaaattaaaacacacagaaaacagctagcaaatatgtagtgaggctagcatttaagctcaagtctgtgtgactctacagtttcttctctcttcactctactgtttgggggtatgaaagtatatttattaaacttttctaaaagaggctataagtaggactatacagaagctattcagttcattttcttgtctgtgtgcttaagacagtctcagtgtcaaacatatgataatcatttctccatatctggagcaaaaagagagtcatgtcagttacctaatgttagtcacttaagcacatggattttttagaggtcattacagtgataaatcaatattttaaaatagcagtggcttcttcagtttggagagaaatgttttttaaccttatattctaaaccttaatgcatgctaaattgggaattggagggaaaaagggaaagctgacctttcttttttagtctgaacaaacaagaagaggaaagcaaagactggctaaatagtataaggcagtattttaagctttccatgtttattcacttgaaacctgttatttttcaaaaacacatttttaagtgaaaaatcagaaaatatatatgctttagaaattattgttaaagacaaattttgtaacataaatgctttatgtaatagttacataaaacaagtttaagttgtctggtattgatgatatagaggaaaaactatccttcaaatatttgtgaattttacctgtgagttaatgatggtttaccttctaatttatcaacctaaatggccttgtccaatacaattaaaatgaacaattatttggtttattgtaacttcagacttagtcggaaaaaaatatataacagctgctagggtgtaattgctaaaataactataataatttttgtctctgcatggtgaagaatatgcattaagactttagcaaaagataagactgtgctctctttgtaagtagtctgatcaaatgtggctcatgacttaaaatt

SEQ ID NO: 138660 - DNA, 1722 bp, Homo sapiens
tttctcccttctcccctatattagtctgttttcatgctgctgataaagacataccagagactgggcaatttacaaaataaggaggtttaatggacttacagttccacatgactggggaagcctcacaatcatggtggagggcaaggaggaggaagtcacatcatacatggatggcagcaggcaaaaagagagcttgtgcagggaaactcccctttatataacatcagatcttgtgagacttattcactatcacaagaacagcataggaaagacctgcccccatgattcaattacctcccactgggtccctcccacaacacgtggaatttaagatgagatttgggtggggacacagccaaaccatatcatcccccaatatcatcctctctacatatacttggctgtggatataagagtagattgactgaaatttcagccctacctgtactaggggttgatgttaacattattgtgatacaaatgtagaatataacaatagaaagtcatagaagagttaaggaataattttgaaagttgtgggaagggatgtttggaaaagaatggttaaactttctaacaatataaagttggctacccagactgtatgtccagcttacttttgtaacttttactcacttccaccagtcatgactacccatttctcttccttgccagtaactgtcatgtgagcctgcctctatttcaccctcgtatctgtcagggaggtcactctagatcaaatcctactgtttcaatgctgggacagaccttaaaagattttattatcttcctacccttaacatactttataaatgaggaaactggggtcctcatagctaactaatttgtagcaaagtagagattagaaaaaatgtctgtcctttctgactcccttgtcctattttttctgcttttttccattttagttgctcattatagtcacagattttgctatctgctgattactggaatgttctacctgtataaactgttaaaaaactgtttgtttcttcttaggagtctccttggtgtgaaagaacactatgaccttagcagaaatgtaggttctacctaagggtttgtttgtgaagtaaaaccctcaaccataaatctgtcagcccttgtaggttgagaaaaaactggttctcataagggttcagaatctcttttaatgcatatttatgagtctgacctggcagcagacattcatgtgtatttcacctagtgtaataaatttgttggcctcatcctgctgtgggggttccacctgcatttttcttagtaaatcgtgttttcttcacttatcatgcaaactgccaggccaggaaattttccatggatgtccccactcctttggattatgctgctgctttctgtatgagctggctggagcaagatagggtaaataccacacatctttcaagcaggtcactgaatttatgaccatggcaaacattttccactggcgattttgtaagagcttattgtcaagttgtaaactctatataaaatctctgtgcccataattattatctacatttgaaaactggacctccagtaaagtcatttttgattcaatgccacccacccccaaactgtttcactataaaaatttgataagattttcttaggtttgtgaggctgcttctctttcttttctttcttttcctctgtcccaacatgtgcacattgaattatccctcccgaagtgttcccttccct

SEQ ID NO: 138661 - DNA, 1173 bp, Homo sapiens
aattgtttagattatctgtgaggctttttgactcagtatctcagatcattgctcttttcccaagttcaatacactacagttaatattcttgtgtctgtaaagcttctgagaggtgacaaaggttgattttagtctttgttagacaacatatatgggttaactaggcaaagtggggaacggagtgggcattccaggcagagggagccacataagggagataaaacataaaccacagcagaaaagtcagtttgtttgctgtgtgtggaagacgatgagaattagcaagtgatcaggtccatactgaagggtttatgtgtaactcaaaaaaagatttttttatactgatgatactggggagccactgaaatactttcaagcaagagtgacttcagaatagcattagcagtatttctcaaaatgcagttgaacaaactgaaggaaggcaagtcctgaagtcagtggataagttagaaaactgatagagtaattcaaactaaagaatctgaactaagaaaaaagagagaggaaggattaattgaaagctattgaatggtttcactactagaatggatgcaggagtgaaaagtggggaggaataaagactaaagctcaggtttctggcttgcttggtgcaagacctgccattacttggtgcaagacctgccattcccagtgacatggaataaaagaggaagggggagaggaaaaagaaaatcatgtaggataggatgaggagttaaattctgggcaggtaaaaatcaaagcactgtgtgccatccaagttatctactagacacaaaagaattaataaatttcaatgagatctttcttattatcaggagatattctaactgaaggttgggtatgctttaccaaaagttcattatttgctcactagtgtaatagtctgctaggttctatttctgtgtcataagatatttgtgggaaaaaaactgttttcaaatacttcattaaaatagttaagacagtttttttttaagtaaaagcaagtttattaagaaagtaaaggaataaagaatcgctactccataggcagaacagaccagtttctaattttatgtttatttgagcactagaaatttcagcattagtgattattaatatttataatttattttacaacagtttttgtcccttctatttcttcttcct

SEQ ID NO: 138662 - DNA, 2003 bp, Homo sapiens
aagtataatttttctgtgattccttttcctactctgttggaacatctgctaaactttagcccatcatacttcttatgcttgtataacaacatgaaaacctgtaataaccagtttttggcatcatacattattataagactttgtcataatatttcaggaaggtaatgctgttgaatgtactaataagttacaaaattaatttagatgatttcctagctataacctattgaaaatcatttgttttggtttccaatctgattgaaatcctaaaaatacttaaaataatttacagagtagcatgtaataggaatcgttcaatatacatcagcacacatcctgtgtattcattacatgaaatggtactcgaacattgtgaatataaagttatggtatagttttaattaagactgtggactctaaacctgacctaaaatctgattctgtcatttgctacttgtgttacttcattttattgcgtcatggtttcctcatctctaatggaggaacaagagattttatagaaattagataaagtagtgtatgtgagtgttaagcatagtacctagaatatgataagatttaataaatgttagttattattttatataactagtattatctggttatgaaaggaactttggcttttagtttcaaatttatctttctagccattttatttaagacgtttatacaagaagaaatacataaagaatgaggtaaatgacaaattagcaatgtaattgttatcaactagtggaggcacttttagcaggcaaattactcattattatggtcaattattttggcaaataattaaagaaaatgaaaaagaagaccaccagactatgaatgactttgcctttaactgatgctgatagaatttgttttaaaattttttcactattaggaagtagcctggttttgactaaactttttaaaaagaaaaaaaagtttgtttgaaataattacagattcacatgaacttgcaaagatagtacagagaggtcctgggtacctgtcacccagtttccccaaatgactacatcttatgtaactgtagtatattttcatagcccagaaattgatattggtacaatgtgtgtatatagttctgtgacattttatcacattatggattcatgtaaccacctccacaatgatgatacagaaatatttcaccataagagacataaattacagaactcaagaggagggggaaggaaagaaaatttgttgtattgacacatattttgcttaccatgttctttcttccttcctgatgttccaagataccctcttttatcattttcttttggtttagataacttcttttaactaatagggtaggtatgctggtgacaaaatcttagttttcctttatctgagaatgctttaatctcccctttattcctgaagattttgtttttgcttgatataggattctgagttgacagttcttatctttcagcacttgaaaaatcctttgtgtctcttctttatggcctccatggtttctgatgaaaaatctgctgtcatgtgaattgtttcccctgataggtaaggtgtttctttcactgctttaaaaattttttatttgttaacaactttcaaaagtttgattatgatgtggtttagagtcaattttcttattttatttatgtattttttaatttcaatatgtttttgaggaacaggtggtgtttgattacacgaataagttcttcagtgatgatttctgaggttctgttgcacccatcactcaagcagtgtacactgtacccagtgtgaagtcttttatcccttgccacccccatccctttctcctgagtgtccaaagtctaatgtatcattcttatgcctttgcatcctcatagcttagctcccgcatatgagtgagaatacatgatgtttggtggttttccattcctgagttacttcacttagaatattctgatatgtatataatgatgctacctttatccaggttgctgtgaatgccatta

SEQ ID NO: 138663 - DNA, 1025 bp, Homo sapiens
tgaaggctgaatgggtcatgaaactggcatattgtctaatgtgccaatttaaaaatatgaacttaatgggttctcgtttttgctcaaaagcaaaaacatgatatactatcaattcccatgataattaacataacaatatcagtgtttttcttaatggagaaagtgagtgtaagtagcaagcttatagtattagtattgcatatgtattagtcatgacataccatagataattgtataaattttcacgttacgccaataaactgtaaaaattccagaagtaactgagaacgtggtagcagctgcagcatcggcccatgctattttgccagccattcggagactgcataaattaactagtggcatgaactctcctggtgcattttggagccattttattcaaaaattgttttgtagaaagtgaaaatgttatactgtattttggcaaaaataagaagaacaataagcagagctctctttagtgtattaagcatcatctaaaaatgaaaagcgtgaggggagaacctttacttcatgtgcctgtgaggaaattttgactttgtatagacaaaaagtatgtacacagagaaagatttgttatataaatagtatagctcatttgtatagtcaagggtgtcttcctttccttccttccttccttccttccttcctttcttccttccttctttccttccttctttccttccttcctttcttctttccttccttccttcctttcttctttccttccttcctttcttctttccttctttcctttctttctttgtgacagagtctggctctgtcacccaggctggagtgcagtggcaccatctcagctcactgcaacctctgcctccagggcttaaggaatcccccaccaagttgctgggactacaagtgtgtgccaccatgcccagctaattttttttaaaatttttattagagacgaggtgttgctgtgttgcccaggctggttggtctcgaactcctggcctcaattgatccagctgccttggcctcccaaa

SEQ ID NO: 138664 - DNA, 1538 bp, Homo sapiens
tttcctttctattattaaaaaatgaccttcagacataattaaatgtcttaaagaacataggtgtcttttaaaatgtgttaatcttaggttgctctctttttcttcttacaatttttcttacttttaattttaccgaatttttctttcagaatgatcttgaaatgtcattttacactttttcagtatttttaaatgcctattatctacttgggttgtttctactcaggggccaaagtagttttagttgaagttaaagtgagttgataaaatgatttcctgtgaatcttaagtaaagtttttatttgcatagatggaatttctgctttgccatgtatggcaaaaggtgtggtgatctcacagctagtaggtaggataaaatcaattaaggtggcactgctgtcactagaataaaaaatctatgcatacctttatattaattagatgaaagctcctctttatcactaagctcaacagttgacatcacctggagtcagggagtcaggtgccgtggagttaaaaacagaaagcatgctcgatttagaaattctggcatatatgtatgatgctaccttttctcacaactagattttggttattaagccattgtgatattgggctatgttaaaagacattagaaacctgttcatttaagacaagccaaattggtctgatataagagggtcatgctgaatgagaaagtatcacataatttaggagagaggattttgagtaatgtgaatattgagttttctgtgacttggtatatcatttattgattttaaaaaatgaacccattacattatactcataaactattacttcacaatagtttgattttctgcttaaatcagtgcctaaaatggtaaagtcttaaatggtttagaatgactctgcatgtaggttaggtccatctacctgttttatatggggatctgctttatctgcacataaagaagattcgctagctttaattagccttactatgtagggcagcactttctctaatgagagaaaatgaggtattttacacaaattaattcaacagaaattagtgactaccttctttaaaccaggtgatggggatgcagtggtgaacaaagttctatcttcattctatgaggtactcacagcattatatgcactctctttgttcttttctaagaacattccattcaaaggaataggaaaagtggcaggagaaaacacactcctttcctttaaggatgtagtttagcatttgcacacatcacattcacacatatcccactggccagaacttaatcctatggtgatacctaagctggaaaatgtggcccttcactgcatggacaagcaaaaataattattactatatgagccgggaagaacagatattggggaataactaatagtctctgctatacattgtccctaatgtaaacctttaatcattcatcaatttttgacttatctggagatattatctctatgacatcagctacacatttgcttcatggtaaaaattaagacttctcagcagagtatacaagtccatcatg

SEQ ID NO: 138665 - DNA, 1050 bp, Homo sapiens
ctaatatgtataagaactaggagtaaaatccatgtagtctgattcttgagtctatgcttttaaccacaacacttcctttcatgctatctctgacagaggccattatataacagagcatgatatctaaaaaaggcatgttagaaaacagattctagagaaataaagagaaatgatcagatgagggtgttaaagttggaaagatagtttgaagaaggcacttttaaaggaggtcttattgaaaagcaaggaacgtatttctgaatatttcaatgctcaaagctatgtgtacatatgtgcatgtgtgtgcacaggtgtgtgttggtatatgtgtgtgggcgtgtttattttaaactggaaaaaaactttagaggttaaaacaaattgacaatctttttactgacagctaatcagagctctgtttttgtgtacaatattttgacttcacaatcctgtgtcgaaaaaaatatttaacggctttattaagatataattcactcatcatacaatttacctgtttaaagtaatataattcagtaatgtttagtatactcacagagctgagcaactgtcaccacaattttagaacatttttatcacctcagaaagagaaatttgttttgaaacaaatgtggccacaaagaggatggaactagtgtgtctgttggtactactgcttgtctatcaaaatgttcatgatttatgctcagtctaacacagacctcatgctgtttttctgcagtctagctccaaattgctgtagagctcctcctcctttgaatttaattttgatcggtgacagtctttcaaggcagtatgtattgatctaattttgaattctcaattcaagttgattgtatatttgtatttgtcataaaggtattgatcttagttctaaatagcaaagccagactcgtatttaaaacaaaactgctaaacccactagtatgagtggctacctccttgtctgtgtatgctctatagtgggccagagccaaagatttctgagaaattttatgtgtatacactgatatttttaattacttctaaaag

SEQ ID NO: 138666 - DNA, 1934 bp, Homo sapiens
gccactgtacctggcctgtttttttttccttcggttttgtggggttgccagtaattacatgtctcaaaggattttttctgcagttttcttgcagttgaaaactagtccttgaaactattctgccaattcattcaacaaatacttattaagtgcctattatattccaagcattgtgctagtctaaacaaatagaatctctgtctagtgctctttccattactttgggtccttcaaagtggagcacatgtactgattgagcagggtggtgacaaggtggtgctcccaggagccacaaaataaagcagcttgtattttcttgaagcatctgttttacacagagatttaggagaacattaactggtagctatttaaaaatctttaaacaaattcagatacattctgccttagaacgcaatattcatagaaaatctgaggcaaaccccaatatttcagagaaagtctctgcttgcaagggcagctgtggtaaccctgagatgaccctttggaaagcactgaggtggtgctgtactgcccgaatctgttcttttagtcaaacacccaaacattttcatagccgtaaattcccatgatgacctgtgggaaagttaatggacataaatgtttttctctgttgcgcaatttcaagggtacatgttggttacccttggtctaatggtctaaatctaaacatgtgttgagttcttacagagtttttaatgttggtgggtaatggctaagagtgactatgaaggacctgcctagggaatgatattttcagaatagaggttattaggcctgacgcagtggctcactcctgttatcccaacactttgggacgcctaggcgggagcattgcttgagcccaggagttcaagaccatcctgggcaacaaagcgagaccctgtctctataagaacaaaaaaaaatttaaaaattagctgggcatggaggcacacgcctatagtctcagctactcgagaggtttaggcaggaggatcccttgagcccaggagttcaaggttgccgtgggctacaatcacaccactgctcttcagtctgggtgacggagtgagaccctgtctcaaaaaaaaaatctaaaaaaatttttaaaaaaggctagaggttattagaacacaaggaccacaaacttaaagcagcacagttcatggtgtcaaagctttgccttgttctgtgcacacttgcctgtctcactgatttgaagttcacttttgctaactttaaagctgctttcatttacagcatagtatacaaattggtttgttaattgctggccactgaaatagttaatactagaagaaagttgtcaaggattaagtgctttgaggttgataaaaggtttctacagtttgagatggttttgaaaataggccagcagagcattggaggaatgcctgttacaacgtgatggtttaatttgctccagatgagaaagatgaagaagaaaaaggcaagtgaagaaagggggtgaaagtaaatggagtaagtcaaacactaaatctttcaactgattttcattattgcagtcccactttcattgttgttgttccatgccagacatagttcacagggcctgacattgttatattgttgtgttactgctcaaatcttgtaaggacatgggtatagaggattgtgattagtggatggtctttatcgtctacaggtgaagtgcttttacagtctattcagtaaaaggagataagagttttgcttgtagtttgtagagttttctttcttggtcccacttttaaaaaaatggtgatacatttctaaagatcacttcatttcaacaaagttttctgttccactcttggatgtttcttttttcttttaagacagggtctcattctgtcactcaggctggagtgcagtggtgcaaagtcaaggctcactacagcttcaacctcccaagt

SEQ ID NO: 138667 - DNA, 2245 bp, Homo sapiens
tgggtgcttgtcaaatggatgccatgcctttcttttttgtcatttcaaattccaggtcctattacactattccccattgaactagatctccccctctgaaggtgaacagcagtcacacacttgccctgttgtgtcataattatgcttatttgatgcctggccatctccccacttgcctctggcttcatgaaggcgacctagacctcatccggtttgctcattgttgtattctgagcacccagcacatggtatgcactttataaatagttattgaataatgaataaatactgtcttgtgatgtttctcctattaattttttgatgttagatcatttaatactgttttacttttcacgtgtttggtgttccgaagtggtttctgagagaggttgtagagcatacttgttaagagctcaagctctggagctaggccacctaggtttcaattccagctaggagacttaatagttgtgagacactgggtgagtcagtaaacctccctgtacctcagttatctcatatgtaaaaaaggggtaatagaacttgcctcttatggtacttgcaaagattacatgaattagctaggcccactttttcttttctctttttctttttcttttttttagacggagtctcgctctctcactctatcgttcaggctggagtgcagtggcatgatcccggctcactgcaacctccgcctcctgggttcaagcggttctcctacctcagcctcccgagtagctgggactacaggtgcgtgccaccacgccaggctagttttttgtatttttagtagagacagggtttcaccatgttagccaggatggtctcgatcttctgacctcgtgatccacctgcctcggcctcccaaagtgttgggattacaggcgtgagccactgctcccggcctaactttttatttttagtggagacagggtttcaccatgttggcgaggctggtttcaaactcttgacctcaggtgatccacccacctcgggctcccaaagtgctgggattgcaggcatgaaccacctcccccggcctaggcccacaatttgtttgcaatttttaaatttctaaagctctgaaaactgaaaaagattttatttggtaacttagatgccaaaactcatgtggtggcaaaacctgacttaaactgacatagggtatttatagtctttattctacttaatgttgatctttattttgttttgctatagaattactaatatgtttatggggttgcaccatagaccctaatggtgtattacataacatatggtatataaagtatatttcctgtctaaaggtctggacatttctaaattcagaaacacatctggcaccaagatttttcgatgagattgtacaccttgcagtaaactgcttaaatcagggccttgcacatagtatgttgttgctgtgggtggtggagattagggaggtaaataaactactttatctttcccaatagcttgctcataatagttaccatgtaaatatatactgatttactcatgcaataactgtaaatagaggactggctgtgtggttctcatgtcataggaaaatagatatggcagggtcatgtaattgaaatgagccaagactcgtctgttagtactctcatctggtaccattcagagcagtttagtttttgtttttctgttgttatttaaaccaacctatgcttctttagcacaagagagtcttttgtgggggtgggggtaagaaattcagttaagaacttatttaatgtgattagacacttatttttttgcagttgttgaacatttattgaactgctaatgtgtatagaaatctgtattaagagcaagagaaggccgggcatggtggctcacgcctgtaataccagcacttaaggaggccgaggcgggcggatgataaggttaggagatcgagaccatcctgaccaacatggtgaaaccctgtctctactaaaaatacaaaaatgagctgggcgtggtgacatgtgcctgtaatcccagctacttgggaggctgaggcaggagaatcgcttgagacagggagttggaggtttcagtgagccaagatcgtgccactgcactccagcctggtgacagagcgagactcagtttcaaaaaaaaaaaaaaaaaaaagaaaaagaaatagaaaagtagaaaagagaaaggtagaaaacaaatgagacatgattcctgaccttccttagccccagcgccctgcatggttacatgggga

SEQ ID NO: 138668 - DNA, 1064 bp, Homo sapiens
gttgatgaatatttggattgctaccaacttttagctattacagaaaactacaaacaatactgcaatgaatatccttgtgtatgcaagccaaaagctccatcagaggttatgaacatttaaaattttaataaatactgccacatttcacagcagcttttaacttgatgacagttcctgcaaaaggtggagcatgttcacagagactacttttcctccagatgaatctataagttgtttagagggccatagtgggccctcttctgtcctgtcttttagagaggcccattctgggtaatttttatattcatttttggaaaatgctgatctaaagtgatcttttaaactttacccagtaggctttcttaaaaatttaatgaaaaacatactactgatgttgaaaaaaaccctatacatttggcattacattgtttgatgcaaatcttttttgttttcctttttggtcttctctactaacagcttgcatatgactcatttccatctcagcaataggattatgagtcatgattaaggcaattctccttttccattaaagataatgaactcactcatggatatgttttataatatatgtttacaatgatattgcaacataatattgaaagaatgtaattatcctatatctctattatgtgcaatatagttctattcaaaatgtgtttacctatcacaaaggttacatcttggaactatgatttttgttttgaaattagccctccactttacaacatgcatgttatggtgtattcattcatgatctatgctgtgatcttcatatttgtgaatatgtaatatttctattaaatataaatatacgttcaacccaatgtataatacatactgccactggcatgagatacaggcaagaggactgttccagtctatcattgcatcttgttttcctcttttcttgttaccatgccagcgatctaacagtttggttgtcactgtaaactcctgggattagccttctacttcaaatcaacaaagccagcattatccaattacagcctaagaatggcctaatcttcaaaaccagctgccat

SEQ ID NO: 138669 - DNA, 1049 bp, Homo sapiens
tttacttatttttctcatttttttttgtctttttttctcattgctttatagggtcttgtcagatatttaaagtattaatccttttctcacacaatagaaaatcttccttcctactctgttacttgtcttttaactttgtttaggctgggtatggtggcttatgcctgtaatcccagcactttgggagactgaggtacgaggattgcttgaagctaggatttcaagactagcctgggcaacatagtgagaccctgtctctacaaaagtttaaaaaaattagctgggcatggtggcacatactacttgggaaactgaggtgcgagtatggatcatttgaacccaggaattcgaggcttcagtgagctatgatagagccactgcactccagcctgggtgacaaagtgagaccctgtatctaaaacccccaaactttgttttggttatcttttgttgtacagatgtttttaatttttatgtcatcaaatctgtcaatttttggattgtgaatttggagtcttgctaaggaagttcctcctaaatgaagattatataaaaaaattctactgcgttttttaatacataatttttcgtttgtgttttttaattttttttctattttattatttttagctattagctatatctcccataaaaataacataggcataataataaaataaacacctacgtatccaccatccagcttaagaaataggacattttcaatatcttagaaggcccctgtgagctgctcctcaattacttccccctccctcaccaacagaggcaatcagtgtcttgccttttgttttaaacatttctttgtgttttttctttatatattaaccatatacgtatattatattgttttattttgaaaaaaaaatgagtctcaagcactaaacttactgtgttaggaaagggcagtattgtcactattaaataaaagatcccagaggaagagtctctggggcacatcttgtcttctgcttccctgagagtttatgagaattccttctaaggaaattagtgggcaaagttgtgagagc

SEQ ID NO: 138670 - DNA, 1041 bp, Homo sapiens
cagtcagcattggtatgacaacttgggagacatagggaatgattcccagaatctgaaaggaaaatgtaggcagggtctgttcctgagaaaagaggatctggagattgatatcaaaacccaccacagacccttgtagtttgctttattaaaatatatgtagtaagtaaacaagtagtgtgtatctgtgtgtgcatgagcaagaatatagtccttgctgttagagttcactttctgttactctctctgtcatttttttttttttttgagacgaagtcttgctctgttgcccaggctggagcacaatggcgcaatctcggctcactgcaacctctgcttcctgggttgaagcaattctcctgcctcagcctcccgagtagctgggactacaggtgcccgccaccacgcccagccagtttcaattactcttaacagatatctctgctgtcttcataaagtctcaagttaaagaactttccatacatcacacactgttatgggtgcattgcctgctgaccacagtcaagatcttgatgcctaaagtgaacaaagctacataagcagcatctcttattgcagtggttttcaaactatacactcaactggagagcctgttagaatacagattctgggacttcactccagatctattgaattctgatctctgggagatccccaaaatcagcatttttttttttttgagagggaatctctcactctgtcacccaggctggagtgcagtggtgcgacctctgctcactgcaagctctgcctcctgggttcacgccactgtcctgcctcagcctcccaagtagctgggactacaggcgcctgccaccacgcccggctaatttttggtatttttagaggagacagggtttcaccgtgttagccaggatggtctcaatctcctgacctcgtgatccacctgcctcagcctcccaaagtgctgggattacaggtgtgagccaccgtgctcggccaaaatcagcattttaagaaacttccccaaaatgactgtgatgcaggtggtccttaggtaac

SEQ ID NO: 138671 - DNA, 1050 bp, Homo sapiens
ctctctggaaccgcccccgccacctcttcgccccgcccacgtattaccgcccctccgaaatctcgcgagggtaggtgcgcgtcggtattttgcgggcaactagctcttccagctgctgtaaattgctgctgcgggagaaactggagccgctgtagccggcgcgcccttcttcccttactgcgaggagccaccgcctctttcgcgctccttatacacctatcactgggagcggtggcagcaacattccctggaccaaccgccgcctcttcaggcggccgctttgccggtcattcccgaagcccggcaactgagggcggccccctttccttaacagtctcctcgctacagatcgtctgctccctcagcctcgcccgagacccacttccccagtctcgcccgggtggaggtcgacgaggaggagacaagagtcacccttcctccaggcggcgccggccccctcacccgcgggtgtgtcctataaatggcgtcggaaagcgacaccgaggaattctatgatgcccctgaagatgtgcacctagggggcggctaccccgtggggtaagtgactgcagctatgacaggaagccgggcatcccaagccccccgcatctcctgtgtcttccccctacacccctcccaggtcccgctgtgtccgccaccgctgttcctccccgtctcactggaggacttcagaacccagacctggggcttcttagggcggggtgactcggagaagggggagtcagccacctcgggcagcctcccggccgtttccctactgaacggtcccagggtcggtctcggagcccgtttctcttctgatccagccttctgtgagggggaacagcttacgtgcctgagtcggagatttgtatctgtggggttctgagcttacctttcaaacatccgttttggcctcggggaccgtagattaaaggagcagtaacaggagaaatgtaacttgtagttttttattctcccgtttaccgctaacttacctattcacttcagaggtggctgtaactctcccctatttgccgtcctcttttt

SEQ ID NO: 138672 - DNA, 1039 bp, Homo sapiens
gttggaatgctcgcttgactaggacttgtatttacttacccacttctccacttttcaaagttggggtagtgctttaaagcgatttcgccgaactcccctacgaatgtacgtggaaatagaggcagtgaaatatattttcatgctgtaagaacttgaggattggtaaaatgtagatgttagtataaaggactaatatggttcgagaagttcactgccttcaattctcacacttactccgtgggagtaataacccgctgtgatgcaagtatagttagccatgcatgctagaagtcattctaaaaactaatgtatgtttatacacaatatgcaccaaaaagttacagtaataaaatcagaaagcaatgtacgttggtagatttcagatgtttgtctttccaccaaccttcatgtcactgttgtgggattttggggtggcagtggccaatcttgagatgacaccgaatctccttcaagttcaatatctgagacaagtttagagctaggtgtagagcataggaaatacatttgggttttgaaatgtattggacttccgtgaaacttaatttttgtgtgtgtggttttcccttcaaagtaatgaactgacaattcagattgaatgagacaccaagtcctttggtacttttgtgtgtgtgtattggggtgggggagggaaatcatcagtttatgagctgatcagtttagaactactctgtggatattgttctttccactgaataagtttaatttcaaaggacgcaagttatatcaggacctgtgtaaactgtctagtccagtacctgggcacagagaaagcattcaaaatgttcatgcttttctccttcctttcttggcattggcaaatttgttaactttacacaaagcttattttgggagatatatagaacttggacctattttacttatctaaaccggatgagtcattttgatagaattgatagagtcacttcttccctcatgagataatacagcttctcaagcactttgatcctctgatattaggtgaaaactgaaaaaggtt

SEQ ID NO: 138673 - DNA, 1005 bp, Homo sapiens
gagctattagtgcttcagctgtgggaaaattgtgagattatgcattgacagaattgagaagcaaattctacttcacgttgcagaaggctcatcagattttagattgatatagaaataatataacgaatatttctactacgctttttgtaaagtgaggagactgttctaaagtgactttgtatatgtaataactgaatccctttttaatgacaaaataattttaattgatatttatctagaaagttggttgttgatggttatttgacctatacaggttaacctcattttgaacatgttgactgaggacagtttcagtgattataagtcaaatcacatatctagagattttgtcaatgtattacagtagccatcttggttttgtggggcaatctaagccaaaaaataatgaagctgtttatataccttcctgctttttgctgagcatttttgataaatgtacataataccatacatgtagtatttgcatttaagcctattcagtgcatgcactgtctggaagagctctgactaaatagacacgtgcaaattttttccccattcagtgaacactattaaaaaatcagatgaatatttatacagtggcattggccatgcaattcttcctgctttgtccctttatcacacactaacagaacgtaggattaattatccacctaattaacttgggggtggggtagagttgctggataaagtacaagacactcagttcaattccaatttcagataaacatactaaaaatgtattcattgtttatctgaaattggaattgaactgggcatcctttatttttagttgctaaatctggcaaccctaggtggggaagaggcaggagactagtagatataggcacagttgtgagatttaaatacaccatgcaatgacaagagtaacctttactctcacgggaatactaagtgttttttagcgcaatgctatttattttagtgtccaatgcttttttctttttttttgaaaatgcatca

SEQ ID NO: 138674 - DNA, 1011 bp, Homo sapiens
gggaaaggtttgcatgacatcacagggcagctagaggggagaagtgttgggagactggaaaggcctctgtgtgatgccactaatcatatgaagtagcaatccacatactcttccttttttttttttttttttttttggagacagaatcttgctctgtcacccaggctggagtgcagcggtggatctcggctcactgcaacctctgcctcccgggttcaagcgacactcctgcctcaccctcctgagtagctgggactacgggtgtgcaccaccacacctggctaattttttttttctttttgtatttttagtagagatgggatttcgccacattggccaggctggtctcaaactcctgacctcagacaatccacccaccttggcctcccaaagtgctgggattacaggcatgagccaccatgcctggccaaaaataatttctataattaaaatgctaaatgaatagggactggagaaagcatgtaataaactattttatattcagacatgagctttgttaatataaactaaatgttagctagtgtactagtgtatgaaaataactttcttttttattttattttattttttgagacagagtctcactctttcacccaggcgggagtgcagtggccctatctcggctcactgcaagctccgcctcccgggttcacgccattctcctgcctcagcctcccgactagctgggactataggcacccgccaccatgcccggctaattttttgtgtttttggtagagacggggtttcactgtgttagccagggtggtctcgatctcctgacctcgtgatccgcccgcctcggcctcccaaagtgctgggattacaggtgtgagccaccacgcccggcctttttttttttttttttgaaatggagtcttgctctgtcacccaggctggagtgcagtggcgggatctcggctcactgcaagctccgcctcccaggttcacgccattctcctgctcagcctcccgagtagctggggctac

SEQ ID NO: 138675 - DNA, 1016 bp, Homo sapiens
agactggtcttctccactttttttttctttttctttttgagatggagtctcgctctgtcaccagggctggggtgcagtggcatgatctcggctcactgaaacctccgcctcccggttcaagtgattctcctgcctcagcctctcaagtagctgggattataggcacgcaccaccacaccctgctaatttttgtattttctgtggaggtggggtttcgccatattcaggctgatcttgaactcctgacctcaggtgatccgcctgcctcagcctcccaaagtgctgggattacaggcgtgagccactgcgcccagcctctcttccactttttgttttccacattttctacgtgcacacaagacttttcagtcacaaaatatatacacattttttaaatgtggacttgtctgtagtaagtgtatagaagtatttgtcttctcatctcctctattcaacacctccttacttttatttctgaacaggtctccaggaaaagttgggctttcaacattcaaggtaagttgtgctttctgaaagttatgtttttagaaattgtatactttttattcgtgtttttgtgtaattcttcattttcttgcttttgcttttttttacttactttttgctcagtaatgtagtcattatgtcctacttggtatacataggtactctagaaatacctaactaaatattatgctgtaaagaaggaactgtaagtattttttagatttctactgatttttatttgtttataatatctagaataaaagaacgtgtgtgtgtgtgtgtgtgtgtgtgttgaaaaagtgatacttggccaggcatggtggctcacacctgtaatctcaacacattggggggctgaggtgggcagatcagttgaggtcaggagtttgacaccagcctggccaacatggtgaaaccccgtctctactaaaaaaaaaaaaacacacaaaaattatccaggtgtggtggcgcagacctgtattcccagctacttgggagactgaggcagg

SEQ ID NO: 138676 - DNA, 1050 bp, Homo sapiens
gaggcgattactgtttatgcttataggtcttaaaagccatttagcgctaagatatttttatattataacaaatagatttggagaatttactttaccccgtaattatagattgtccttaacttgagtgaaattagataacaagtatacatatttagtaaataaatatgaagttggatattgttcatttttttaactttttattttgaaataattatagattcacaggaagctttaaagataatgcagaaaggtcctgtatattcttcaccatttccccagtggttatatcttaattatagtacaattttaaaatgaggaatttaacgttggtgcaatgcgagtgtatagttctgcgccaatttatcatgtgtatatttgtataaccaccacaatgaagatgcagaactatttcatcatcacaaagatctccgttgtgctacccctttataatcacacccaccaccttccccatatcatccctaaatctgttttccatctctataattttgtcacttaaggaatgttctataaatggaattatatactatgtgaccttatgggattggttgaaagggtcacgatccatccaagttgttgtctgtatcaatggtttgtttctttttattgctgagtagtattatatgataaacatgtactgaggctattgagtgcatattatgaataacagtatatctattgatattgtaatataaaggaaggcttgatatagttctgattgttggtgattttacagtctgatggaagagacatgtatacaaaagggcaatttatgaggtctcgatgtttgtaaaatagaatagacgtgttaactgccacaaggggtttggaggaacgagaggaagatagaattggcgtgagagcactgttacctgaaatagcagagaaaagtttcagggaggaaatagaacttttgctgagctttgaaaattgggagaggtttgcataggtagatagagaaaaattgggaaagcattgtagttaggaaatagtagggactaataaatatgcaaaagcatgggatttgctaga

SEQ ID NO: 138677 - DNA, 1024 bp, Homo sapiens
ctggtggaagggtggaagaaagtttggaggaaaaagacttaggtgcaaagaaagctgtcaagaggcagttaaaatgtcaagacatgagactccaacaaagggaacagcattgaaaggagtggatgtatggatatgacagcgatttaagagttgtttactttttagaacaattttctcagcaaaaaaagagtggaagtcacatttataagtttttctccttttttaaaaaatttcactttagtagcttcccttcccttactactaaaaattaccagttacctgaatttttctataattaatgtttttagcttaatgttctttagtaggtaataatgaagatttctgtgagtgtagatcactttcatacaaatactttgttgggtgtacttattaaaattaaaaagctgaaatcttataaccaaatactgcaggggggttatagacagctctgtaatatccaacacaggtggaggtaactgttacatgaattgctgaaaattgaataagctaccataccttttaaggaagcaaatttttgataccatgatagataggagttagagaaattgcctaatagtagggaagctgggatttagtaagtactgcattttaataatgggtcagcacatcaccagaagtaggtaatggactgtctcaagtatagctaagttggcattggttgtctgtggacacatgcttggcttccattcctttgtcccaaaagcctgatcaaggtgttagaaggacctggatgttatacatcactgagagagaatcataattgactatatatcctaagtctgattttattaagaagtcttctctggagatcaggccctctggtaggtgccatatcactcctttaaacttgtgacttaaaacagcagagtaccttaggagttactatcttttaaaagttcagactccaagagagttttgttaaagccaaataaaatagaagtctgatcactgcttggcagttttggctagtgtaggaatgttaatcttttataagtaaataatt

SEQ ID NO: 138678 - DNA, 1028 bp, Homo sapiens
tgtcccatttggcataaaatttctgagcatctatcagtattcagaaatctaagccctttaggctgggcacagtggctcacacctataatcccagcactttgggaggctgaggtgggtagatcacttgaggtcaggagttcaagaccagcctggccaacaaggtgaaactctgtctgtactaaaattacaaaaattagccaggtgtggtggcacgcgcctataatcccagctactcgggaggctgaggcaggagaatcacttgaacccgggaagcagaggttgcagtgagccaggattgtgccactgcactccagcctgggtgacagagtaaaactctgtctcaaaaaaaaaaaaaaaaaaaaaagaagaagaagaaatcaaagccctttaagggcctttgatttattaatgctacattttctcatttgtacccctttaaagcatatttttaaagaaaagatgtcatcatttggtctctatttcttttctttttcaaacaggaaacagagaacactgcatacaaagttggaaatgagtcccctgtacaagaattgaaacaagatgtgtctaaaaaggttggaaagatacaatgtcaatattagtttatagcagacatcatatttatatggtatatttcaaacagcttttatattcttttagtatagcgctctgtacatggctgatgttcagcaaatgtttcatgaatctgtcacatttgtggttgaagacatttcagtctttttagaagtccttttcatattctaattggtaatttatccttgagacaatattttgtaaaatgcttttattttttgttcttgtatttttatcagaataagccctaactcttcttgaggttactaccaggagttatgggtattgaaaagctcagtgcagcaacattctgatgtctttaggaatcagaagttataagaagtccttactctgatagtacctgataccttttaaaaaattgatgctatgaagcttcaaaggttggtttactagaagagactgagcacaagatc

SEQ ID NO: 138679 - DNA, 1413 bp, Homo sapiens
atttttattgttgaaacttaaaatattcctgttttttccactatagcttttcttattttttaaagaatgtttttcttaggataaataacaaatgtataactatctatagttagtggggaaaaaagatgattttaaggagagtttagaagtttaaacagtagtgagaaaacactgtggagcagaatgaggtttaagattctaaataatcactttttaagttctagccttttcagttgaattaagtatgaatcactaatgataaaggctatggggatataccctggacgagggcatactctgctctcgagtaacttacattttagtagaagaaattggataaacacaaaactaaatgcagtaagtattcaaataaacttagaagctattgtaagaacacaaagggaaggagacttcttgcttgggggtaggaatgaagatgacttcatggaggaggtagcatctgagctggttcttaatgaatgcataagatttggacaggctaggccgggcacggtggctcacgcctataatcccagcactttgggaggccgaggcaggcggatcacctgaggtcgggagttcgagaccagcctgaccaacatggagaaaccccatctctactaaaaatacaaaaattagctgggcgtggtggcgtgtccctgtagtcccagctacttgggaggccaaggcaggagaatcgcttgaacctggaggcagaggttgcagtgagctgaaattgcgccactgcactccagcctggtgacagagctagactccctctcaaaaaaaaaaaaaaaaaaaaggatttggccaggctaagatgggagaggaaaggcattactgaaggcatggaggtggggaatgtgcagaacatttgaggatgagcctagagagcaaagttagggctggattataggaatgccttatgtcatactaaactgtctgctttttatttatttatttatttattttttgagacttgagtctcgctctgttgcccaggctagagtgcagtggtgtgatctcagctcactgcaacctccacctcctgggttgaagcaattcttctgcctcagcctcccaagtagctgggtttacaccaacacaccaccacgccaggctaattttttatatttatttatttatttatttattttgtatttttagtagagatggggtttcaccatgttggccaggctggttttgaactcctgacctcagttgatccgcccacctcagcctcccaaagtgctgggattacaagcataagtcaccgtgtccggtcacagtgagctttttgcagcaaacaatgctttagcataatcatctctatgtgtgtcttggttctcattgttctcttagtctttccgttttcactatttcctaaaatccagaaaaaaatgacagggctag

SEQ ID NO: 138680 - DNA, 2578 bp, Homo sapiens
tgaggcaggagaattgcttgaacctgggaggcagaggttgcagtgagccaagatcgtgccactgcactccagcctgggtgacagagtgagactccatttcaaaaaagaaaaagaaaggaagggaaaagacaaggtggactgggtatttgaactcttttcatggtcctgccatcagtccacatagtggagtttaggtgtagtctgtttaagaatgttaatctccctgcatctgctggtttttgggtcataagcttgagttcagagctaaacaacttgaattcttctcctggggatttggattatcgtggtttggttaagtaggctcaaaccattaggctggtattacaacaagtttggcataaatatgtaaatgaatcaggatattgagtcttaatgtaagtttaggattgaacttgattttacaggattatttgatcttttgtacctaagtattaacacaaatttgctattatgagggttaagagtatagatgctggaatcaaactccctgggtttatacctgcttcatcacttactagctttgtgaccttggacaaatcatttgattagttccctaatttgtaaaatggtgacagtaggagtagaatctcataaggttgttgtaaagattaaaatatgtaaagtgttaagaacattgcctggcacatactaagtactatgtaaatgattagctgttactgtgttcttataaatagcttcatttttaaaaactacttttaaccctttcatcagattattgaaagtattattgaggagagtcagaaagtactacagcttgaagatgactctttggattccaaaggaaaagaactctctgatcaagctactgccagtcctattgtggctagaacagatctgagcaatatacccggactgttagccatagatcaagtactaccggaagaatcccaaaaggcagagagtcagaatacatttgaagagactgaattagaattaaaaaaatgctttccttctgatgaaacctgtgagaaaccagtagatgaaaccacgaagttaactcaaacaagttcaactgagcagcttaatgtgcttgaaactgaaacagaagtattgaacaaggaagcagtggaagtcaaaggaggtggtgatgttttagagcctgtgtcctcagactccttatctactaaagattttgccgctgtggaagaagtggcccctgccaaacccccaagacaccttactccagagcctgatatagtggctagtacaaagaagcctgttccagcacgcccacctcctccaactaatttcccacctcctagacccccacctccttctcgacctgctccaccaccaagaaaaaggaaaagcgaattggaatttgagactctgaaaactcctgatatagatggcaagtattaattgagaaatcactctgttggttgggcacagtggctcacgcctgtaatcccagcactttgggaggccaaggcgggcggatcgcttgagctcagttcaagaccagcctgggcaacatggcaaaaccccatctgagcaacaacaacaaaaaaaaatacaaaagttagctggccatggtggcacgcgcctgtagtcccagctacttgggaggctgaggcaggagagttgcttgggcctgggaggcagagactgcagtgagccaaggtcgcgccattgcactccagcctgggtgatcagagtgaaatcttgtctcaaaaaaaaaaaaaaagagagaaataactctttgtggtgaaattttggagttgaaactgtttacctttctgcctttatttcactttattaaaaaactcactggcaaccaagttattaaaattatttctttagtaatagacaaaatgtaaaaatgtttacattggtgaaaattactttactgtaattgaacacttcagcagacttcaaactttcaattctgttgccatctgagagagagtggcatggtgaaaaaaacttgggatttggagacctaaagtctgaattcaagtcctgcatcttttttttgtatgagctgtatagtcttgaggaaattaaataacttgtttgaaccatggtttccctgtataggaaatgagagtaatcaagccactttcctcacagggttgttacaagaatcaaacaaaaagggttgttattattgttgttattattatcattgcagttcccaaagagaatattacgtctgattctctcctaaccgcaagcatggcttcagaaagtacggttaaggattctcagccttctcttgatttggcaagtgctaccagtggagataaaatagttaccgcccaggttggtgaattagtgttctgtttcatatagactttatcagctccctgcaactggctggtttgttgatgattattctgtattctccaggccagatttttctttgtcctccaaacctgacccccttacttctcttgatcagctctgctacatgctaactgggtgagcctagcaagctgtttagcatctggatctcagatgccccatcaataaaatggaggaaaagtccttccttgagggtttgaaatgagctaaaatatgccaagtatctagc

SEQ ID NO: 138681 - DNA, 1050 bp, Homo sapiens
gtcaggtccatcatttaaattaaaattatatgggccgagcacagtggctcacacccgtaattctagcactttaggaggccaaggtgggtggattgcctgagctcaggagttcgacacgagcctgggcaacatggtgaaaccctgtctctactaaaatacaaaaaattagccagacatggtggtgtgcgcctatagtcccaagtactcaggaggctgaggcaggagaattgcttgaaccagggaggcggaggttgcagtgagccaagattgtgccactgcactgcagcttgggcgacagagcaagactccatctcctaaataaataaataaataattaaaattatgtaaagcttattagcgtagtttttcttattctgattaactggttatatagtaagtataaacagatttttaagaagtatagaagaaatggcttcttttaaaacaacttccccttcttacagtaatgacgcggcacagtcagatgatgaagagaagttacagtctcagccaacagatactgatggtggaaggttaaaacagaaaacgtgagttacagtacatcccttttcttcatttcaagtttttatttaaaaaaatatgagaactaccatactattttaaatcatgctccatgtagtttttatgtctacccaccaccattcctccctgtccctcgctgatgggttatgaagttgtattgattagttttaaagcatctgggctgggcgcaatggctcacgcctataatcccatcactttgggaggccaaggcaggcagatctcctgagatcaggggttcaagaccagcctggccaacatggtgaaaccccatctctactaaaaatacaaaaattagttgggcatgatgacaggtgcctgtaatcccagctacttgggaggctgaggcaggagaatcacttgaacccaggaggtggactccactgcactccagcctgggcgacagagcaagactccccctcaaaaaaaaaatggtaataataataaagcatctgacatacagaaaatgaccagtaagtgttgcaccat

SEQ ID NO: 138682 - DNA, 1024 bp, Homo sapiens
ctgtccctcatgagctcccatgaatcagtaaaaatttactcctgatttgtatttcttttggttttaaatatcatcatgtactgtgcattgctttttgtaatcttaatatatgaaatctgagacttagctaattgaaaatgcaataagtaagtcctatttatggaagcttgagatgcatacttagtttacctcgtatttgggaatacctactaggaaaactcagcctaattttattacatgcacctacccaaactgaaagagaagggacaagggaccatcttaagctaccaaagcattctattttgtgaggaaatatctctttactctttattggtaaaatgtgtttttaagaacagctctctaaagcagccttctcaaagcagttctcacccccagactctctaaattggattatctggggatggagctgaagtacctacactttaaacactcccctctccacactacctctgccaatcaatttttattcaccattgaaaaccaaagctctagaatatatgaatattgtaaattgggggaaagggtgtatgtttcctttgccatattgacttgaatatgtttattccatagaataagggatttggaactcaaacacctattatttatgtttaaaaaagttatttcaaagtagtgtactttatcagtcacagctgatacatttgtctgcaaattattggacttttacagttaactgagttgatacttttttcatttttgttaaggactcaactaaagaagtttcttggaaaatcagtaaagagagcaaagcaccttgctgaggaatatggtgaacgtgctataaataaagttaaaagtgttagagatgaaggtgagttaaaacagaacatttcaactaaacattcaattaatttgtaatcgtctaaatttagcctgtagtttgtaagaagcattctatttaaaatagtaaacctttatagctgacatcttagtatttcaataaataaggtactctatgacttaattttatgagtgtgaagaaaaa

SEQ ID NO: 138683 - DNA, 1042 bp, Homo sapiens
actgaagcctctgcctcctgggctcaagcagtcctccctcctcagcctcctgagtagctgggaccacaggtgcgcaccaccatgcctggctaattttttgtattttttgtagagatggggtttcgccatgttgcccaggctagtctcaaactcctgagctcaagtgatccacccgcctggacctcccaaagtgctgggattacaggcgcgtgccaccacgcccggcccattccaaaactgtaatacttctaagtgctggatgctatacgggtcactgccaaggtgggctttagtcttcctcagtcctgctcagttgttagtgctatgctgagggctctgccacccatctttacgttcagctaggggactaagatccccagctaggatttgtgcttttccaatgaagatttctgaccactttagaactcccatttctgttaatatgtggacagggtttgagttcttgaagttgttagtttagattatggaacactacaactatcttaccctacctttcttgtgaaagtctacttttgtggtattatagcaccattgaacttttggacttaagtagtgttagcaatttgagcattatcttagtatatgtaatttggcgtaattttaaactttggctttaaagtaatgtctctattttattttatttattattatttttagatagagtttcgcttttgttgcccaggctggagtgcaatggcgcggtcttgactcactgcacccttcacctcccaggttcaagtgatcctcctgcctcagcctcctaagtggctgggattacaggcgcccgccaccatgcccagctaatttttgtatttttagcagagatggggttttaccatgttggccaggctggtctcgaactcctgaccttaggtgatccacctgcctcagcctcccaaagtgctgagattacagacgtgagccaccatgccaggccaaaagtaaagtctctaaaggtgtaaagtattaactttgaaacttcttttgttttcatagggagctgtttggaccatgaaatttt

SEQ ID NO: 138684 - DNA, 1044 bp, Homo sapiens
ttattcctttccaggtgtagtgtgtagttaatttcatcaactattgagaacatgatatttggtttcctctggcaaccttcagttctatcctaggttaaaatagaattgctaattaaactggaaaaagaatgaaaatcatatatatccagtaagtaaaaatgattaaggaaaaagtcatggaaaatgaatgtgaattgtcaatatatcaagggatatatgaaaaaatgttgaaaagagaagcctcagaacattatgtacacactgattacaactatgtacagatatttatgtatcatggtgttatcaggaaagtatgtagaactgatgtaaatttgggctttaagttcatgggattcttttctaataactatttaactgtgtaataagttttttccacaccctccccgccatcaagtaaggctgcaaacgagaagtaaagcataggagaaaggagaagaaaggtggccatgggtgagagtatatagtcaaagcaccaatttgaggaacataaaagtctagggagattcactaaactggcaagctagacctcatatacttgagtaaatcctgtgagtattgcttgcattatgtttcagtacttagttgaagatgataataatttgacaagaagttaaactgtgtttactatatggtgagtttttctagtcctagctgtgtgtcatttcttttactgccctgccaagagcaaaaagactattttcagtggcccttgagactaaccccagccctgaacctttctgctcctttattgttcctcttgctacttgtcatgattaataagaatgtgttctattcgaatactgaggatttaacggtattttgtttactaaagtagggaaatggttaagccattttatgaagtttttatgtaaaaatgattgaaacaaatattttggctcctatagggttatgcctcaattgttagtatttttctagaatactgtattctctaactattagacattgctgtgtcattacttctggatgttatattttggtgggtctgtgtgtgtacatacatgc

SEQ ID NO: 138685 - DNA, 1043 bp, Homo sapiens
aactcctgacctcaagtgatcctcccacctcggccccccaaagtgctgggattacaggcgtgagccaccatgcccagccttgcggtttaaaatcttttgacggccctttatctcccccacaataagattcttccctgtattgcctaatcttaacttttgactcagttccaattccctagtgcctgtgcatcctaccagccgtgcctgatacaggtctgtacactataaacactttcactttcatgtctctgtccctgctgtttgctttgccttcacagggcaaagccctacttatccttcaagattcagctcaaatatcttattattttccctgaatccagcagataaaattgttcttcatttgtattctaatagtacatcataggtacttttatactgatattaccatgtctttcttgttagtctccctggctaggctctgggctgattgaaggcaaagaactgtacttcacagattttagtatccttggaatctaattccattcctgactgtagcaggcccataatcatgttgaattcctgcctgtggaccttattcctattgttccccttatttggatgccttgatcatctttctattcaaagcatgcccattcttcatggcccgcttcctccataaagcctcactgactaatgtagcagagataattttaactgctttgctttagggaaaagggcttgcttttattagtttaatttaccatacagtttccaggcattgattactattaaaaatagagactatctgtagtatcttttattgcgcttatttcagcaatcctacttatagatcctcagctacatccatctaaccccaaacagacctaagtaactcacaattttattgaatacaaagcctttttacatgagaaataacatttatatccattgttttcaggaagagatcatttggggtttgtttcccttctgtcattttatttggggacagttaaaagaggcttctatttcacatgccattagagtttgacaccagaaattatcttctaacctagtgctagcca

SEQ ID NO: 138686 - DNA, 1050 bp, Homo sapiens
gccccaagagactgtaatatcctcaagccagggaaagaccagctaagacaaggtaagtgaaagtgagcctcagagcagaggagagattcagcagaatgaaagaattacaggagccagccagaaaaggagactgaaaaggtggggagatgatcttctcccctgaagctggagggtcatgggcatgtgataattgtggcagcaggcttcatattcctttaaaaatcaacttaaaactattttttatacttttaaggtattatgaagacagataacacagaagttcttctctctgctgacttcactggagcaatcaaagtgtttgttaataaaagaaaaaatgtatcttaatttgaaatggcatttaaaataaacatatcagtaagtttctatatgtatcaaaactgaaaaaatagtgttccaggctaacatacttttttaatttttattgaaagttgttcaaatataatatattttttgagaggcagtgttaatgatctaggaaaccctgggctgatagagtagaaaggaatatggctagaataacattgccaaacattaggctttatgttttgttatgtttgtgttttcgttgtataattatgaacatgcacaagtttctgcatgaaaagatattaatatattaatcacatgtatgtgccttttggttacatgcattaaatctaacagagttaaattatttcagtggctcttttggcctcttactaggggggatagtcttgtttctagcttaaacaattttttttttgcacaaaatttcatttttaataaaagtggtatcttttgactgagttattgttttgaaaatggtatataggtttccagtaggtcaacaaccatatgtaaatggtttttataaatttctcaatttggggacaagatttttttgtggtctaaattgtgggcttaagattcttttctttatatgtgtacatataatttttttttctttgccacactggagcacaatgtttctatgtaaagaattattttcattctttatccatgagcaccaggctttgctcacttaaa

SEQ ID NO: 138687 - DNA, 1106 bp, Homo sapiens
cccggcacggcggaggcgtgcgccgggatggaagcagacgggcaaaagccgggctcggacggctgcggaggaggcggaggcggaggctcccacccagggtcggggccgggggtgtgagctaaagagctgacctcgcgctgctctggactcggcacaaagagccggggacaagggcacgacgagatcctgatcccctcccgcgagcacctgaggccgcctaggcggaaggatgcgatgagcgtttggcacacacactctcgcgcgcacacatacacacactgtgtacacaaaaaagaaccccacccagaaagccccgggcgcccaagctcgggctggcggtgagaacagaggaagcagagcgacttcctcctgcaactggggagagagggtggtgatgggtgttgaaggggtgctgctgcggaggaagggcattagaaacaacggggttctgcgacagagtgggcgcagggtcatccaccgcagggagagtgtgtccctcggggacacgcgagcgctccagaggcaaggggaccaaggggacggtgccgtggggatttgggggaagactgggtgtgtcagtccagggatggaggacctggggtcagagccccacagctcaggactgggggatggggattcgaaagcgcgctgactccctgggaaccctcccagagcaccctcagccttatccagattgtctgactctggagaaaggctaaagggtgctaacgggcacttgccccttctcttgttttcaagacactcgttgccagtttcctggacaagcgaacaaaccctgaataagcaatcggactgattaattagtgtttgttttgttactttgttttttggttgttgtttttgtttgtttttgtctccctcagctccattttacagcgagtcgtttgctgtgtttaaatttcaccgtttaagagagggctctttttgttaaaacaacttgtcatcggaagggaacttcacagcttttccttgtaatttttctgttgatcttgtagaatcagcaataaaacccagcattaaagggaggccaggggcttgatcccaacagtggagaaagttgacattagtgggagttctggaggagg
